(19) United States
(12) Patent Application Publication
(10) Pub. No.: US 2023/0074892 A1
(43) Pub. Date: Mar. 9, 2023

(54) BACTERIOPHAGE COMPOSITIONS AND USES THEREOF

(71) Applicant: YALE UNIVERSITY, New Haven, CT (US)

(72) Inventors: Paul Turner, New Haven, CT (US); Alita Burmeister, Hamden, CT (US); Benjamin Chan, Salt Lake City, UT (US); Kaitlyn Kortright, New Haven, CT (US); John Wertz, Cheshire, CT (US)

(21) Appl. No.: 17/609,225

(22) PCT Filed: May 7, 2020
(86) PCT No.: PCT/US20/31855

§ 371 Date: Nov. 5, 2021

Related U.S. Application Data
(60) Provisional application No. 63/017,369, filed on Apr. 29, 2020.
(60) Provisional application No. 62/844,515, filed on May 7, 2019.

(51) Int. Cl. A61K 35/76; C12N 7/00; A61P 31/04

(52) U.S. Cl. CPC A61K 35/76; A61P 31/04; C12N 7/00

(57) ABSTRACT

The present invention includes compositions and methods for increasing antibiotic sensitivity and/or decreasing virulence in bacteria.

### CROSS-REFERENCE TO RELATED APPLICATION

[0001] The present application is entitled to priority under 35 U.S.C. § 119(e) to U.S. Provisional Patent Application No. 62/844,515 filed May 7, 2019 and U.S. Provisional Patent Application No. 63/017,369, filed Apr. 29, 2020, each of which are hereby incorporated by reference in their entireties herein.

### STATEMENT REGARDING FEDERALLY SPONSORED RESEARCH OR DEVELOPMENT

[0002] This invention was made with government support under AI144345 awarded by National Institutes of Health and under 0939454 awarded by the National Science Foundation. The government has certain rights in the invention.

### BACKGROUND OF THE INVENTION

[0003] Widespread and inappropriate uses of chemical antibiotics have selected for multi-drug resistant (MDR) bacterial pathogens, presenting more frequently in human infections and contributing significantly to morbidity. Some bacteria even show evolved resistance to ‘drugs of last resort’, resulting in emergent strains that are pan-drug-resistant (PDR). One example is the Gram-negative bacterium, Pseudomonas aeruginosa, a prevalent opportunistic MDR pathogen that is poised to become a common PDR disease problem. Humans readily encounter P. aeruginosa, which thrives in both natural and artificial environments, varying from lakes and estuaries to hospitals and household sink drains. P. aeruginosa causes biofilm-mediated infections, including catheter associated urinary tract infections, ventilator associated pneumonia, and infections related to mechanical heart valves, stents, grafts and sutures (Cole, S. J., et al., Infection and Immunity 82, 2048-2058 (2014)). Individuals with cystic fibrosis, severe burns, surgical wounds and/or compromised immunity are particularly at risk for P. aeruginosa infections, especially acquired in hospitals.

[0004] P. aeruginosa is a ubiquitous Gram-negative, rod-shaped bacterium prevalent in natural and artificial environments (Remold, S. K., et al. Microb Ecol. 62(3), 505-17 (2011)). Adaptation to different habitats has allowed P. aeruginosa to persist in many human-associated environments, most notably in hospitals, where it is increasingly associated with nosocomial infections (Emori, T. G., et al., Clin Microbiol Rev. 6(4), 428-42 (1993)). These infections are difficult to manage, in part due to intrinsic antibiotic resistance resulting from decreased membrane permeability, active antibiotic efflux, and other chromosomally encoded enzymes. Further complicating the problem of P. aeruginosa infections are their ability to form biofilms, herein referred to as “P. aeruginosa biofilms” or “Pseudomonas aeruginosa biofilms”. Biofilm-mediated infections are notoriously difficult to manage, having seemingly much higher resistance to chemical antimicrobials (Stewart, P. S., et al., Lancet 358(9276), 135-08 (2001)) and often form following sub-lethal concentrations of antibiotics (Hoffman, L. R., et al., Nature 436(7054), 1171-5 (2005)). This elevated resistance may be due to exopolymeric substances in the biofilm matrix that slow diffusion of antibiotics and reduce effective concentrations. Furthermore, slow-growing cells present in the biofilm (e.g., persister cells) may have sufficiently reduced metabolisms to withstand bacteriostatic antibiotics that target metabolically active bacteria (Lewis, K. Biochemistry (Mosc). 70(2), 267-74 (2005)). As a result, biofilms may also act as a reservoir for the dissemination of infections throughout the body which could greatly prolong infection duration and severity. Prosthetic vascular graft infections are of significant concern due to the elevated mortality and morbidity rates. A common culprit, P. aeruginosa, presents a serious challenge due to its intrinsic antibiotic resistance and ability to form biofilms on prosthetic material.

[0005] Prosthetic vascular graft infections are catastrophic events which present serious challenges to surgeons and place heavy economic burdens on patients and the healthcare system. The reported incidence can vary from 0.6% to 9.5% depending on the site of the vascular graft (Kieffer, E., et al., J Vasc Surg. 33(4), 671-8 (2001); Schild, A. F., et al., J Vasc Access 9(4), 231-5 (2008)). There are currently no clear algorithms for the management of prosthetic vascular graft infections. The basic principles, however, involve systemic antibiotics, debridement of infected tissue, partial or complete graft excision, and secondary revascularization (Bunt, T. J. Cardiovasc Surg. 9(3), 225-33 (2001)). However, many patients presenting with vascular graft infections have significant comorbidities and are often critically ill, making surgical management even more difficult and in certain cases ill-advised. Despite best management, mortality and morbidity rates remain high with conservative estimates for both over 20% (O'Connor, et al., S. J Vasc Surg. 44(1), 38-45 (2006); Perera, G. B., et al., Vasc Endovascular Surg. 40(1), 1-10 (2006)). Reinfection rates are also significant after initial treatment, highlighting the inadequacy of current treatment modalities at eradicating the infecting organism. As the number of procedures involving vascular grafts continues to rise with an aging population and increasing prevalence of atherosclerosis and diabetes, new strategies are sorely needed.

[0006] P. aeruginosa infections are notoriously difficult to manage due to low antibiotic permeability of the outer membrane and mechanisms of antibiotic resistance that allow cross resistance to multiple classes and types of antibiotics. Clinically significant levels of antibiotic resistance are mostly caused by interplay between the efficient outer membrane (OM) permeability barrier, ubiquitous periplasmic β-lactamases, and multi-drug resistance (MDR) efflux pumps. These pumps have broad substrate specificity and may act synergistically with the permeability barrier to result in significant intrinsic resistance to many antimicrobials. These pumps expel the antimicrobial from the cell into the surrounding space, and the antimicrobials then have to pass through the OM permeability barrier to regain entry to the cell. Thus, the MDR pumps can effect significant resistance even when their transporter activity is quite low, as long as the OM functions as an effective barrier.

[0007] Synergy between efflux and the permeability barrier is necessary for effective drug resistance. Efflux pumps are transport proteins that are found in both Gram-positive and -negative bacteria, as well as in eukaryotic organisms. Pumps may be specific for one substrate or may transport a range of structurally dissimilar compounds (including antibiotics of multiple classes); such pumps can be associated with multi-drug resistance (MDR). Efflux pumps can also impact iron uptake, bile tolerance, quorum sensing, and other host colonization factors.

[0008] In the bacteria domain, there are five major families of efflux transporter: MF (major facilitator), MATE (multidrug and toxic efflux), RND (resistance-nodulation-division), SMR (small multidrug resistance) and ABC (ATP binding cassette). All these systems utilize the proton motive force as an energy source, apart from the ABC family, which utilizes ATP hydrolysis to drive the export of substrates. Transporters that efflux multiple substrates, including antibiotics, did not arise in response to the stresses of the antibiotic era. All bacterial genomes studied contain several different efflux pumps; this indicates their ancestral origins. It has been estimated that ˜5-10% of all bacterial genes are involved in transport and a large proportion of these encode efflux pumps.

[0009] The interaction between selection from antibiotics and phages, along with its role in driving bacterial evolution, remain unclear, in part because these interactions depend on the environment, specific phage species, and the bacterial hosts involved in these interactions. Potential evolutionary interactions between drug resistance and phage resistance mechanisms in bacteria have been previously identified, including both positive and negative interactions that are highly genotype-dependent. For example, Pseudomonas aeruginosa bacteria that evolve resistance to phage 14/1 simultaneously become more resistant to antibiotics, whereas P. aeruginosa that evolve resistance to phage tivp become less resistant to antibiotics.

[0010] Escherichia coli, bacteria that evolve resistance to phage TLS also lose antibiotic resistance. Such interactions demonstrate that multiple selection pressures sometimes cause bacteria to evolve mutations with trade-up potential (the ability to increase fitness on two traits simultaneously), whereby phages contribute to the problems of increased antibiotic resistance and virulence; in other cases, the mutations have trade-off potential, whereby phages reduce the problem of antibiotic resistance. In both cases of trade-offs and trade-ups, the mutation selected for one function has a pleiotropic effect on another function. This type of pleiotropy, sometimes called molecular gene pleiotropy occurs when a single gene affects multiple traits. For example, the evolution of bacterial resistance to phage can occur via mutations that also decrease cellular resource acquisition (a form of antagonistic pleiotropy), and mutations that improve bacterial growth on one carbon source may improve fitness during growth on another (a form of synergistic pleiotropy). In these ways, pleiotropy can have significant effects on evolution within bacterial populations, shifting phenotypes that are not directly selected.

[0011] Pleiotropy in the evolution of phage resistance and antibiotic resistance can result in either decreased (antagonistic pleiotropy) or increased (synergistic pleiotropy) sensitivity to antibiotics. Bacteria-phage interactions can be highly dependent on cell membrane proteins and other surface structures, such as outer membrane proteins and lipopolysaccharides, and in some cases, those structures also contribute to antibiotic resistance. In particular, multi-drug efflux pumps are protein complexes spanning the inner and outer membranes of some bacteria, such as the homologous TolC-AcrAB system in E. coli and OprM-MexAB system in P. aeruginosa. These efflux systems confer resistance to multiple antibiotics, acting as generalized transporters for multiple antibiotic classes as well as detergents, dyes, and bile acids. The outer membrane protein (OMP) components (TolC or OprM) are membrane-spanning beta barrels, with peptide loops that extend outside of the cell. The extracellular loops of OMPs are frequently exploited by phages as the specific binding sites for initiating phage infection. When phages use these OMPs as receptors, bacteria face selection for reduced or modified OMPs. Phages that use OMPs involved in antibiotic resistance, like the previously-characterized TolC-targeting phage TLS, might impose selection on bacterial populations to evolve phage resistance while pleiotropically losing antibiotic resistance.

[0012] A need exists in the art to develop alternative methods for the management of antibiotic efflux of MDR in bacteria, like P. aeruginosa and E. coli. The present invention addresses this need.

### SUMMARY OF THE INVENTION

[0013] As described herein, the present invention relates to compositions comprising bacteriophage OMKO1, LPS-5, TIVP-H6, LPS-TLTL, TIVP-27, SFA1-1, SF60B, SFNHSI, SF37B, PG-I1, and U136B, and methods of use thereof.

[0014] In one aspect, the invention provides a method of increasing antibiotic sensitivity and/or decreasing virulence in a pathogenic bacteria. The method comprises contacting the bacteria with a lytic bacteriophage selected from the group consisting of OMKO1, LPS-5, TIVP-H6, LPS-TLTL, TIVP-27, SFA1-1, SF60B, SFNHSI, SF37B, PG-I1, and U136B.

[0015] In certain embodiments, the bacteria are contacted with bacteriophage at a multiplicity of infection of bacteriophage to bacteria in the range of about 0.05 to about 50.

[0016] In certain embodiments, the bacteriophage binds at least one molecule selected from the group consisting of an O-antigen, efflux pump, Type IV pilus, LPS (core), OmpA, OmpC, TolC, and peptidoglycan in the bacteria. In certain embodiments, the bacteriophage binds TolC and LPS.

[0017] In certain embodiments, the bacteriophage binds a protein of a Mex efflux pump. In certain embodiments, the Mex efflux pump is a surface exposed protein. In certain embodiments, the Mex protein is selected from the group consisting of OprM, MexA, MexB, MexX, and MexY.

[0018] In certain embodiments, the method further comprises contacting the pathogenic bacteria with an antibiotic.

[0019] In certain embodiments, the pathogenic bacteria is drug resistant. In certain embodiments, the pathogenic bacteria is a multi-drug resistant (MDR) bacteria.

[0020] In certain embodiments, the bacteriophage comprises a nucleotide sequence at least 80%, 85%, 90%, 95%, 96%, 97%, 98%, 99%, or 100% identical to any one of SEQ ID NOs: 1-13.

[0021] In certain embodiments, the bacteriophage is administered to a subject in need thereof.

[0022] In another aspect, the invention provides a pharmaceutical composition comprising one or more lytic bacteriophages selected from the group consisting of OMKO1, LPS-5, TIVP-H6, LPS-TLTL, TIVP-27, SFA1-1, SF60B, SFNHSI, SF37B, PG-I1, and U136B.

[0023] In certain embodiments, the bacteriophage binds at least one molecule selected from the group consisting of an O-antigen, Type IV pilus, LPS (core), OmpA, OmpC, TolC, and peptidoglycan on multi-drug resistant (MDR) bacteria.

[0024] In certain embodiments, the one or more bacteriophages comprise a nucleotide sequence at least 80%, 85%, 90%, 95%, 96%, 97%, 98%, 99%, or 100% identical to any one of SEQ ID NOs: 1-13.

[0025] In certain embodiments, the pharmaceutical composition further comprises an antibiotic.

[0026] In another aspect, the invention provides a method of treating a bacterial infection in a subject in need thereof. The method comprises administering any of the pharmaceutical compositions disclosed herein to the subject with the bacterial infection.

[0027] In certain embodiments, the pharmaceutical composition is administered directly to a site of the bacterial infection.

[0028] In certain embodiments, the method further comprises administering an antibiotic to the subject. In certain embodiments, the antibiotic is administered before or after or co-administered with the pharmaceutical composition.

[0029] In certain embodiments, the bacterial infection is drug resistant. In certain embodiments, the bacterial infection is multi-drug resistant.

[0030] In certain embodiments, the pathogenic bacteria is associated with a biofilm. In certain embodiments, the pathogenic bacteria is in a biofilm.

[0031] In certain embodiments, the pathogenic bacteria is Pseudomonas aeruginosa, a Shigella species, Staphylococcus aureus, or Escherichia coli.

[0032] In another aspect, the invention provides a method of disrupting a pathogenic bacteria associated with a biofilm. The method comprises contacting the bacteria with a lytic bacteriophage selected from the group consisting of OMKO1, LPS-5, TIVP-H6, LPS-TLTL, TIVP-27, SFA1-1, SF60B, SFNHSI, SF37B, PG-I1, and U136B.

[0033] In another aspect, the invention provides a method of preventing formation of a biofilm on a surface. The method comprises contacting the surface with a lytic bacteriophage selected from the group consisting of OMKO1, LPS-5, TIVP-H6, LPS-TLTL, TIVP-27, SFA1-1, SF60B, SFNHSI, SF37B, PG-I1, and U136B.

[0034] In certain embodiments, the bacteriophage binds a molecule selected from the group consisting of an O-antigen, efflux pump, Type IV pilus, LPS (core), OmpA, OmpC, and TolC in the bacteria and the bacteria either genetically resists bacteriophage infection or becomes infected and lysed by the bacteriophage, wherein the genetically resistant bacteria have impaired efflux pumps and increased sensitivity to one or more antibiotics.

[0035] In certain embodiments, the method further comprises contacting the bacteria or surface with the one or more antibiotics.

[0036] In another aspect, the invention provides a composition comprising an LPS-5 bacteriophage targeting Pseudomonas aeruginosa, the bacteriophage having a genome comprising a nucleic acid sequence comprising SEQ ID NO: 1.

[0037] In another aspect, the invention provides a composition comprising an OMKO1 bacteriophage targeting Pseudomonas aeruginosa, the bacteriophage having a genome comprising a nucleic acid sequence comprising SEQ ID NO: 2.

[0038] In another aspect, the invention provides a composition comprising a TIVP-H6 bacteriophage targeting Pseudomonas aeruginosa, the bacteriophage having a genome comprising a nucleic acid sequence comprising SEQ ID NO: 3.

[0039] In another aspect, the invention provides a composition comprising an LPS-TLTL bacteriophage targeting Pseudomonas aeruginosa, the bacteriophage having a genome comprising a nucleic acid sequence comprising SEQ ID NO: 4.

[0040] In another aspect, the invention provides a composition comprising an TIVP-27 bacteriophage targeting Pseudomonas aeruginosa, the bacteriophage having a genome comprising a nucleic acid sequence comprising SEQ ID NO: 5.

[0041] In another aspect, the invention provides a composition comprising an SFA1-1 bacteriophage targeting a Shigella spp. bacteria, the bacteriophage having a genome comprising a nucleic acid sequence comprising SEQ ID NO: 6.

[0042] In another aspect, the invention provides a composition comprising an SF60B bacteriophage targeting a Shigella spp. bacteria, the bacteriophage having a genome comprising a nucleic acid sequence comprising SEQ ID NO: 7.

[0043] In another aspect, the invention provides a composition comprising an SFNHSI bacteriophage targeting a Shigella spp. bacteria, the bacteriophage having a genome comprising a nucleic acid sequence comprising SEQ ID NO: 8.

[0044] In another aspect, the invention provides a composition comprising an SF37B bacteriophage targeting a Shigella spp. bacteria, the bacteriophage having a genome comprising a nucleic acid sequence comprising SEQ ID NO: 9.

[0045] In another aspect, the invention provides a composition comprising a PG-I1 bacteriophage targeting Staphylococcus aureus, the bacteriophage having a genome comprising at least one nucleic acid sequence selected from the group consisting of SEQ ID NOs: 10-12.

[0046] In another aspect, the invention provides a composition comprising a U136B bacteriophage targeting E. coli, the bacteriophage having a genome comprising a nucleic acid sequence comprising SEQ ID NO: 13.

[0047] In another aspect, the invention provides a method of treating a bacterial infection in a subject in need thereof. The method comprises administering to the subject a therapeutically effective amount of any of the compositions disclosed herein.

[0048] In certain embodiments, the bacterial infection is drug-resistant or multi-drug resistant.

### BRIEF DESCRIPTION OF THE DRAWINGS

[0049] The following detailed description of specific embodiments of the invention will be better understood when read in conjunction with the appended drawings. For the purpose of illustrating the invention, there are shown in the drawings exemplary embodiments. It should be understood, however, that the invention is not limited to the precise arrangements and instrumentalities of the embodiments shown in the drawings.

[0050] FIGS. 1A-1D illustrate the finding that phage U136B relies on TolC. FIG. 1A shows an efficiency of plating receptor screen of phage U136B reveals TolC as the candidate outer membrane protein receptor. A phage that produces an equal number of plaques on a knockout as on wild-type bacteria has an EOP of 1.0 (dotted line). A “bd” at the lower, dashed line indicates that the efficiency of plating was below the limit of detection (˜10⁴). FIG. 1B shows genetic complementation with a plasmid containing tolC fully restores plaquing ability by phage U136B on a tolC knockout. Error bars=95% CIs. FIG. 1C is a series of bacterial growth curves showing that phage U136B lyses wild type bacteria in liquid culture (˜1.5 h) but has no effect on the tolC knockout in liquid culture. FIG. 1D shows single-step growth curves that confirm phage U136B cannot grow on a tolC knockout in liquid culture.

[0051] FIGS. 2A-2C illustrate the finding that phage U136B relies on lipopolysaccharide. FIG. 2A shows results from an efficiency of plating screen of phage U136B on LPS synthesis gene knockouts revealing genes important to phage replication: rfaC, rfaD, rfaE, and rfaP. FIG. 2B shows genetic complementation with plasmids containing respective rfa genes fully restores plaquing ability by phage U136B on the knockouts. Error bars=95% CIs. FIG. 2C is a schematic of genes involved in LPS synthesis, showing that the genes required by U136B affect the deep region of core polysaccharide (figure adapted from Chang et al (2010) Journal of Experimental Microbiology and Immunology 14:101-107, Yethon et al (2000) Journal of Bacteriology 182(19):5620-5623).

[0052] FIGS. 3A-3I illustrate the trade-offs between phage resistance and antibiotic resistance. FIGS. 3A-3B show MICs for phage-resistant isolates from the fluctuation experiment. FIGS. 3D-3E show MICs for phage-resistant isolates evolved in +phage treatment communities. FIGS. 3G-3H show MICs for phage-sensitive isolates evolved in control −phage populations. FIGS. 3C, 3F, and 3I show a phage-mediated trade-off between colistin resistance and tetracycline resistance is evident in the fluctuation experiment (FIG. 3C), but this result is alleviated after evolution (FIG. 3F) and doesn't appear in the control treatment (FIG. 3I). In FIGS. 3C, 3F, and 3I, a jitter of ±7.5% has been added to the data points for visualization but regression lines are based on the original, non-jittered data.

[0053] FIGS. 4A-4B illustrate the evolution of antibiotic sensitivity in bacterial populations while under selection for phage resistance. FIG. 4A shows total bacterial population densities, and FIG. 4B shows tetracycline-resistant bacterial densities, in the presence and absence of phage.

[0054] FIG. 5 is a table illustrating phage U136B has a limited host range within E. coli, plaquing on strains with and without the LPS O-antigen. EOP=efficiency of plating (mean of three replicates). NA=not applicable.

[0055] FIG. 6 is a table illustrating the phage resistant mutations isolated from the fluctuation experiment. ^{a}A “Δ” indicates deletion of indicated base pairs or gene. A * indicates a point mutation resulting in a stop codon. Values in parentheses indicate either single substitutions or the location of either a stop codon or IS-element insertion within coding sequences. Underlined bases indicate single substitutions. ^{b} Concentrations tested were 0.125, 0.25, 0.5, 1.0, 2.0, and 4.0 μg/mL, so discrete value listed may be greater than the actual MIC but not more than the next highest value tested. Values are the mode of 4-5 replicates tested for each mutant. ^{c}All rfa gene names are synonymous with the corresponding waa gene names used in the BW25113 annotation. Mutations are reported in the rfa form for readability (e.g., waaP is equivalent to rfaP). ^{d}Concentrations tested were 12.5, 25, 50, 100, 150, 200, 250, 300, 350, and 400 ng/mL, so discrete value listed may be greater than the actual MIC but not more than the next highest value tested. Values are the mode of 4-7 replicates tested for each mutant. ^{e}The 48-gene deletion included LPS synthesis gene gmhA (also called lpcA), which codes for a phosphoheptose isomerase involved in LPS synthesis. A full list of the 48 genes and their annotations is included in FIG. 15. Gene ydeM putatively encodes a YdeN-specific sulfatase-maturating enzyme.

[0056] FIG. 7 is a table illustrating phage resistance mutations arising during experimental communities with and without phage. Control MIC values for BW25113 and tolC mutant are from the same dataset reported in FIG. 6. ^{a}A “A” indicates deletion of indicated base pairs or gene. A * indicates a point mutation resulting in a stop codon. Values in parentheses indicate either single substitutions or the location of either a stop codon or IS-element insertion within coding sequences. Underlined bases indicate single substitutions. ^{b} Concentrations tested were 0.125, 0.25, 0.5, 1.0, 2.0, and 4.0 μg/mL, so discrete value listed may be greater than the actual MIC but not more than the next highest value tested. Values are the mode of 3-4 replicates tested for each strain. ^{c}Concentrations tested were 12.5, 25, 50, 100, 150, 200, 250, 300, 350, and 400 ng/mL, so discrete value listed may be greater than the actual MIC but not more than the next highest value tested. Values are the mode of 2 replicates tested for each mutant. ^{d} narZ: nitrate reductase 2 (NRZ), alpha subunit; ryiB: novel sRNA, function unknown; arsC: arsenate reductase; yhiS: putative uncharacterized protein; bglH is a cryptic carbohydrate-specific OMP gene; metE is a 5-methyltetrahydropteroyltriglutamate-homocysteine S-methyltransferase gene; lplT is a lysophospholipid transporter gene.

[0057] FIG. 8 is a transmission electron micrograph showing phage U136B has a siphophage morphology.

[0058] FIG. 9 shows Kirby-Bauer disk-diffusion assay measurements for colistin sensitivity have high variance but yield similar relative results to the microbroth dilution method. The control strains (DrfaD and DrfaH) and phage resistant mutants (RGB-036 to RGB-079) had increased sensitivity to colistin compared to ancestor. Phage resistant mutants RGB-040, 045, and 071 contain tolC mutations. Error bars show SEM of 11 to 19 independent measurements of each strain.

[0059] FIG. 10 illustrates the finding that phage-resistant mutants vary in fitness costs. Bacterial growth curves include wild type bacteria (BW25113), tolC phage-resistant mutants, and LPS-related mutants listed in FIG. 6. Each line shows the mean of three biological replicates.

[0060] FIGS. 11A-11B illustrate location of point mutations and small INDELS in the TolC amino acid sequence for strains from the fluctuation experiment (FIG. 11A) and evolution experiment (FIG. 11B). Insertion-sequence (IS) mediated mutations are not shown. (Figure adapted from Koronakis et al. (2000) Nature 405:914-919).

[0061] FIG. 12 is a table illustrating bacteria and phage used in the study.

[0062] FIG. 13 is a table illustrating sensitivities to colistin in rfa gene knockouts. Data summarized from Table S18 of the genome-wide screen reported by Liu et al. 2010 Antimicrob Agents Chemother 54(4):1393-1403.

[0063] FIG. 14 is a table illustrating phage extinction dynamics during the evolution experiment. Timing of phage extinctions was based on plating filtered phage samples as spot tests, top agar overlays, or both. At Day 10, Population +9 was not detectable in the serial dilution spot test, but it did have plaques appear in the filtered phage sample.

[0064] FIG. 15 is a table illustrating genes in the 48-gene deletion. The only gene readily related to LPS synthesis is smhA (row 6), a phosphoheptose isomerase involved in core polysaccharide synthesis.

[0065] FIG. 16 is a table illustrating mutations in experimentally evolved Tet^{R} isolates. ^{a}A “Δ” indicates deletion of indicated base pairs or gene. Values in parentheses indicate either single substitutions, or the location of a stop codon, INDEL, or IS-element insertion within coding sequences. Underlined bases indicate single substitutions. ^{b} All rfa gene names are synonymous with the corresponding waa gene names used in the BW25113 annotation. Mutations are reported in the rfa form for readability (e.g., waaP is equivalent to rfaP). ^{c}gatR: pseudogene, repressor for gat operon, interrupted by IS3, split galactitol utilization operon repressor, fragment 2, split galactitol utilization operon repressor, interrupted; ^{d}argV one of seven arginine tRNAs. ^{e}moaB: inactive molybdopterin adenylyltransferase ^{f}yaiX: pseudogene, interrupted by IS2A, acetyltransferase homolog, nonfunctional, interrupted by IS2, putative transferase; ^{g}metE: 5-methyltetrahydropteroyltriglutamate-homocysteine S-methyltransferase; ^{h}lpIT: lysophospholipid transporter.

[0066] FIG. 17 is a table illustrating statistical analysis for phage-mediated trade-offs between colistin resistance and tetracycline resistance. The trade-off is only observed among fluctuation assay mutants (“Fluctuation” model) and not after 10 days of evolution with phage (“Evolution+Phage” model) or in the control populations (“Evolution-Phage” model).

[0067] FIG. 18 illustrates phage that target Shigella flexneri bacteria. Phages SF37B and SF60B cannot kill bacteria where OmpA and/or OmpC are missing. A plasmid with OmpA or OmpC can ‘rescue’ killing but empty plasmid cannot.

[0068] FIGS. 19A-19D illustrate S. flexneri phage SFA1-1. FIG. 19A shows data from the “cross-streak” method showing the phage cannot kill (disrupt bacteria growth) when bacteria lack OmpA. In contrast, the phage effectively disrupts wild-type (M90T) growth. FIG. 19B shows phage SFA1-1 cannot kill bacteria where OmpA is missing; a plasmid with OmpA can ‘rescue’ killing but empty plasmid cannot. FIG. 19C shows phage SFA1-1 prevents wild type (M90T) from growing (but phage-resistant mutants appear and grow around hour 14). In contrast, M90T, M90T without OmpA, and OmpA knockout plus phage all grow roughly equally. FIG. 19D shows results from absorption (attachment) assays showing phage binding (disappearance from media) occurs only on wt and ompA plasmid-rescue strains.

[0069] FIGS. 20A-20B illustrate details of phage SFA1-1 genetics and molecular biology. SFA1-1 was isolated from waste water in Cuatro Cinenegas, Mexico. It belongs to the Myoviridae family (likely Tevenvirinae), is a dsDNA virus, 105,517 bp contig assembled, 139 CDS, and GC content 35.89% (S. flexneri GC content 50.9%).

[0070] FIG. 21 illustrates phage that target Pseudomonas aeruginosa. Related data for LPS5 phage: PA01 bacteria have a frequency of resistance to LPS5 equal to ˜ 7.2×10-4 (i.e., mutants observed at roughly 1 in 7,200 cells).

[0071] FIGS. 22A-22B illustrate P. aeruginosa phage TIVP-H6. FIG. 22A shows burst assay data that estimate phage TIVP-H6 growth traits on PA14 bacteria. Burst size—14.8 particles released per infected cell; Latent/Eclipse time—40 minutes. FIG. 22B illustrates InSeq Screen to test for putative binding of TIVP-H6 on PA14 bacteria. Every point is a normalized counts-per-million read for a single gene. Statistically significant genes included those involved in Type IV pilus biogenesis; strongly suggests Type-IV pilus is binding target.

[0072] FIG. 23 illustrates P. aeruginosa phage TIVP-H6 causes trade-off where bacteria evolve resistance that causes reduced pyocyanin production. Shown is bacteria pyocyanin relative to untreated control. Ciprofloxacin, Tetracycline, Nalidixic acid, Carbenicillin, and Dead (heat inactivated) phage TIVP-H6 do not reducte production. But phage TIVP-H6 reduces pyocyanin production on par with Eythromycin, and in combination with Cip and Ery. When P. aeruginosa bacteria are exposed to treatments along x-axis, the supernatant of the culture is tested for pyocyanin level. Exposure to TIVP-H6 yielded lowest level, such that bacteria die from phage attack and remaining mutants are phage resistant and produce very low pyocyanin levels, comparable to Ery which does not kill bacteria in this assay but causes reduced pyocyanin production. Thus, H6 does both, and works well in presence of Ery and other antibiotics that do not affect pyocyanin or even cause increase.

[0073] FIG. 24 illustrates P. aeruginosa phage LPS-5 causes trade-off where bacteria evolve resistance that causes reduced elastase production. Classic congo-elastase assays confirmed that elastase production in culture supernatant was below the limit of detection when bacteria were grown for 48 hours. Data compared wildtype PA01 and 3 spontaneous phage-resistant mutants of PA01.

### DETAILED DESCRIPTION OF THE INVENTION

[0074] As more alternative therapies are considered to combat the rise of antibiotic resistant biofilm-associated infections, the use of bacteriophages, as described herein, presents a novel strategy to manage these difficult to manage infections.

### Definitions

[0075] Unless defined otherwise, all technical and scientific terms used herein have the same meaning as commonly understood by one of ordinary skill in the art to which the invention pertains. Although any methods and materials similar or equivalent to those described herein may be used in the practice for testing of the present invention, the preferred materials and methods are described herein. In describing and claiming the present invention, the following terminology will be used.

[0076] It is also to be understood that the terminology used herein is for the purpose of describing particular embodiments only, and is not intended to be limiting.

[0077] As used herein, the articles “a” and “an” are used to refer to one or to more than one (i.e., to at least one) of the grammatical object of the article. By way of example, “an element” means one element or more than one element.

[0078] As used herein when referring to a measurable value such as an amount, a temporal duration, and the like, the term “about” is meant to encompass variations of 20% or within 10%, 9%, 8%, 7%, 6%, 5%, 4%, 3%, 2%, 1%, 0.5%, 0.1%, 0.05%, or 0.01% of the specified value, as such variations are appropriate to perform the disclosed methods. Unless otherwise clear from context, all numerical values provided herein are modified by the term about.

[0079] As used herein, the terms “antibacterial activity” and “antimicrobial activity” with reference to a bacteriophage, isolated bacteriophage protein (or variant, derivative or fragment thereof), or bacteriophage product, are used interchangeably to refer to the ability to kill and/or inhibit the growth or reproduction of a microorganism, in particular, the bacteria of the species or strain that the bacteriophage infects. In certain embodiments, antibacterial or antimicrobial activity is assessed by culturing bacteria: gram-positive bacteria (e.g., S. aureus), gram-negative bacteria (e.g., K. pneumoniae, A. baumannii, E. coli, and P. aeruginosa) or bacteria not classified as either gram-positive or gram-negative, according to standard techniques (e.g., in liquid culture, on agar plates), contacting the culture with a bacteriophage or bacteriophage product and monitoring cell growth after the contact. For example, in a liquid culture, the bacteria may be grown to an optical density (“OD”) representative of a mid-point in exponential growth of the culture; the culture is exposed to one or more concentrations of one or more bacteriophage or bacteriophage product, and the OD is monitored relative to a control culture. Decreased OD relative to a control culture is representative of a bacteriophage or bacteriophage product exhibiting antibacterial activity (e.g., exhibits lytic killing activity). Similarly, bacterial colonies can be allowed to form on an agar plate, the plate exposed to a bacteriophage or bacteriophage product, and subsequent growth of the colonies evaluated related to control plates. Decreased size of colonies, or decreased total numbers of colonies, indicate a bacteriophage product.

[0080] By “attenuated” is meant the bacterium has a decreased virulence with respect to a wild-type bacterium. In particular, a bacterium has an attenuated virulence of about 10, 20, 30, 40, 50, 60, 70, 80% or more decrease in virulence as compared to a wild-type bacterium.

[0081] As used herein the terms “bacteriophage” or “phage” refer to a virus that infects bacteria. A “lytic bacteriophage” is an actively infecting bacteriophage, i.e. one that is in the lytic (virulent) cycle (as opposed to the (dormant) lysogenic cycle). In the lytic cycle, the phage takes over the host cell's machinery for its own replication, ultimately killing (lysing) the host cell to produce its own progeny. The term “bacteriophage products” refers to polynucleotides, polypeptides, or fragments, variants, or derivatives thereof, isolated from a bacteriophage of the invention, which polynucleotide, polypeptide, or fragment, variant, or derivative thereof, exhibits a biological function or activity associated with the bacteriophage from which it was isolated or derived (e.g., antimicrobial or antibacterial activity (e.g., lytic cell killing)).

[0082] By “effective amount” is meant the amount required to reduce or improve at least one symptom of a respiratory disorder, condition or disease relative to an untreated patient. The effective amount of airway epithelial cells used for therapeutic treatment of the respiratory disorder, condition or disease varies depending upon the manner of the specific disorder, condition or disease, extent of the disorder, condition or disease, and administration of the cells, as well as the age, body weight, and general health of the subject.

[0083] The term “efflux pump” refers to an active, protein transporter localized in the cell membrane that exports substrate(s). In bacteria, five classes of efflux pumps exist: MF (major facilitator), MATE (multidrug and toxic efflux), RND (resistance-nodulation-division), SMR (small multidrug resistance) and ABC (ATP binding cassette).

[0084] The term “expression” as used herein is defined as the transcription and/or translation of a particular nucleotide sequence driven by its promoter.

[0085] “Expression vector” refers to a vector comprising a recombinant polynucleotide comprising expression control sequences operatively linked to a nucleotide sequence to be expressed. An expression vector comprises sufficient cis-acting elements for expression; other elements for expression can be supplied by the host cell or in an in vitro expression system. Expression vectors include all those known in the art, such as cosmids, plasmids (e.g., naked or contained in liposomes) and viruses (e.g., retroviruses, adenoviruses, and adeno-associated viruses) that incorporate the recombinant polynucleotide.

[0086] A “vector” is a composition of matter that comprises a gene and that may be used to deliver the gene to the interior of a cell. Vector refers to any plasmid containing the gene that is capable of moving foreign sequences into the genomes of a target organism or cell.

[0087] As used herein, the term “fragment” as applied to a nucleic acid, is less than the whole.

[0088] By “host” or “host cell” is meant a cell, such as a mammalian cell, that harbors a pathogen, such as a bacterium. The pathogen can infect the host cell.

[0089] By “immune response” is meant the actions taken by a host to defend itself from pathogens or abnormalities. The immune response includes innate (natural) immune responses and adaptive (acquired) immune responses. Innate responses are antigen non-specific. Adaptive immune responses are antigen specific. An immune response in an organism provides protection to the organism against bacterial infections when compared with an otherwise identical subject to which the composition or cells were not administered or to the human prior to such administration.

[0090] By “infection” is meant a colonization of the host. Infection of a host can occur by entry through a membrane of the host, such as a phage passing through the cell membrane of a bacterium.

[0091] The term “bacterial infection” means the invasion of the host organism, animal or plant, by pathogenic bacteria. This includes the excessive growth of bacteria which are normally present in or on the body of the organism, but more generally, a bacterial infection is any situation in which the presence of a bacterial population(s) is damaging to a host organism. Thus, for example, an organism suffers from a bacterial infection when excessive numbers of a bacterial population are present in or on the organism's body, or when the effects of the presence of a bacterial population(s) is damaging to the cells, tissue, or organs of the organism.

[0092] By “infectious disease” is meant a disease or condition in a subject caused by a pathogen that is capable of being transmitted or communicated to a non-infected subject. Non-limiting examples of infectious diseases include bacterial infections, viral infections, fungal infections, and the like.

[0093] The term “isolated” refers to a material or an organism, such as bacteria, that is free to varying degrees from components or other organisms that normally accompany it as found in its native state. Isolated denotes a degree of separation from an original source or surroundings. An isolated bacterium is sufficiently free of other bacteria such that any contaminants do not materially affect growth, pathogencity, infection, etc. or cause other adverse consequences. That is, bacteria are isolated if they are substantially free of bacteria or materials. Purity and homogeneity are typically determined using analytical techniques, for example, single cell culturing. The term “purified” can denote that a cell gives rise to essentially one population.

[0094] By “multi-drug resistant,” “multi-drug resistance” or “MDR” is meant antimicrobial resistance to the effects of antibiotics or other antimicrobial drugs.

[0095] By “non-pathogenic” is meant an inability to cause disease.

[0096] By “pathogen” is meant an infectious agent, such as bacteria, capable of causing infection, producing toxins, and/or causing disease in a host.

[0097] By “disrupt” is meant to kill bacteria and/or to inhibit, slow, stop, or prevent bacterial replication and/or growth.

[0098] By “associated with a biofilm” is meant that the pathogen is present in and/or on a biofilm or forms a biofilm.

[0099] A “portion” of a polynucleotide means at least about twenty sequential nucleotide residues of the polynucleotide. It is understood that a portion of a polynucleotide may include every nucleotide residue of the polynucleotide.

[0100] “Proliferation” is used herein to refer to the reproduction or multiplication of similar forms, especially of bacteria. That is, proliferation encompasses production of a greater number of bacteria, and can be measured by, among other things, simply counting the numbers of bacteria, measuring incorporation of ³H-thymidine into the bacteria, and the like.

[0101] As used herein, “sample” or “biological sample” refers to anything, which may contain the cells of interest (e.g., cancer or tumor cells thereof) for which the screening method or treatment is desired. The sample may be a biological sample, such as a biological fluid or a biological tissue. In one embodiment, a biological sample is a tissue sample including pulmonary arterial endothelial cells. Such a sample may include diverse cells, proteins, and genetic material. Examples of biological tissues also include organs, tumors, lymph nodes, arteries and individual cell(s). Examples of biological fluids include urine, blood, plasma, serum, saliva, semen, stool, sputum, cerebral spinal fluid, tears, mucus, amniotic fluid or the like.

[0102] The term “strain” means bacteria or bacteriophage having a particular genetic content. The genetic content includes genomic content as well as recombinant vectors. Thus, for example, two otherwise identical bacterial cells would represent different strains if each contained a vector, e.g., a plasmid, with different phage open reading frame inserts.

[0103] A “subject” as used herein, may be a human or non-human organism. Non-human organisms include, but are not limited to, livestock, pets, aquaculture organisms, cultivated plants and crops. Preferably, the subject is human.

[0104] As used herein, the terms “treat,” treating,” “treatment,” and the like refer to reducing or improving an infectious disease or condition and/or one or more symptoms associated therewith. It will be appreciated that, although not precluded, treating an infectious disease or condition and/or one or more symptoms associated therewith does not require that the disorder, condition, disease or symptoms associated therewith be completely ameliorated or eliminated.

[0105] In the context of treating a bacterial infection a “therapeutically effective amount” or “pharmaceutically effective amount” indicates an amount of a composition comprising bacteriophage which has a therapeutic effect. This generally refers to the lysis of bacterial cells or, to some extent, of the acquisition of resistance (genetic evolution) of bacterial cells to bacteriophage infection.

[0106] By “virulence” is meant a degree of pathogenicity of a given pathogen or the ability of an organism to cause disease in another organism. Virulence refers to an ability to invade a host organism, cause disease, evade an immune response, and produce toxins.

[0107] By “bacterial virulence” is meant a degree of pathogenicity of bacteria. Bacterial virulence includes causing infection or disease in a host, producing agents that cause or enhance disease in a host, producing agents that cause or enhance disease spread to another host, and causing infection or disease in another host.

[0108] By “virulent” or “pathogenic” is meant a capability of a bacterium to cause a severe disease.

[0109] By “wildtype” is meant a non-mutated version of a gene, allele, genotype, polypeptide, or phenotype, or a fragment of any of these. It may occur in nature or produced recombinantly.

[0110] In this disclosure, “comprises,” “comprising,” “containing” and “having” and the like can have the meaning ascribed to them in U.S. Patent law and can mean “includes,” “including,” and the like; “consisting essentially of” or “consists essentially” likewise has the meaning ascribed in U.S. Patent law and the term is open-ended, allowing for the presence of more than that which is recited so long as basic or novel characteristics of that which is recited is not changed by the presence of more than that which is recited, but excludes prior art embodiments.

[0111] Ranges provided herein are understood to be shorthand for all of the values within the range. For example, a range of 1 to 50 is understood to include any number, combination of numbers, or sub-range from the group consisting 1, 2, 3, 4, 5, 6, 7, 8, 9, 10, 11, 12, 13, 14, 15, 16, 17, 18, 19, 20, 21, 22, 23, 24, 25, 26, 27, 28, 29, 30, 31, 32, 33, 34, 35, 36, 37, 38, 39, 40, 41, 42, 43, 44, 45, 46, 47, 48, 49, or 50.

[0112] The recitation of an embodiment for a variable or aspect herein includes that embodiment as any single embodiment or in combination with any other embodiments or portions thereof.

[0113] Any compositions or methods provided herein can be combined with one or more of any of the other compositions and methods provided herein.

### DESCRIPTION

[0114] “Phage therapy”, the application of lytic bacteriophages (or “phages”; viruses of bacteria) for the bio-control of bacteria, is one method for treating multi-drug-resistant (MDR) bacterial infections: the use of lytic (virulent) bacteriophages (bacteria-specific viruses) as self-amplifying ‘drugs’ that specifically target and kill bacteria. Lytic phages bind to one or more specific proteins on the surfaces of particular bacterial hosts, an intimacy that led to development of phage therapy as a biocontrol strategy which predated use of broad-spectrum chemical antibiotics. Due to the recent precipitous rise in antibiotic resistance, phage therapy has seen revitalized interest among Western physicians, buoyed by successful clinical trials demonstrating safety and efficacy.

[0115] However, one limitation of phage therapy is the abundant evidence that bacteria readily evolve resistance to phage infection. While multiple mechanisms of phage resistance exist, phage attachment to a receptor binding-site exerts selection pressure for bacteria to alter or down-regulate expression of the receptor, thereby escaping phage infection. Given the certainty of evolved phage-resistance, modern approaches to phage therapy must acknowledge and capitalize on this inevitability. Genetic trade-offs are often observed in biology, where organisms evolve one trait that improves fitness (a relative advantage in reproduction or survival), while simultaneously suffering reduced performance in another trait.

[0116] Described herein is an evolutionary-based strategy that forces a genetic trade-off: utilize phages that drive MDR bacterial pathogens to evolve increased phage resistance thereby increasing sensitivity to chemical antibiotics. Thus, this approach to phage therapy should be doubly effective; success is achieved when phage lyse the target bacterium, and success is also achieved when bacteria evolve phage resistance because they suffer increased sensitivity to antibiotics.

### Antibiotic Resistance

[0117] Many strains of bacteria have become antibiotic resistant, and some have become resistant to multiple antibiotics and chemotherapeutic agents, the phenomenon of multi-drug resistance. Some strains have become resistant to practically all of the commonly available agents. For example, methicillin-resistant Staphylococcus aureus (MRSA) is resistant to not only methicillin (which was developed to fight against penicillinase-producing S. aureus) but also aminoglycosides, macrolides, tetracycline, chloramphenicol, and lincosamides. Such strains are also resistant to disinfectants, and MRSA can act as a major source of hospital-acquired infections. An old antibiotic, vancomycin, was resurrected for treatment of MRSA infections. However, transferable resistance to vancomycin is now quite common in Enterococcus and found its way finally to MRSA.

[0118] The emergence of “pan-resistant” gram-negative strains, notably those belonging to P. aeruginosa and A. baumanii, occurred more recently, after most major pharmaceutical companies stopped the development of new antibacterial agents. Hence, there are almost no agents that could be used against these strains, in which an outer membrane barrier of low permeability and an array of efficient efflux pumps are combined with multitudes of specific resistance mechanisms.

[0119] Efflux pumps belonging to the resistance-nodulation-division (RND) family of transporters are the major multi-drug efflux (Mex) mechanism in both E. coli and P. aeruginosa. The pumps in this family consist of three components that function via active transport to move numerous molecules, including antibiotics, out of the cell: an antiporter that functions as a transporter (e.g., MexB, Mex D, MexF, MexY), an outer membrane protein that forms a surface-exposed channel (e.g., OprC, OprB, OprG, OprD, OprI, OprH, OprP, OprO, OprM, OprJ, OprN), and a periplasmic membrane fusion protein that links the two proteins (e.g., MexA, MexC, MexE, MexH, MexX). This system is the major efflux pump associated with intrinsic resistance among 17 possible RND efflux pumps in P. aeruginosa. P. aeruginosa is more resistant than E. coli due to a highly impermeable OM and the presence of multiple efflux systems. Inactivation of the Mex efflux pump renders P. aeruginosa more vulnerable to antibiotics than the average E. coli strain.

### Compositions

[0120] In one aspect, the invention includes a composition comprising a lytic bacteriophage selected from the group consisting of LPS-5, OMKO1, TIVP-H6, LPS-TLTL, TIVP-27, SFA1-1, SF60B, SFNHSI, SF37B, PG-I1, and U136B.

[0121] In certain embodiments, the bacteriophage binds a molecule of an efflux pump on pathogenic bacteria, drug resistant bacteria, multi-drug resistant (MDR) bacteria, and/or pan-drug resistant (PDR) bacteria.

[0122] In one embodiment, the bacteriophage binds a protein, such as a surface exposed protein, of a Mex efflux pump. In another embodiment, the Mex protein is selected from the group consisting of OprM, MexA, MexB, MexX, and MexY. In various embodiments the lytic bacteriophage is selected from the group consisting of OMKO1, LPS-5, TIVP-H6, LPS-TLTL, TIVP-27, SFA1-1, SF60B, SFNHSI, SF37B and PG-I1. In various embodiments the bacteriophage binds a molecule selected from the group consisting of O-antigen, efflux pump, Type IV pilus, LPS (core), OmpA, OmpC and peptidoglycan.

[0123] In certain embodiments, the bacteriophage utilizes the antibiotic efflux pump protein TolC and LPS.

[0124] In yet another embodiment, the composition further comprises an antibiotic. The antibiotic includes any commonly available agent, such as an antibiotic selected from, but not limited to, amoxicillin, erythromycin, penicillin, ciprofloxacin, azithromycin, ceftolozane/taxobactam, ceftazidime/acibactiam, tetracycline, imipenem/carbapenem, and any combination thereof.

[0125] The present invention also includes a pharmaceutical composition comprising the bacteriophage described herein. Pharmaceutical compositions comprise the bacteriophage in combination with one or more pharmaceutically or physiologically acceptable carriers, diluents or excipients. Such compositions may comprise buffers such as neutral buffered saline, phosphate buffered saline and the like; carbohydrates such as glucose, mannose, sucrose or dextrans, mannitol; proteins; polypeptides or amino acids such as glycine; antioxidants; chelating agents such as EDTA or glutathione; adjuvants (e.g., aluminum hydroxide); Magnetic Resonance and Computerized Tomography contrast agents; and preservatives. Compositions of the present invention are preferably formulated for intravenous administration.

[0126] Pharmaceutical compositions of the present invention may be administered in a manner appropriate to the disease to be treated (or prevented). The quantity and frequency of administration will be determined by such factors as the condition of the patient, and the type and severity of the patient's disease, although appropriate dosages may be determined by clinical trials.

[0127] In another aspect, the invention includes a composition or a pharmaceutical composition comprising the bacteriophage described herein, wherein the bacteriophage disrupts the multi-drug resistant (MDR) bacteria, Pseudomonas aeruginosa.

[0128] Details regarding various bacteriophage of the invention are presented in Table 1, below.

TABLE 1

| Phage strain | Sequence | Bacteria | Putative Target |
|---|---|---|---|
| LPS-5 | SEQ ID NO: 1 | Pseudomonas | O-antigen (LPS) |
| | | aeruginosa | |
| OMKO1 | SEQ ID NO: 2 | Pseudomonas | Efflux pump and |
| | | aeruginosa | Type IV pilus |
| TIVP-H6 | SEQ ID NO: 3 | Pseudomonas | Type IV pilus |
| | | aeruginosa | |
| LPS-TLTL | SEQ ID NO: 4 | Pseudomonas | LPS (core) |
| | | aeruginosa | |
| TIVP-27 | SEQ ID NO: 5 | Pseudomonas | |
| | | aeruginosa | |
| SFA1-1 | SEQ ID NO: 6 | Shigella spp. | OmpA |
| SF60B | SEQ ID NO: 7 | Shigella spp. | OmpC |
| SFNHSI | SEQ ID NO: 8 | Shigella spp. | |
| SF37B | SEQ ID NO: 9 | Shigella spp. | OmpC |
| PG-I1 | SEQ ID NO: 10-12 | Staphylococcus | Peptidoglycan |
| | | aureus | |
| U136B | SEQ ID NO: 13 | E. coli | TolC and LPS |

[0129] In another aspect, the invention provides an LPS-5 bacteriophage targeting Pseudomonas aeruginosa. In certain embodiments, LPS-5 binds a molecule of O-antigen (of a lipopolysaccharide). In certain embodiments, the LPS-5 bacteriophage has a genome comprising a nucleic acid sequence comprising SEQ ID NO: 1.

LPS-5 (SEQ ID NO: 1):
CGGTCGGTGCTCCATGGTACTCGGTCGGTGCTCCAACTGGTAACGCCAGAGAGCCGAGCG
ATGAAGAGTATCGGATGATCCTGAAAGCAAAGATCATCAAGAACAGAACAAACTCAACCC
CAGAGCAAGTTATCGAAGCTTATAAATTTGTATTCGGGGTTCCTGAAGTATTCCTAGAGG
AGTACGCTCCCGCTGCTGTCCGTATCGGCATCGGTAAGATTCTAACGAACGTAGAGCGTA
GTCTTCTATTCGACCTAGGTGGTGCAGGTGCATTGCTTCCTAAGACTATCGGGGTTAACT
ACACATACACTGAGTTCCAAGCTGGCCGGGTATTTGCTACAGAAGGCTTCCCCGGAGGAC
AAGGCGTTGGAGACCTAAACGATCCCACTGTTGGTGGAATTCTGACCAACCTAGTGACAT
AAGGAGTTATAAATGGCTGATATCGGTCAACTACCTATTGAAAATATTTGGTCCACAGGC
GGGGATATGGTAGCCCCGACCCCTGCGCAGCAGCAAGGCGGATGGGGTATTCAGTCGGTT
CCTCGCCAATGGTGGAACTGGAAGTGGAACCTTCACGATACTAACCTAGCGTATTTGCTA
CAGAAGGGCATCCCAGAGTGGACTAGCACTCAAGAGTATATTGCAAACAAATCGTTCTGC
ACAAGAAACGGTTTCGTCTACAAGGCTGTCCGTACCCATACAGGTAGCGACCCGGCCACC
GTTAGTTCTAACTGGGTCCGAGCTTTCGCAGACTTTACCACAGCTAGCTCTGCACTTGGA
AGCCTGACTCCGAGAGAAGGAGGGATTCCTTTCTTCATTAGCGCATCTGGTGCAGGTGTG
TTTGACTCTACGGCTTATGGACGTGGCATGCTGAACGTAGCCAACGCAGCGGGAGCTAGA
GACTACATTTCGGCTCAAGAGAGTTCTGTTGTCCTGTCTAACCTGTCTACTGTGACTAGG
GCTGCCAACGCGGTTCCGTACTTCAACACCGACACCTCGATGGCTACCTTCAACATTACA
GCGTTCGGAAGAGGCCTAGTCAACGCGGGTGATGCAACTAACGCAAGAACCTTCCTAGGC
CTAGCTAACTCTGCTACTATCACGGCTGATCCAGCCAACAGAGCACACACTCTGGTCTAT
AGAGACGCTGCTGGTAACTTCAACGCTGGTGTGATTACAGCCACTCTTTCTGGTAACGCG
ACTACAGCCAGCAAGCTCAGGGCTCCAGTTACGATTAACGGCGTAGCGTTCGACGGAAGC
CAGAACATTGTTCTGCCGGGCCTAGATACAAGCTACGCCGGGGTTGTAGCGAGGCTCCAT
ATTAATGGAGCTAACATGACCGGAACAGATAAGACTACCCAGTTGGCTCTTAGAAATAAA
TCTGATACAGATTGGATTAGCTTGGTGGCTCCTGATGACAGCTCGTTGGTATTTCAATTT
AGAGGGCCAGAAGCGGCTAACGCCACTCTGCGGGTTAACTCTAATGTTGTGTTCCACGCG
GGAAACCAGTATGGACTAGGAGCTACTCAAACGCAAGCCAGAGAGCGGCTCTTGGTTGAC
AGACTGGCACAGAACACGTCTCAAACTGTCCTGTACAACGCAGATAAGAGCAGGTACTTC
TGGTTGCAAGATAACGGTGTTTCCGGTATCTGGGACGCAACGACTAACACCCCTCTATGG
CGTTTTTCTAGACTAGGCCAGCTCGACTACGGAACAGTCCCTGTTGCACAAATTACAGGA
TTGGCCAACTCCGCGACAATTCCGGCATCCGCCTCCAATCTGACTAATCAGATTGTTGTG
AGGAGCGGAACAGGAGATATCGCAGTACAAGGCGTTACAGCGTTTGGCGCTGTTCTGGGA
ACAGACTATATTAGAGTAAGAGCCAGCACTGGTAACGCTCACCTAGTATTCCAGAGGAAT
GATGGAGCAGAGGTAGGGCTTATTTGGGGAATCCCGTCTGCCAACTCTCTGAACTTCAGG
ACCGCAGGCGGTGCGACAGGCATGTCTCTGGCTGGTCAGGACTTGACTGTAGTTGGCAGG
GTGAATGCTGCGACACTCAATTCGTCTGGCAACGTCAACTCTGGCAACAGCGTGATTGCT
GCCGGGAACGTGCAGGCTGCTGGCCGTGTGTACTGCGGCGATGCTTTTATGAGCAGCAAC
GGCAACCTTACTGGCGGAGCTTTCGGCTCTTATGGGACTCTTACCAACTGGGTAGACTCT
GTATACGCCAGAAAAACTGACGTAATGACTGATGCCCAAATCTTGGCTGCCACTTCTAGA
GGTAGTGCTCAGGCTGTGGGAACATATGTCTTTGCGATTGCAGCTAGCGGAAGTGGGGAT
GTTGGGACTGTAGTAGCTGGTACGTCTCTAAGGTCTTCGTCTCCCGTCAACTACCACGGA
ACTACGCTATCCGGTAGCTACAGGTGCATGGGTAGGTTCGGAGCCAGAGGTTCTAACCAG
ATTACCTTGTTCCAGAAGGTTGCAGATTAACAAAATAGGCCCGTAAGGGCCTTTATAACT
GGAGGTGATTTTAATGGAATTCAGAAACGTTGTAAAAATTAAAGCGGGGTTCGAGTGCGA
AATAAACCATCCAGAATTGGGATGGATTCCTTACGGCGCTGTAGAGGGATGCCCTACGTC
TCACTCCATGTACGTGAAGATCGCCGCAGCGATTGAAGATGGCTCTATGGAAGTGGTAGA
AAAAGAGGACAAATATGATGACTTTGAAGCCAGATTGTGGAGAGACAACGAGCTAACCCG
GGCTGACCGTCAAGTAGAGATTGCTATCGACGATGAAGACGAAGTAAGAGAGAAGGCTTG
GCGTAAGTATCGTTCTGCACTACGTAAATGGCCAGAGCACAAGAACTTCCCATCCGAAAA
GAGCAAACCTAAAGCTCCTAAAGAATAAGGCGAGGTAATATATGCCAAACATTATGAAGC
CTACGGGTATTAACGCTATCTGGTCTGAAAACGGCCAGAAGGTTGACCCGGGTGCTGTAA
AAGTTGGGCTTGGATGGGTGACAGAACTACCTCCCTACCAAACTGCCAACTTCATTGAAT
ACAAGCAAGACTTGTTCAACGCGCACGTTAACCAGCACGGTATTCCCGAATGGGATAGCG
TCACAGAGTATCAGGGTAACCTGAGCTACACTCAAGGCGCTAACGGGATCATCTATAAGT
GCCTTAGAACCCATTCCGACAAGATTCCAACTGACCCTCTGAACATTACAGCCGGATATT
GGCGAGTGGCGTTTGAGGATGCGGGAGAGGCAGCTAAGGTTCAAGCCAACCTTGATCGGC
ATGTAACAAACTACAACACCCTCTCTGGGATTGGCAACGTAGTTATTGCAAGACAAAACC
TAAGTGTGTATAGTAAAGCTGAAGGCGACGCCCGGTACGCTATGAAGCACGGGAACGGCT
CTAATGTTTTCAGCGTCGCCACTGCCACACAGCCAACTCACGCGATCCCGCTGAGCCAGC
TATCGACTCTCGTTCCTCCTGCTACCGAGACTGTAGCCGGGGTTATGGCAGTTGCTACGA
CTATCGAGACAGAAGCTGGAGCCAATGATACCAAGGCTGTGAGTCCGCTCAAGGCCGCAC
AGGTGTATCTGAAGAAGAAAGACAACCTTTCCGGTCTGTCTAACGTCACTGCCGCAAGAG
CTAATCTAGGACTGTCGGATACAGCGACTATGCCTTCTTCTACATTCCTGAAGGCAGGTA
GCAATCTGGCAGATGTGCCTAACAAGGCGCTGGCAAGATCGAATCTTGGAATTACAAGTA
GTGCTACCCAGCCGGAAACCTATTTCTTGAGGAGCGCTCAGAACCTAGCAGATGTACCTA
ACAAGGCACAAGCTAGAGTCAACCTAGGCCTCACTGGGATGGCTACAACAGACCCTGCGG
CGGTTATGATGAAGGCAGACAACCTTGCTGGATTGGCTAACACTGCTACCGCTCGGTCCA
ACCTAGGGCTAGGCACAGCTTCTACTAGAAATACAGGAGACTTCCTGTCGTCTGGGGCTA
ACCTGTCCGACCTCACGAACGTCCAAGCAGCTAGAAACAACCTAGGGTTGAAGGGAGCGG
CTACGCTCGATGTATGGGGTCTTCCTGCGAATACAACTGCTATGGACTTCCAGTCCAGTC
AGTCGGATATTTCCAGAGGATGGGCTCGACTACCAAACGGCCTTCTGCTACAATGGGGAA
CTGGTCCCGGTCTGTCTGATGACACAAGGACGAATATCCAACTCCCTGTTCCAGCACGAA
TCTTGAACGTTCAAGTGACCGTAATGGGGACGTTTAACAACTCCATCGGCCCGGGCGCTT
TCATGACGGATATGTGGAGCAACACCGGGTTTAGAGTTAGCTGCAACTGGGGCAACTGGT
CTTACCCGTTCAACTGGTTTGCTATCACTTCCACCCTGTAATTCAGGAGTATCAAAAATG
GCTCTAACTGAGCAAGACTTCCAATCGGCTGCCGATGATCTCGGAGTCGATGTTGCCAGT
GTAAAGGCCGTCACTAAAGTAGAGAGTCGTGGGAGCGGCTTTCTACTTTCTGGCGTCCCT
AAGATTCTATTCGAAAGGCACTGGATGTTCAAGCTTCTCAAAAGGAAGCTAGGTCATGAC
CCTGAAATAAACGACGTTTGCAACCCTAAAGCTGGAGGATACCTCGGCGGACAAGCGGAG
CACGAACGTCTAGATAAAGCAGTCAAAATGGATAGAGACTGCGCACTTCAAAGTGCCTCT
TGGGGCCTATTCCAGATTATGGGATTCCATTGGGAGGCACTAGGTTATGCGAGTGTTCAG
GCATTTGTCAATGCCCAGTACGCCAGCGAAGGATCGCAACTAAACACTTTTGTACGCTTC
ATCAAGATCAATCCTGCAATCCACAAAGCTCTGAAATCCAAGAACTGGGCGGAATTTGCC
CGGAGGTATAACGGGCCTGATTACAAGAAAAATAATTACGATGTTAAGCTAGCAGAAGCC
TACAAATCCTTCAAGTAAATCTAGGAAGGTTCCTAATGAAGAAGCTATTGAAAAGCTGGA
AGTTCTGGGCTGCTGTAGGCTCTGCAACTTTTATGGCTCTGGAGGCCATGGTTCATCTTT
GGGAGCCTATCCTTCCTCCCGGCGTATTCGCCGCAGTGGCCACACTGGTAGCTGTCGGTG
TAAGAATTTCGGCAGTGTTTGTAACTGCTGGTAAAGTGGAGGAAGCGATTTCGGAAACCA
TAGAAGATGGCTCAATAGAAAATGATACTAACTAAACTCAAAAACTACGCCCTCGTAGTA
GCTGCCGCAATGGCAGCAGGGTTTGGATATCTGTCGTTCTCTTTGTACGGCGACTTAGCT
GTTGCGAAGAATGATATCCAATCTCTTCAAGCTGCGTCTCGACAGATGGAAGAGCAGTTC
CAGAAAGAGCGAGCAGGGTGTGAGATCACCACTGGGAGACTAGAGGCACATATAGCCCAA
ATGAAGAGCCGACAGGAGCTTCTACAAGGCCACCTGTGTGAGCTTGAGTCTCTACCCAAC
CCAACCCCAAGGGAGACCCAAGAAAATGCCACAGAGACGATCTCTGAGCCTTCTACTGGG
GATAGTCTGGACCCTGCTCTTACAAGCTTGCTCGACAGAGCTTTCTGTTCCGCAGTACCA
AACGATCCTTATTGTGCCCCCGGCAAGCCTGACCGAGGAGGTTAAGGTATACCGAGTGGA
GCAAGATACAGTTAAGGGGCTCGCTAGAGCTTACATTCTAAATACTAACAGTGCTGCCAT
GTGCAATAGTCAACTACAAACAATAAAGCTATGGGCAGAAGAGCAGAGGGCTCTATATGG
AAAGTAAAGACGGCAAAGAAGGCCTAATCAAGGTAGCTACACAGGGAGTTATCTCTCTGC
TAATTGCTATCCTAATGGCTTGGTCTGGATTCCTAAGTTCCAGTCTTTCTAAGCAGGAAG
AACGTATCTTTGCGATGCAAAGAGATATGGTATCCGAGGCAAAACTTAACGCACTAGAGT
CGAGATTCAATAGCCGACTTGAAAGTGAAATTAGTAACGTAAGAAGAGAACAACAAGAAA
CCAACCGGTATTTGATTTTGATTATGAATGCCGTCAAGGGTCGGGATACAGAAACTCAAT
AACTATAACCCGTTGACCCACACTGGGAGACAATATAATGACAAGGAAACAAGACTGGCC
GCTAGTTTCAGCAGTCGGGGCTTTGTTTATCTCCCTCCTTGTCTGTATGGCTATTCTGGC
TTTCACAGCGATGACTCCCGAGGCTCGGTTTGACTCTGTACGCCAGACCTACGAGATTCG
AATTAGCGAATCTGAGCGGCGGTATGAACTCAAACTGAACAGACTACAGGATCAGATAAA
CTCGGCCTCGTACACACAGGATCGGCAATCCCGTTTGCAATATGAAGAACTCGACTCGCT
TAAAAGGAAGATTAGCGAACTTGAGCGGAGAATAAAAGAAAAACAAGAGTAATTAAGCCC
CGGAAGCGAAAGCTTACCGGGGCTATTTGTTACTGCTAGGTTACTTCCCACACTTCGTCA
AACAGCTTGTCAATTTTCGAGATAATCTTGTTTACCTTTTTCTTACGACGCTCATTATCT
TCTGGATCGGAATGGATAAGCTCGATGTCGGCAGCGTTACCCCAGTCCAGCTCCCCGTAA
TGGAACAGCACCTTGACGTTCAGGCAGGTCGCTGATCTGTCAACGCCTGCGACAACCCCG
GTGGAGCGCGAGTTGTGTTGCTCGAATGTACTTCCCGATGGCCGGTTGTACAAGTCGCTT
ACCTCTACAACTTGCCCCTTCTTAACGTCTTCCAGTTTCATTCTATGCCTCCTCAATCTA
GTTTCATTAGCGTATTGAACTGGTGCCTCAAAGACTTGAAAGCCTGTGGGCCATCGTCCT
CCGCTCCTTCATGGATATGATGAGCGATCAAGTGTATCAGTCCTCGGTCTCCTAGTAACA
CAGAGCTAGGAATCTCTTTTATCCAAGCCACAAAGCAACAGAAGTGCAGCACCTCCGGCA
TGGAAGCCTTGAAGCTGGAATCATCCAGCTTCGATAGGCGTTCATACGTGGCTTTGAGGT
CGGGATAGCTTAACTGATATGTGGCATCATCGTCAATATGCTGATCCCCTCTAACTACAT
ACTGCAAGCTCATACTACACCTCTATATCGTTGCACCATTACACCTTCTTGCCGCCTTCT
GCAAGACGTGCCTCTCGCTTGTGGTCGGAACGGGTCATGTTGTACTCGATCTTCTCGATG
ATAGCCCCTGCAACATCCAAACCCCGTACATTCGCATAGTCCATGATGCGAATGATAGCG
TCGGCCAGTTCCACCTCTTCCATCTTCCGCTCTGGCAAGTGATCGTCCATCAAATCCTTA
CGGACGCCTTCAGCAGCTTCCGCAATTTCAGTGGTAACGAGCATCAGCATATGCAGAGCA
TCACGTTTAATCGGCTCGCCTGTGACCAGATCGGTGTTCCACTTGCGGTTAACAACCTCA
AGACCAGTCATCATTTTGTTAAAACCGCTAACAAACTCGAAGACGGACTCTCGTTCGAAT
AGTTCACCGAACGTTGGCTCTTGATGTTCGGCAATTGCAGTGTGGAAAGGCCACTCCATC
CAAGCGTCATAGCACTTTTTGATAAGCTCTTGTTCATCAATGTACGAGAAGACGCCCTGC
TCCTCAAGCTGACTAATAGCTTCAGCCCCCTCGACCCAGACGCACGTACCAATAAGCCTT
GGATCGATTCTCAGAGAAGTCTTGTAGACTTCTTTCCACGACCTCCATCCTACCCTACCA
TTGCCAAAATACACAAGGAGTGGCACATAGCCTTCTCGCTTTTCCTGCTCCGGCGTTTCT
ATAACTACAACAAACGCCGGAACTTTCTCCCCATCTGGACGTTCAGTTAGTACGAAGTCT
CCCAAGTTGATATTCTCCCGACTAGCTGGGCGAAGAGATTCCTCGATATGGTCTTTAACT
TTACTCATTAACTTCTTCCTCCTCACAGAACATTTCAAAATAGCAATCACAGCATACCAA
CATGCCGCCGTCATTTACAATTTCTTCGACCGGGAGAATGCTTCCACAGCATTCACACCC
AGCCCGTTCGACAGCATCTGCACAGGCCCAATAGTCCATCTTCACCCTCCTTCACTCCTC
CTTCAGAAGGTACTCGTTGCTAATAACCTTGAAACTAAAGTCTCGGCTCATGCTTTTGAA
CACCAAACCTTCCCGGTACTTACCGTTCAACGCAGACTCTCCGCTAGCCATTTCAATTAC
ATCTTGCATGTCTTTTGGAACGCCTACGTCCCACATGTACACCGGCACATGTTTAACATC
CTCTTCGCCGTCATCAGCTAGCGCGTTCAGGATTCCCAGAGTGGCCAGTCGCTCTTCTGG
AAGATAGTAACGACTCTCCGAAATGTTGTAGATATCGTACACATAGTATTCCGGTTTGTC
AACTCCCTCGAAGTTGCCTTGAATATTCGGTGCAACCAGTTCACCCTGAAGGGCGATATT
TAGACCAAACTCCCGGAGACGTTCACCAAGATTAAGCTCTTCTGCCATCGCAGTGAAGTG
ATTGGAGTCTTTCTTAATCACACGCTTCCAGCCACGACCCTTAAAGAAGTTCTTGACAGC
CGTGAAGAACCCGATCTTCTCGTCTTCTAGACGGAAACCGACATTTCGAGACGCCACGCC
TACTTCTCCGTCCTTGTGCCAGATAGTGAGAGACGAACCGTCCAATTTGAATGTCACTTC
AAACTTCTCGTCCTTCTGATGAGCCTGATCGTAAGCCATCTGAATATTCTGTACGCGAGC
CTGATCCGTCTTCGGGATGAAGTTGGGGAACCCTAGCTTGGAAGTGCCAGTCCGGCTGCC
CTTGTTGCCTCCGTTGATAGCTACCTGCTCGGAAGGCTTTACATACTTCAGGATGCCCAT
TCGATCGGTAACATCTTCGTCTACTTTCGGCTCTGGACTGCCCGCTGCATGAACAGGTAC
GATCAGTCCTTGGCTAAGCTCTTTGCGAAGCTTCATGGTCTTGATTCGAGAATACTCTTT
TCCACCTTGTTCGACCATATTACGGCCACGCAGGAATTCAAAGATAGGGTTGTCTACAGG
GACCATGGAGTCCACTTCAATGTAGATTGCCAGATCGCCAGCCTTATACTCCCCGCGTTT
GATTACGCACTGCCAACCTCCAACAAGCGCCAGATCAAGGCTGTCAGCGTTAGGATGGGT
CTTCACATCGTCGATACGCACCACTCGGGCTAGTACGCGGTCTTGGGAATTGCTCATATT
TCCTCCTTTATTTTAAATTTACTAGATTAATTGTCAAACCAACCGAGATTAAGGGCGTGC
TCCAAGGCTGCGAGAAGATTCTCAGCGTCCATGCGGTCGCTAATTGACACGCGGCGCCAT
GTGATGCCCTCTTTGTTTCTAGCTACAATATAGGCCGAGGAACTATCTCTTCCCTTTATT
AACGAGCTTGCAAACTCAGTCTTTCCCCCGAACACTATCTCGCTAACTTTTTGGGACGGC
TCTCGAATATCAATCTTCATCGTGCTCTCCTTGTTAAAAATTGTTAGATTTGATAGATTA
CTTGTTAAACCAACCGAGGTCAATAGCTCGTTCTAAGGCTCGTAGCAGATTCTCAGCATC
TAGAAGATCACGGATCGGCATCCAACTCCCACTATTCCCCGGTAAGCCATCTGCGATGTA
CACAGGTACGTCAGTATACTCGCTCTTTTTAAGCCCGCAGGCACAGGCTACATTGTCTCC
GAAGACAATCTCGCTGACTTCCCTTGCCTCGTCTCGAATATCAATCTTCATTATGTTTTT
CTCCTGTTGTGTTGAAAGTCGTTGTATTCTGCATGGATTCATCTGCTGTGTCAATAGCCT
TGACAAGAAAATAATCCGTGGTAAAGTGTGAGGCCTGCTGGAGAGAAATGTCCACGTCAC
TCACCGGCCAGCAGTATAGCGTATGAAGAGGAAAGCTGCAAGCGCATCCTGAGTCGAATC
TGAGAACAGGGCAGCGACGACCCGAAAGGGGAAAGCTCAGAGCCTATAAGGAGCCCATGC
TCCCCGCTCACCGACTCATCTGCATATGCGTATATCTGCATGAGAGCGAGAGGCAGACCA
GAGGCATGTCTTAGGCGGAGAATCCGTATGGCAAGCCTTGGGACAGGTCTGCCTCCACTA
CCGATCTATCTGCATACAAGAGCTTGACAGTATCCTGTAAACCGTGTAGAGTAATCTCAA
ATCAACCGCAGAGGAGTGTATAAATGAAGCATGTTATTCACCGTGAAGACCTTATCGACC
TACTACGTGATCGTATGAAGCTTGAAGCTCTAGAAGCTGGCGGGGTGGACAACTGGGACT
GGTATGAGGCCTCGCTAATCGACTGCGGATACTTCGATGACGATGGCCGGGAGCTAGAGG
TCGAAGCTCTTGCAGATTGCTTCCCAACCGTAGGTGCGTGACCGTGGAGGAGTCGAAAGC
TACCTTCAAAGACCCTTACCCTAGGTTCTTCGACGCTTCTCGTAGGTATGGCGAAACCAA
CGACTGCATGGTGGTGAGCTTTGCAGTCGTATGGAACACCACCTATGAAAAGGCACACCA
GCACCTGAAAGTGAAGTGCAAGCGCGGTTACCGGCAAGGGGCTACTCAGAAGCGCTTCAG
CTACGCAGACACTTGGTGCCCTAAGACCCGGATGCTCTACCGGGAGGATGCTAAGGATAA
GACTCTTAGGCAGTTTGCTGAGGAAAACCCTGAAGGTCGGTTCTGGATCGCGGTAAAGGG
GCATGCTGTTGCAATCGTCGACGGAGTGTTGTACGATCACACTAATGACAAGAGACGTAC
CATCTGGCACTGCTGGCAAGTGTGGCCGGGGGAGGCACCTGAGAAAATCGAGAGGAAGCC
TGATCCAATCTCACCTCCTGTGAGAAAGGCCCCGGACTGGTATGTCTAAACACAAACATC
TGAAGTACAAAGAGGAGGATTTATGGAAATTATTTCGAGAGGGACGCTTCCTCAAGAGGC
TTTGTTTACTGCTAAGTGTCACCATTGCCTAAGCATTCTCCGAGCTAAGAGATCGGAACT
TGAGTATGTTTCGTTCTCATTCTGTCGCCCCGGGGAGACTGGGTATTATTTCGCAGAGTG
CCCTGTCTGTCACGAAGAGGTGTCTGCTTGGGTTGCGGCTCCTGTCATTCCTGTGGCACC
GGCCACCACGGAGTATATCACAAAGGAGCGTAAATAATATGGACCAGTTAGCAGGATTCA
TGGGCGAACCTTTCGTAATTGCGTTCGACTACGACGAGACGATCAGTCTCTACCCTCTTG
CCTTCCGAATCGTCATGGATACCTTCAGGGGCTTTGGAGGCGCTTTCAATGTGATCGTAG
TCACTGCACGCCACCCTGACAACAGCGGAGAGTTAGAGTGGCTACGGGACTACGGGTTCC
CGATCTATTTCACGGCACAGAAGGCAAAGCGACCATTCATGGAAAATCTTGGAATAAAAG
TCTCTGTATGGGTTGACGACAACCCGTTCAGCGTGGATAATGACCTTCCTCCGTGGACAG
TGGAGCAATACGATGCCTACATGGAGGCAAAGAAGCAACGAGCTATCAACAGAGGGAGTA
AAGCATGAGCGAGATTATGAAGGTTGAAGTGGGAGATCGGGTGGTCCTTAAGGCCTATTG
CGATACATACACTGGATGTGCAAAGCGATGGGCGCAGGCGCATGGACGTTTGGATGAACT
GCTGGCTACGGGATTCGTAGAAGATAGCTGGGTCCACACCGACGAACTGGCCGGAGGCTT
GAAAGGCACCGTTGTGATGACTGAACTGGGACTGAAGGAAGAGTGCTGTGCAGTACGTCT
AGACGCCTACACTGACCACAGGGCTGTTGTAGTTGTTGACGCTTCTGATCTTTACATCGC
ATGTAAGGCAGCAAAAGCTCCCGTAAGCACCCTAGACGAGGCCTTCGGTTGTGACCACGA
CTACCTTATGGAATCTCCGGCTAACGCTCAGCGACTGAATGAGTCCGTCGAGCAGCTACG
AACTGGCCAAGTCGTAGAAGTGGACGTGCCTGTGAGTGTAAATCAAGACGAAACCTCGCC
TATCGTAGTGTATGTAGTAGAGAAGATTTACGATAGGAAAGGTAACGTACACCTCATTCT
ACAGTATGAGGTAGCAGGGGCGCTAATCAGGACGGTGGTGGAACAGGGAGAACTCATTTA
CTTCTTGGATGAAATGCAAGGTATGTACTTGACCAAGATTCAACTGGAGGTGAACAATGG
AGTTGTATGACCAGTGGCGTAAGTATATGAGCGTTGTAATCTTAGAAGAAGAAGATAATG
AGCGTCAGTGCATGCGGCTTATTGAGGCAGTTGGCGAACTCGATCCCTATATCCAAGATT
TCCTAGATTCTTTCTCTATTAAAACTGAAGGAGGTGTGTAAGCATGAGTCAGAGTAAGCG
TGATGAGATTGTAGTTGAAGCACGTGGGCTAGAGAGCTACTTCATTTCCCACTGGAACGG
CTGGGATGTGATGGACACTGCTTGTCTCGGATTTTATATCAAACCTGAGTATGTTCTTGA
CCCGGATATTCGAGAGCTTGAGCCTAGCTTCTTGGAGCTTGATTTCGAGCGTTGCCGTTT
CCGATTCTGGGGAAATGAAGACGAAGGCGTGGACGGCAAACTCATGGAGGGCAAGTTGCA
GATTATGACCAACTCCTTCGAGTACGTCTTCTTCAAGGAGGTTTGAGTGGCTAGACAGAC
TTACGAGTCTGCATCAGATAGGGCGGTCGAGGAGGCCGTCCGTTCTGAGCTTGAAGGGCG
GTGGAAGTGTTCTCTTCATAAGCTACCTAGAGCCCACTATATGGATTGGGCAGCCTGCCG
GAATGGAAAGGTTGTTAGCTTTGTGGAGCTTAAGGCTCGGAATAATGAAATGCAGAAATA
TCCCGACTTCTTTGTGTCCCAGATGAAGTGGCTCCATGGGATCGAAATGCAAAGGGTGTT
TGACATTCCCGCATTCCTTGTGGTAAAGTGGACGGACTATACAGGATATGTCAAAATGAC
AGCCAATGGCGTCAACTACATGAGCATGGGTGGTAGGATTGACCGTGGAGACTGGCAAGA
CCAAGAAGTTATGGTCCATATCCCGCTGAAAGACTTCACACGTTTATAGGAGGACAAATG
AAACGACTCTGCTACCGGTGTATGCACTTCGGGGAGCCCACCATGCACCGCCATAAGACG
GGCATTTGGTATAAGGGTTGTAGTAAATGTGGATCAGGAGTATTCTATGGCTAAGAAGAA
CCCTGTGTTTAAGTTTCTGAACACAGTCAACAAACCCTCGGTAGAGAGGGATAAAACCAA
ATACAGGCGGAAGCCTAAGCATAAACAGAAGGAGCGATTAAATGAAGAAGGGTGACAAAG
TGAAGATCAATGATGACGCTGATACCATCTTCCGGGGCCGTGTTGCCACTATCATCGCAG
TAGACGAAGAGGGTTGCGTTATTGATGTGGGCAGCTACGAAGACGAAAGCGGAGAGCTTA
TCGAGTACCTTCACCTGTTCTTCGAGCGTTCTGAGTTGTCCAAGCAGGTGTAGGAGGGTA
TAATGAACGGACCCGAGTGCAGATGGTGCGGAGAGAAAACTGAAGCTGAGTTCGTAGACG
TTGGGCTTGGATGGACGCAGCAAGTCACTGGAGGCATGTGTCACCAGTGTGGAGGGTACG
AGAACGGTTACTACCAGAACGACGGAAGGCTCACAGAGGTCGAGTTTGCCACCTACTGGA
GTGGTCCGTTCGAAGATTATGCGGATTTCTCGCCATTCAATCATATGAGAGAAGGCGACT
CGCCATGAAGGCTACACTGAGAAACCACAATCTGCTATACATCTACTTCCACACGTTCTC
GGAAATGAATGAGTGGTTGACAGAGAACGCTGTAGATCAATGGACAGTCACGACTCTGGG
CTCCGGCTATCAGGTGGCTGTTCCTATGGACCGTGCAATGCGGGACCAATACGTCTCGGA
GAGGGGTTGACACGAACACAAGGTGATGCTAAACTCCGTGGTTGTCTGAAGTAAGGAGGT
TTTATGTCCAAAATGACCGTGGCCCAAATTGCGGCTATGCACGGTATCGATTTGTATTCT
GACCACAAGACCGCTTGTCCCCAATGCCGGAAGAAAGGCGCTGACAACAGCGGAGACAAC
CTAAAGGTCTATGGTACTGATCGTAATACCGGGGAACACAAAGGTGCCTATTGTTGGGCG
TGTGGGTACACCTTGCTCTCTGAAGAGCAGGAAAGAGACGCCCGGGGAGAAGACGAAGAG
GAGTGGAATTTCGTGGGAACTGAATTTAACGCAGAGATCAACGCTCAAATTAAAGAGCAA
TGCTCGTATGATCCGCGTGGTTATCGTGGCTTGTCTAAAGAGACTTGCCAGTATTTCGGA
GTGCTACATGGTTTCGACCCGGAGACTGGCGAGATTGCAACTCAGCTATATCCTACTACT
ACTAATTACGAACTCACCGGTTACAAACAGCGGATCATGCCGAAGAACTTCTCAGAGCCT
ATCGGCGAGACCGGGAAGGATTGCGAGCTTTTTGGTCAGTTCAGGTTCAAGAATAGCAAC
AGCAAGAAGGTGCTTATTGTAGGCGGTGAGGTTGACCAGCTATCAGCATTCCAGATGCTC
AAGGAGTACGATGACCGGCGAGCAGGCGGTAAGAGTGATTATGAACCGACTCCAGTGGTC
AGCCCTACTATCGGTGAGAGTGGGGCATGGAAGCAGCTACAGGCTCAGTATGAGTGGCTA
GACCGGTTCGAGCAAATCATTCTCTGTTTCGACAGCGATGACGCAGGACGAGAGGCAGCA
GACAAGGCAGCCGATAAGCTTCCGAAGGGCAAGGTGTTCATGATGGAAATGAACCGTAAA
GACCCTAACGAGTATTTGAAAGCTGGGCGTCAATCGGAGTTTGTCAGTGCATTCTATCGA
GCCCGTACATGGACCCCTAGCGGTATTGTAGGGTCTGATGCACTCGACGCTCGAATGTAT
GAAGCTGTGCAGGTTGAGAAGATTCCTCTGCCACCGTTCGCTAAGAAGCTCCAGAAGGCT
ATGGCAGGAGGCATCCCGTTGGGCCGGATTGTGAATATCGGCGCTGCATCGGGCATGGGT
AAATCTACTGTAGTGGATGAGTTCACTCTGTTTTGGATTTATAACTCGCCTCATATGCCG
GGTACTGTGACTCTGGAATCGGACTGCGGGGAGTACGCAATCAAGCTGCTGAGCCGTAAG
GTAGGTGAGAAGGCAGACTTGTACGAGACCGTTGAAGAGAAAGTGGCGTTCCTTGATCGG
CACCGTGACGCTCGGTACGACTTGTGGCACAAGGAAGACGGAAGCCCACGCTTCTATCTG
ATCGATGACCGAGACGGAAGCCTAGCAGCCCTCAAGGCTCAAATCGAACAACTGATTATT
CAGTTTGAGTGCCGTGTTATTATTCTGGACCCGCTTCAGGATATTCTGGACGGATTGAGC
AATGAAGAGCAATCGGTGTTCATGCGCTGGCAGAAGGGTATGACCAAGAGCCACCGTGTG
ACGTTCATCAACATCAACCACGTTCGTAAGAGTGGTGGCGGTCAGAAGGCTAACTCGGCA
GGTGCGGAACTGTACGAAGAAGATTTCCAAGGGTCTTCGTCCATCTTCAAATCTGGTGCA
GCTAACATTCTGATGTGGCGGAACAAGGACGCGGAGAACGAGTTCGAAAAGAACCTGATT
AACGTGAAGCTCTCTAAGTGCCGATGGACTGGCCGCACTGGAATGATGGGCAATTGGTAC
TACGACGTTGAGACTCATACAATCTGGGACTTGGACGACTATCTGGACCGATACCCTGAC
AAGCGCCGTGAATACGAGGCTTGGATGGCTCAGAAGGAAGAGGAAGGCCGGGACACGGAA
TACTAAGGTTGACAGAGGGGTGATGCTTATGTATCATCCCTTTCGTCGTTTACAGGAGGA
AAGGAAATGCAACAACGATTTGAAACAATCGAGCAATACCTCGAATGGATGGGAAATAAC
AATTTCACCAACATGACTTGGGATATCGAGGCCACAGGCCTGTTGGATGAAACGTCTATC
GATTACACTGCCAGCCCCTACAAGATTAAGCCTAGCTACAAACACCACTGCATTGTAGTG
GAGGAGCACGGTGGCAATATTCTGGCATTCTACGATGGGCCGACCTACGTCTTTGACGGG
CGAGAGTACACTGAGAGACTGCCGAAAGCGTCTTCCATGCTCCACACTGAAGAAGTTGTG
ACTCTCAAGGACTACACTCCGGTAGAGTATATTCACCTGCCGCTGAAAGAGTTCAAGAAC
TATGTGCTCAAGCGCAAGATCAAGCGCGTAGTGGCTCACAACATGATTAACTTCGACCTT
ATGTCGATGAAGCTTGTGGAAGATATGGACTTCACTATCGGCGTAGAGCACAGGGATGGC
GGTCTGACTACGTGGTCTGCTGACACTTGGATGGGCAAGCAAGTGGTATTCGACGATACC
CTCGTTATCTCCAAGACTTGTAACCCTGACCTGTTCGGCGGTCACAGTCTGGATAAGCTG
TCTCGTCGTGCAGGTGGTGACACCAAGATTGACTTCCGTAAGCATTTGGCACCGGATGTT
CGATTCCTCGACTTCGCAGCCGATATGCTCTACTACTGTATCTATGACGTAAAGGCGAAC
ACCGCTGTATGGCATTGGTTGCAGGACCACGAAGATTACCAACTGTCCGACCGTGACAAC
TACATCAAGAATTGGCTGTCCCCGATTCAGTTGGAGAAGAAGGTTGCAGAGATCATCACC
TATCAGGAGCACCGAGGGTTTGTTCTGAATGTTGATCTCTGTGAAAAAGCTGTGAAAGAC
TTGGACGCCAAGATGGAAGAGCGTCGGGCCCGGGTAGAGCCTGTGCTTCCTCCTCGACCA
GCTACCAAGAAATTCATGGCAGACTACACTCCACCTGTTCGACAGTTCAAGAAGAACGGG
GAGATCACCACTTACCTACAGAAGTTCATTGAAAAGATCGGCGCTCAATTGAAAGAGGGC
GATGATCGGACTATGATCTTTGAGGGTAAGGAGTACAAGCTGCCTCTCCCGGCAGACGTA
CCTCTGAAAACGGAGATGCCTGCTAAGATTGGAGATACAACCCACATCAAGCAGTGGCTT
ATGGGCGAGTTCGGTTGGATTCCCTCTGAGTGGAAAGAGACGGACCTCACTGTCGACCAG
AAGAAGATCAAGCTGCCGATGGAAAACATCGTTGCTAAGATCGATCGCTGGCTGGATGTA
ACGTATAGCACAGCGTACAAGGAAGAGCGGCTGGACGGGTTCGGGGATTACATGAAGATC
ACCCCTCGTAGCACCCGCGCGTATGTACGTCAGAGGTTGATTGATCGTGCAAGCAAGGGG
AGCTGTAAGGTTCTCACTAACCCTAGCTTCACAAAGGGCCAAGAGAAAGAAATGTGTCCA
GACCTCGAACGCATTGCAGAACAGTTTCCGTTCGCGAAGGATGTGATTGAGTACCTGACC
TTTAAGCACCGGCGAAGCGCAATCCTCGGTGGCGGCATGGACTGGGACGAAATGGAGGAT
GGAGAGGAGCCGGAAAAAGGTTACCTTGCAAGCATTCGTCAGGACGGCAGGATTCCCACG
CCTGCTGACACTTGCGGGGCTGCTACTAGCCGGATGAAGCACCGGAAGGTTGCTAACGTT
CCTCGGATCACCTCGTTGTACGGGGCTGAGCTTCGAGAGTTGTTTGGGGTTGGAGATGGG
TTCTTCCAAATTGGATACGACTTCGATTCCTTGGAAGCACGTAAAGAGTCGGCCTACTGC
GATCAGTACGATCCGACAAAGGAATATTGCAAATCTCTTATGATGGAGAAGCCATTTGAC
GTTCACACAATGATGGCTAAGCGTATTTCTGAGATCATTGGTCGCCAATTTAACCGATCT
CCTGCGAAAAACGTAAAATATGGGTAAGAGATCAAGCCCATGTAAAACTGTGTGAATTCA
GGGGAAGACTAGAACAGTCAATCCTGAGCCAAGCTAGAGTGATCTAGAAAGGTGCAACGA
CTATCGAAACCACGGCGGGAGCCGGAAGGGAGTAGAGTAGGGTCAAGTGACCCGAAGCGC
ACAGGGCGCGAGAGCGTCATGATATAGTCTGGTCTGCATGGGAACATGCAGCGGTAACCC
TTGAGCAAGGTTACGGGGGAGGATTAACGACCCTCCCTGAACACAACGGTACATACGGCG
CTCAAGCTGGTAAAGTGGCGAAAACCATTGGTGCCGACTTGCAAACTGGTCAACTGGTGT
TTGATGCTTTCTGGGATGCTGCATTCCCATTGAAAGCTCTGAAGGACGATCTGACCAAAC
AGTGGGAAGCCAACGGTAAGAAGTATATTGTTGGAGTGGACGGTCGCCGGGTTCCTACCC
GTTCGGCTCACGCTATCCTGAACAGCTTGTTCCAGAGTGGCGGTGTTATCTGTGCTAAAC
GTGCTATGGTGATTCATGACCAACTGCTGGAGAAAGAAGGTCTGAAGGTTGACTTTTTCA
AAGAAGACTGGAAGAACAAGCCGGAATTCTGCCAACAAATGATCGCGTACCACGACGAAG
CGCAGTTGGAAGTAACCGCCAAGTCGGTGAGCTTCAAGATGTTCCCTTGGTCTCTTGTAG
GCGGTAAGCCAGAAGGAGAAAAGGAACAGGAGGAGGCGGAGAAGAAGCTGAAAGCTCTAG
CTCAGGCTTACAAGGACGAACAATTGGCTAGCACTGGCAAGGTGTGGAGTGATATCGCAC
ACTACAGCAAAGGTGAAGGCGGGGTGTTTGTAGCTTACTGCCGCGCTGGAGAACTTGCCA
CGAAGGCCGTGAGAGCTGCGGGAGAGTTCTACTCTACTCCTCTGGTGCCTATCGAGCTGA
CCGCTGGCTACATCGTTGGTCGATCTTGGAAGGATTGCCACTAAAACTAGCATTAAGCGA
GGAAAGGGGCTTGACAGGCCCCTCCGCCTCCTATACAATGGCCACATATTCACAACATAC
AAGGAGAAACACAATGACTCTGGCTTTCATTATCTATCTGGTAATGACCGTATTCCCAGC
CTTGTCGTCGGCTGGTAGCTTTGCCCTGTTCGTCACCATCATCGCATGGGTTGCAGGAGG
GTTCGTTTACTTGGCATCCATTGGTGGCCGAGAGAATGCGGCAGTTAAAGCCACACTCAA
AAATCACCTACAGCCCTTGACATTTAAGCTGTTCCTCCCTATCATTGTAGTCGGCCATCT
GGTCCCTTCGTCTGAGACCGCATGGTGGATGGTTGGCGGGTACGCTGCACAGAGCCTCTA
TCAAGCAGACGCTACTCAGCAGGTTCTCAGCGAATCTACTGAACTGCTCGAAGCTCTGGT
TAAGCGGGCTAAGAAAGAAACTCTGAAGGCTGTTGAAGGCAGCAGCGAGTGATACGGTAA
TCACAGAATAGGAGGTATGGTATGAACACGGCTCGACTCTACGTCTACGGCAAATCGTCC
ATGGTAGGAATCACTGTTGACAACAAGGCCAATCGGGAGTACTATACCTCTAAAGGCTTC
GAGGTATCGGAGACACCGTTAGCCCACAAAAGCGTGGCTAACAAATACAAACAGAAAGGA
GGTAAATAATATGTCTGGTGTTATTCCCGGGACTATCGTCAAACTCACTCAAGTGGGATG
TGACGTCACCGTTGGCTGGCCAAAGGAAGCCCGATATGTAGGCGCATACGCAGTCGCAGT
AGATGGACGCGATATCGGTCTCCCGGAAGGGGAAATCCGGTTCTGCTCCCTCCATTGGTC
TATTGACCGAGACGTCAATAATGGACTTGGAGATTACCAGTCGATGCTCGCTGACAACGA
CCGCTTCGAAATTGTAGCGGTCCCGGGCAAGAAGTATTATGTTAAGGCTGTTGCCGCACG
CCCTGACTTGATTTCCCACTACTTGGTTACTTCGGAACCAGCCTTGTACGAAGGCTTCGA
GTCGTGCTGGTTGAAGAGCATGCACGAAGGGGAGAGCCCGTTCTGCATGACTTTTAAAGG
ACGCGTTGACATTGGCGGTGAAACCTCTGACGAGTTGCAGTTCCAGACCCTCTATCCCGA
GTTTGTGCTGGAGGAGTTCAAAGAAGAGGACGAGGCAGAGGTTAAGGTTGAAGCTCCGGT
TGACGAAGAGAAGAAAGAAAAGGTTGCAAAGCCTGCTGTAATGGGTTATGCTGTTCTCGA
TGCAGACGGGAGTCCTCTTAAATTCTGCCTCACTCGCGAAGAAGCGCGAGCCACCAAGCG
CTGGTGGGGTGGCAAGGCTGAGGGAGTCTCGATTGTAAAAGTAATCAAAGGAGAGGAGGT
GCGTTAACGCGCTTCTCCTCTTGAAGAATCCGGGAATGTCCGGTATAATCGTCAGTCAAG
TGGCTGACACACTCGCCCAGTCTAGGGTACTTAAATAGGAGAAATAAAATGGCTTTTAAA
CTGAACGTAACTACCAACACTCAATCCGGCAACGGCGGCATTCGCAAGGAAGTCGATTGG
GATGCTCTGAACAACCATGTCGTTGAAGCTGCCGGCACTGCCGCTAAGGCGCGTTCGATC
CCGGGTTATATCTCCGGTATCATCGATCTCGGCGAGCAAGAGCAGAACGATGCAGAGGTT
GTGTTCACTGGCACTGCCGAAGATGAAATCCAAATCATCAAGGAATATCCGAACACTTAC
TTCAAGGATGGACTGGACAAGCAGACTCGCAAGCCTGTACGTCTGAAGTGCTGGCCGCAG
CGCGATATGCAACAAATCGCGATCACTGTGGACTTCCCTCAGATCGAGGTAGACAAGAGC
CTGTACCTGACCGGTAACAGCAACAAGTCTCCGCTTCGTGTCCTGTACAACGGCGACTTT
ACTCTGCCGGGTCAGAAGACTAAGATTGTTGGCCGTCCGTTTACCATCAAGGAAGTGAAG
CACCCGAACGGCAAATGGGCGTTCGCTAAGAACTCCATGCTGCACAAACTGGCTGTAGCT
ACTGGCGTCATCAACGAAGACGAACTCTTCACCAAGGACCGCGTAGGCGAGCTTCTGGGT
AAAGTGGCTCAGTTCCAAGTTCGAGTGTGGATGAAGCCGGGCAAAAACGACATGAAATTC
CTCACCGAGGATATCAGTCTGGTCGGTATGGTGCCTGAAGGTGTTCCGGTCCCTGAACTG
GATGAGAAGTACATCTACGGCGTGAACCTGTATGGTGAGAACGACGAAGAGGCAGTTAAG
CAACTGCGTGCCAACGTCATCAACACCATCAAGCGAGCCAAGAACTACGAAGGTTCTGAT
ATCAAGGCGATGATCGAAGCTGTTGAAGCTGCACGCGGTGGTAACCGCTCCAGTGGCGAC
AGCGAAGAGCAAGCTGAAGATAAGCCGCAGACCCAAGCTGCACCTAAAGTGGAGCCGGTT
CAAACCAACGTAGATGATGACATTCCGTTCTAAAAGACGGTGGTAAGACAAGGGGCTTCG
GCCCCTTCTTTTCAAAAATTCAAAGGAGGCAACACATGCAAATCAATTTTGGTCCCATCT
TCCTTCTGGCTGCTATCGTTCTGTGTGTACTGAAATCTGCCGGAGTTCTCGCTATCTCTT
GGACTGTGGCACTCATGCCCATCTGGATTCCTCTTGTAATTGTATTGTCGATTCTCGTAC
TGTTTCTTGTAATTGTAGGTCTGATTTACGCATTCGGTGATCGTAGTAAACTGAACTTTA
GCTTTAAAAAGCACTTCCGGAATAAGTGAGGACTAATGATGAGTAGTTTGGTTATTGTTC
GAGTACCTGAGTACATTCTAAAAGGTCCCACAGTAAACAACCAGTTCAGCGGTGACCTGT
GGGAGCGAAATCTCTTCAAAGATTTGAAGAACGCTGCGGAGTGTATCATTAAAGGAGAGC
CGGCTTATGTTGCTCTTCCTAACAAGGTAAACCCTGACACTCTACAAACAGAGTGGGACA
TTCAGGTTGTACAGTTCTAACCCAAGGGGAGCTTCGGCTCCCTTTTTCATTGGAGATAAA
AATGAGTGAAAAGGAAGAGGATATCGTCCTCATCGACGGCGACCTTATCGCCTTTAAGTG
TGCAAGTGTCAACGAGACCCGCTCCATCATTGTCAGAAACAAATTGACAGGAGAAGAGGA
AACTTGGAAGAATCGGACGACTTGGCGGGAGAATAACAAAGACGAAGAGGGATTCAACGA
AGACAACTTCGAAATTGAGGACCATCAAGACCCCAAGCACGTGTCCTACGGTATCTCTGT
TGTTAAGACCATGATCGACCGAATCTGCCGCCAAGCTGGGTGCAAGCAGTTCAAGATTCT
CCTGTCCGGTCCTGACAACTTCCGCGATTCCATTCCCCTCCCGAAAGAGTACGAGATTAC
CAAGGGTAAAAAGACCTTCACTCGTGGCGGCAGGTACAAGGGTAAGCGTACAGGGCAGAT
TAAGCCTCTTCAGCTAGGTCAGCTAAGGCAGTATATGATCGAAGCGTATGACACCATCAT
CCATCCCGGAGAAGCGGACGACTTGATGGCCGAAATGATGTACAAGAACGGTGTAAGCTA
CTCCAGAGGGGAGACTACTCAGCGCGTGATCGGGGCTACCATCGATAAAGACGCAGACGG
CACTCTAGGATGGCTTTGTAACTACGAACGTGAGCCTGTTCAAGTCAAGTTCATTTCAGG
CCTAGGATCGCTCTACAGGGACTCTAAGGGCAAGGTGAGAGGCGAGGGACGTAAGTTCTT
CTACTTCCAGTTGCTGTTCGGCGACCCTGTTGACTGCTACAGACCTGCCGACCTGTGCGT
AGGGAAAGACTTTGGAGAAGTGGCGGCATACAACGTCATCAGTCCCTGCACAACGGACAA
GGAGTGCTGGCAAGCAATCTACGACACCTACAAATCGTGGTATCCTGAGCCTGTCACTTA
CACAGCATGGGACGACACAGAGCACACTAAAGATGCAATCGATATCATGCAAATGTATTG
TGACTGTGCTCACATGCAACGCTGGGCAGGAGACAGAGTGGACTGTAGGGCGGTGATGGC
TAAACTCGGGGTAGACTTAGGAGGTGCAGAATGAGCGTAAGGCCTCGCCCTTGGGAAGAC
TTCCCGGGCATCTGGAAGACTGAAGCTGCGTTCTTGAGTTGGGTCAGAGGAGGCATTCGC
CGCTATCTCTGGTCTAAGAACCCAGTCAAGCTTGAGTTTGCTAAATCCCGAAGGATTAGG
ATAACTAACCCCAGCGAAAAGAGCAAGCTCAGGAATCCCACTGTATGGGGCTATGTGTGT
GAGCAGTGTGGAAAGGAAACTCCTCAAGCTAACGTCGAGATTGACCACAAGACAGGGGAA
TTCTCCCTGAAGCGAGTGGAGGACATCCAATCGTTCGTGGAAGGTGTCGTGTTTGTCCGC
ATGGAGGATTTGGCAGTGCTGTGCAAACCGTGCCATGAGATCAAGACATACGCCGAGCGC
TACGGGCTGACCCTAGAGGAAGCAGATATCGTAAAGCAGGCTATTGCAATCCAGAAGCAA
AAGGGATATGATAAGGTCTTCTTGCAGGAAGTGGGAATCAAACCCGCATCCAACGCAGAG
CTTAGAAAAGAGCAGATCATCGCTCATCTTAAATCAAAGAAGGAGGGTATATGAGAGAGA
AGTTTCTTAAAATCATGCGCAAGCTGCCCATCAGGGTAAGGGCTTCCCTTGTTCTGGTTT
GGATTGCTCTGTTCTTCTGGCTCCCGGTTGTAGCAGCATTAATTGCCGGAGTTATAGACT
TCTTTTGTACTGCAAAGGAGCAGTTGGAAGAGGGGTACTCTGTTCTGTTCAATGCCACTC
AGGGCGCGATCTGCTGCATTAAAACGGGGAAGGAGCTGGAGTTATGACCAATCTAGCTAC
ATATGTTATCCGCCACAAAAAGACTAAAGAGCTTTGGACTACTCCTAAAGGGAAACGTCA
ATGGACCACGAAAGGAGGAGCGGCCTTAGCTTGGAGGAACGCATATGATAGTACTACACT
GGGAGCGTACTATGCTAAAAGAGATATGGAAAAGTGGCCCGACCTGAACATTCCTTTGAT
TGTAGAGACGGGCATCCATCGTCTGGCTAGCTGGGAAGCAGCATCTTTTAAAAATCAATC
TGCTTTTGAGATTGTTGATATTGCTGAATCCTTGAAGCACGAAAGCCAGTTGGTGCTCGA
CCTACTGAAAGATGTTATTGGGTTCGAAGTGCCAGATCACCTCGGAGACGGATACGTCCG
ACTCACCATTAAAACGTCCACATACGACGATATCATCAAACTACTGAAGGAGGCAAAATG
AGCATGACTGACCCCCGAGCGTATTTCATCAAACAGGAGCTGGAGGAAGCAACGAAGCTT
CTAGAAAGAGCCCTCAACCTTCTAGATAACGTCCATTGCTACGATACAGATGTATACGAG
GACATTGCAGCATTCCTCTACGGTCAAGAGTGCGAGGAGGAATAAGGTGCAGCGCGATAT
TAGTAAAACTATAGCAGAACTTCGGGACTTGATCGAAGCTGTCTCTATGCTCGACGAGGC
CTTGGTTATGATGCAGAAAAACGGACTATATGATACGGACTTGTACAAACGTATCGATGC
ATTTTTGTATTATCAACCGGGCGAGGGCGAGTGGGAGGAAGTAGAATGAGCAGCAAGAAA
CACTTTGTAATCTCTGATACACAATGCAAACCGGGTATCAGTCTGGATTACATGGAAGCC
ATCGGTAAATATATCGTGGCAAAACGTCCCGATGTTGTGATTCACATCGGGGACCATTTT
GACCTAGCTAGCCTGTCATCCTACGATAAGGGTAAGCGCTCCTCTGAGGGCCGTAGATAC
GCCGAAGACGTTCAAGTCGGACGTGAGGGTCTGGATCGGCTGTTTAAGCCTCTGTGGGAG
CTACAGGAGCGTCAACGGGCTAATCGGAAGAAGGTGTACCAACCTCGGTTGATTTTCACA
CTGGGCAACCACGAAGAGCGGGCTGATCGAGCAGCGAACGATAACCCTGAGTTGTATGGC
ACCGTGGGTAGCGATGAGCTAGGGATTCAGGACTACGGTTTTGAGGTTGTCCCGTTCCTC
AAGCCTATTGAAGTAGATGGCATCTACTACGTCCACTATCTTCAAAACCACTTCACTGGC
AAGCCTCTAGGTGGTACAGCGAACAACATGCTCAAGGCTGCTGGTCATTCGTTTGTCATG
GGCCACCGTCAGCTTCTGGACTGGGCAATCCATCCGACAATCGACGGTAAACAAAGGCTT
GGCATTGTGACTGGAGCGTGCTATCCTCACGACGAGGCTTACAAAGGCTATCAGGGCAAC
AATCACTTCCGGGGTTGTGTTATGATTCACGAAGTGAAGGATGGTTTTGGTCTGCCGATG
CCAGTGAGTCTAGACTTTATGATGGAGAAAGGAGGTTTCAAATGACAGTTTATAAGTTCT
GGTGTGAATGGGACATCGGTATCAATGAATACCTGTGGCGAGACTACTATCAGATGGAAG
AAGATGTAGCTAAAGCCTTGTCAGACTGCGGGATTGAGGATACTATTGAGGAACTAGAGG
GCGCAGGCCTGCTCGGTTTCGACTCTGTTAAAGTGATTGGTTAATAGGAGGGCATATGGC
TGAGTTTTTCCTTGGGGCGGCCCTTGCAGGCTTGTTCTTTATGTTTAGTATCACTGCGAG
CTTTACCGCCGAAGATATCGAGAAAGTGACTTCAACATGCGAGAATAACGAAGGCGTCAA
GTATTTCGGAGTTGACTTCTTCGGAGACGGTGCTGTACACTGCAACAGCGGCGCTATTTT
CAAAATCGACCGTAAATCTAAATAATCGAAAAGGAGATATAAAATGACTGATTTCAACAT
CACCCCTGAGCAAATGGAAGAAGCAATGGCAGGTATGAACCCGGAGCAGCGGGCTCTGGT
AGAGAAAGCCTTGACCGACCGTAAATCTCTGGAAGATTCCATCGTGACCGAGGACGGTGA
ACTGGACTATGGCATGCTTGCACGACACATCCGCACCAGCTTGGGTGATCTGCCTCTGGT
AATGGGTGGCCCTGACTTCCTGAAGCTGATGATCTTGGTTGCTGCGATGCCGGAGACCAA
AGACGATCTCCTGACTCTGCACATGAACCTGTCCTTCATTCTGGACTGCATTCGTGAATC
GATTAGCGACGAGGAGTAACAAGTGGCCGAAGAGATTGTAAAAGAAGACCTATCTGGCGA
CGATCTCATGGTTGACTCAGCAGGGCTAGATGCCCTGCTGGCCTTCCTAGAGAGTCAGTT
TAAAGGTCCGAAGGGTGTACTGAAGGGATATGTCACTATGAGAGTGATGTGCGCTAAGAT
CGAGAGTCTTGACGGGTTTCAAGAGTTGAAAGATATGGAGGTGAACTTTGAGTAACGATA
TCATCGACGTTCATGCTGGGCAACCGATTTCTCTGGTGCAACGGTCAAAGAATCCTATCA
ATATTCAATATTGGGACGCCGATACCATCCCTCACGGCACAGTCTTGGTTGTTACCGAGA
AAAGGGGCGATATCCAAAAGGGAGAGTTGGTCGTAAGGCTGGCGAGTGGTGCAGATGACG
AGCACTCTGTTAAGGTATGTAGATTCTCTGATTTCTTCCTCCTAAGGGAGAGAGGTTATA
ACCCAGCCAGTCTCGGCGACGTTGAACAAGCGTATGATGTTCTGTTCGAAGACCCTCCGG
CGACTACCTTTGTTAACTGGGATCGGGCTCAGCCTTTGACAAACAGTGAGCGCTACTACG
GAGACTTTCTGATTGGCGGCGACCCTAAAGGGATGCCACTATTCAACATGGCTGTTCTTA
AAAATGTTCTGTCGCCTTACACTGCCGACGATGAGGAACTTTCAGCTATGTCTGGGAATC
CCGAGACAGTAGAGCACAAAGAAGTTGACGAACTAAGTGAGAGGGACGAGGCTTTAGCCG
AGGTCGACAGACTCAATGAAGAGCTTGTTGCACTGGGTAAGAAGGTTGTGTTCGCCAACC
TAGAAGATTACCTAGGCAAAGAAAACTATGCCACATTGGAAGCTATGGCTAACCACAAGG
AGGCTGTAGGTAGCGGAGGCTCCTCTAGTTACTACACTGTCAAGGTGAACAACCCCACTA
CGAAGGCTAACATGCCGTATTTTGCAGAGTGCAACGATATCATCGAAGCGCTGGATATGC
GATTCGGTCAAGGCAACATGTTCAAAGCGTTGTGGCGGGCTGCGGCAGCACAGAACCTAG
GCAAGCTGAAGGCCGGTAACGATGTTATCCGGGACTACGAGAAAGTCATCTTCTTCGCTC
AGTTGGAGATCGATAAGATTCTCAGAGAAAGGGGTTGACATTCTCCCCGAGGCTTGCGAT
AATAGGCTCCAAGTTGAAACGAAGGAGGTGTGTAGATATGATACAGAAAGTAAAACAGAA
GCTCATGATGGTGCATCCTATCCTCGCTAGCGAGATCGTCTGGTGCCTCACCTTCGCAAT
GCTTCAGTAAAACAAGGGAGCTTCGGCTCCCTTTATTGTATCAAAGATTTAATAAGGAGA
GTTTATGCAAATTTCTGCAAAAGTGATTCAACACAGTTCCCGGATCGGCCTAGGTACGAA
GAATCACAGATTCATCACTACATTCGAACTGGAGTATCCTCGGTTTATTCACAGTGAACT
TATGACTCACCGACTTTTTAGTCGAAATGCTGCAAGTAGTCGTGCCATTCCCGTTGCCCA
TATGATCCGACAGGTGGAAGAGAATCCTGCGATGCCTGTTCACTGGGGAATGAATCAACC
GGGTATGCAAGCTGAGTTCGAACTGAGTGAGTGTTTGCAGCGTAGCTCTCAGTACCTGTG
GAAGAAGGCTGCAAAGAGTGCGGCTCGGATCGCTAGCGCACTAAATAAAATGGGACTCCA
CAAGCAGGTGGTTAACCGTCTCCTTGAGCCATTCCAGATGATGAAGACCGTTGTTACAGC
CACGGAACTAGATAACTTCTTCTACCTGCGTTGCCATAAAGACGCACAACCGGAGATCAA
GGTTCTCGCTGAGAAAATGTATGAGGCTCTTATTAAAGCGGGCCCGGCAGAGGCTCTATA
TGACGGAGAGTGGCATGTTCCTTATGTGACTCGGTTCCGCATAGGGGATGGTAAGCTGCG
TTACGCAGATTGTAACGGGCAAGAACTGAGCGTAGAGGATGCTATTAAGGTATCTGCTAG
CTGCTGTGCTCAGGTTAGCTATAGGAAGAACGACGAGACTCTGGAGAAAGCTCTTGTAAT
CTACAACCGATTGGTAGATACTAAGCCCGTTCACGCTAGCCCGTTCGAACACCAAGCAAC
ACCGATGCTCCGCATCTCGGACAATCAAACTGGATGGGAAGACGGTGTGACGCACTTGGA
CCAATATGGTGACCTCTGGTCTGGTAACTTCCGAGGTTTCATCCAACATCGTCAACTAAT
TAAAGGGCACGTATGTAATGAGTACTACGGCCAAGAAGAGGAAGGAGTTTAAAATGGCAG
AATATAACCTGAGTCTGGAAGACCTCATGCTGGTCGATGGCTTCAAAGAGGCATTCCAGA
GTAATAATGAGAAGGTAGTGAGGGAGCATCTGTGGACTAACGGCATGGATGTTAAAAACT
ACTCGTATGAAATGGTTTTCTGTCAACATCGCACACTGATTGGCCGGGTCGTAGAGGGTC
TACGATTCTCTGGCTTTGAGCGGACAGATAAAGAGTGGCTGAGCCTCGGTTGCGCCTCTC
TGGAAGCTCATATTGCAGCGTGTGATGATAGTAATCTACGGTTCACTCTTCGTAAGATGC
GACCAGAGGGATCGACAGAGGCAACGTTCCACAATTAATGCAGTAGGAGTAGATATGGAA
GTTACAAAGGCTCTCGCAGATGAGGCCGATATTTTCAATAAGATCACACAAATCAGGACT
CCAACGGAGTCCTATGCCCGGAAATATCCGGTCATTGTCGAACTAGCAAACCAGCAACTA
GAAGAGAAGTTGTGGTTCTCTAGCGAAATGAAGGTAGAGCTGGATAAGTTGAACCTGAAG
TTTAAGTTGGAACCTCATCAGCTTCACGCTGTAAAGACTGTCCTTCAACTGTTCCTCAAA
TACGAACTGATCGTAGGGGAGGAGTTTTGGATGGGTAAAGTAGTCCGAACGTTCCCTCGC
CCAGAGGTTAAACTAGCGGCTTCGATCCTGTGCATGATGGAATTGGCAGTCCACGCTGAA
TTCTACAACCAGATCAACGTAGTGCTGGGGATGGATACAGATGAGGACTATGTAGCTTAC
AAGGATGACCCCGAGCTTATGGGTCGAATGGATTGGCTTGAGTCTGTCCTAGGCGATGAA
GACGATGTTCTTTCGGTAATTATCTTCAGCCTAACAGAGACTGCCCTTCTGTTCAGTTCT
TTCGCTATCCTGAAGAGCTTCCAGTGCAACGGGTATAACGATATCCCTGTCATCGCACGC
GGGGCTAACCAGAGTGCTGTGGATGAAGACTTGCACGGTGTAGTTTCGGCTGAGATCATC
AACCAATACTACGCAGAGATTGGGAGACCATTGTCTGAAGATACTCGGCGTGTCGAGAAG
ATTCGACAAGCTATCGACCATGTATATGCTCATGAATGTCGTATTGTCGATATGGCGATC
CCGGGCGGAGAACTTAATGGGGAGTCGGCTGAAAACTATAAAGCGTTTGTTCGTTATCGT
TTGAATGTCTGGTGCCGAAGACTCGGCCTAGAAGATCACTTCGAAAACGATGACACTCCG
ATCAAGGATTGGTTCGAAATGAACACTTATGCCTACAAGATGATCGACTTCTTCACTCCG
GGTATGGGCATGGAATACGAACTAGGGTGGGATGAAGAGGAATTGGCAAAGGCTTGGGAA
GAGGAGCTGAAATATGAGTAAGAGAGACACGTTCAACTATTCCGAAGCTAGGAAGAACAG
CCAAGCAACCGGCGAGACTCCTCTATGGTATACGACGGCTGGCTACCAGTTGTTCATGAA
GAAGTATTCGAACGAGGGCGAGTCTGTACGCTCTCGCTTCCAAGCTGTAGCTCGCGCTAT
GGCTCAGCACGCCCCTACGGTGTATCCTGAGTGGTGGGAGGAGGACGAATACACTAGAGG
CAAGGACTGGGAACAGGTATTCTTCGACGTTATGTGGGACGGTTTTGTAAGCCCATCCAC
TCCGCTTCTGTCGAACGGTGGGCTCCGCAAGAAGGGCACTACGGTATCTTGTGCTGGCGG
TCTGATGGACAACAACCTCTATGACCGTTACAATGTAATGACAGAGATCGCAGTGCTAAC
GAAGCACAGCCATGGCACAAGCTTTAGCCTGACCAACTGGCCATCAGAAGGAGACGCTAT
CCGAGGCGGTGAGTCTCAAGGTGTGATGCCTGTCATTCGGGACGTTATCAACGTCATGGA
AGAGGTAGCACAGGGTTCTAGGCGTGGTAGCTGTGCATACAGCATCAACCCCCGCCATGG
AGACTTCTGGAACGTTATCGATCACCTGTATAAGCGCACAGAGTCGAACAACGTCGGATG
GCTTCTAGACGACCAGTGGTGCAAGGATATGGCCGAGAAAGACCCGGAGACCTTGAAGCG
ATGGAAGCGAATGATGTTCGTCAAGCTGGCCAGAGGAAAAGGCTACTTCACGTTTATCGA
TAAGATGAATCGGCACCTTGCAGAGCCGTTTAAACGGGCGGGTCTACGCTGTGAAGCGTC
CAACCTTTGTCAAGAGACTGTTCTCCCGGCAAATGACTGGTATACTTTTAGCTGCGTTAT
CCTGAACTACAACCTCGAACTTTACCGTTCTTGGCCTAAGCACCTTGTGTTTATTGGTCA
GGTTATGTCTGATTGCAACATCAGCGAATACCTAGCAACCATGGATGAGGTCAGCGTTCA
GGACCGCCGAGCACTGGAGAAGATTTACCGATTCACCAAGGACTTCAGGGCGCTTGGCAG
CGGTGTTCTAGGGTTCCACACCCTGCTACAGCGGGAGCGATTCCCGGTCGGTAGTATGGA
TGCTATGTTCCTGAACAACGCCATCTTCAAGGGTATGAAGGAGCAAGCGGAAGCTTGTAA
CAGTTGGCTAGCTGAGGTTCTAGGGGAGCCAGAGGGCTGCCGTGGACTAGGGAAGCGTAA
TGCCACTACAATGATGATGCCGCCAACTAAATCGACGGCAGAACTCATGGCTGGGGCTTC
TGAGGGCATAGGACTGGACGTTGCTATGTGCTTCACCAAGCAGAGCGCTGGAGGTGAATT
CTTCCGTGTCAACAAGGTGTTGCTGGAGATTATCCAAGAGCGAGGCCTCGATTGGGAAGA
GTGTGCAAGGCAGATTAACGAACGTAAAGGGAGTGTTCAGCACGTAGACTGGTTGACTGA
CCACGAAAAGGCTGTGTTCCGTACTGCCTTTGAGGTGAGAATGGAAGACTACCTGCGTCT
GTGCTCTCAGCGGCAGAAGTACATCGACCAAGGTCAGAGCATCAACCTGTACTTCACGTC
GAACGACTCGCCGGCTTACATTTCGTACATCCATCGTCTCGCCATGGAAGACCCGAACAT
CCTATCTTTGTACTACATCTACAGTATGAGAGGAGCGGGAGATATCTCCAGAACAGAAGA
ATGTGAAATGTGCATGTAAAATCATTGGCCCGGGGCTTGACAGCTTCCGGGCCTTTGTGT
ATTCTGAGCACATCAAAACAAGGAGGGACTAAAATGAACAAATTCTCTGAAGTGTACTAC
ACTTGGAGCGCAGCGTGCTCTCGTACAAATATCTTGATAGATATGGGATGGACTGCTACA
ATCCGTCGAGACTTCACTGGCGGGATCAACCCTGTATGGGTTGTGGAGTTCACGCGATGA
ACAGCAAACTCCGCAAAGAGTTCGATAAATGGTGGGGACAGGACGAGCAAGAAGAACTTC
GTAAATCCTGTGCCAAAGGATGGGCGGAATATATCTGGATGGCTAGTCGAAGAAAAGTGA
GTGTTGAGCTTCCCGCGCCAGAAGGCGGATTTATCGACATCCAAAAGTACACAATCAATC
GCTGCAAAGAAGCTATCCGCGAAACAGGACTGGAGGTGTTTTAATGAAAGAATATTTTAA
AAAGCGACTAATGCAGACCAGTGAACCGTTCGATTCAGCGACGCAAGCTATGGACGTAGC
GATTGCGTGGGGAGGGGCTAAGTACTGCGAATTCACTTGCGTAACTGCGGATAATCGCGT
CATCAGCATCTGGGAGTACAATGACGTAGAGCCTGATAAACCGGTATTCAATGGACAGCA
ACGAATCTTAGTTCCAACTTTTGAGGAGGTAGTATAATGGAACAAACTATTGATAAATCT
CGGTATATTGTGCTTGATAACGAAGGTCGGCACGTTCTGACCTTGTGCGAGAAGGCCGCC
TATAACCTGCTTAAAGGCGTTCAGTGGACAAAGGACAAGCATGGTCAAATCCATGTAAAT
GGTGTCACAGGCGTTGAACTCGGAGTTCGTCAAGGGATTATCGCTGAAGTATTCCTGTAT
CCGGGCTACATCATCCTAGAAGAGGTAGACTAATGGATATGTTCGATAAATACATGCAAG
TTATGTATGACCGGGACGCTTTCTCAAGGCGAGTCGGTGAGTTAGAAAAAGAGGTAGCCG
AACTCAAGGCTAAGGTGGCTATCGCTAAGTGTGATATGCGTGTCGTGAAAACCCTACTGG
AAGATATCCAATGGGTGTATCAAGACGAAGCTATCTATACTCTACCGGGCTACGTTTGCC
CTTGTTGCGGGGAATCTGCAAACTATGGGCATTTCCAAGGCAGCTTCGATAAGAGCCCCT
GCCTACTAGCTTGTGTACTGAGCCGGAGTGAAGCATATGAAGCCTAATGTTGTAGACTCG
CTAGGCATTAACATGTGCTACGCCTGCGGAGGTAAACTGTACGTCCGAGGAGTATGCACT
ATCTACTGCCCTGACTGCGAGAAGGCAGAGAAAGATAAACCGTTCGTCAGGATGCAGCTT
CTACAGGATATCGCAGACAGCAAGAGGGTTGACAACGAATAGAAGTGCTAGTAAGATGGC
CACATCAGACAGAGGAGGAGCCATGGCTACAACAGAGAAGATCATCGAGTATGTCTCGGC
CTGTATCGAACGCTTGCAAGAGGACGTAACTGGGTACTCGGAGAACTTCCGTGACAGGGC
GTTATCTAATCGCACAGGGTATATTCACGGGCTTATCACTATGGCTGAAATGAATGAGCA
GGTGAGTATCGAGGACTGCGACAAGCTCCGTGTAAAGCTTCGTGAAGCTGCTGAGGCTGT
GTTGAACGTACTGGATTCCAAAATTAACTAGGAGGTGCTCTGATGAATATGAAAGAGATT
GTGCAGGCTTTGATTGTCGTTGTCGCTCTGACTCTCGCAGCAATAGGTTTTGTAGTCGGG
ATTACTGCGTTGGCCAACAAGAGCGCGCCCGCCGAGGATATTGTCGTGTCTACTGAAGAC
GGCACCATCAATCTCGGTCGCTCCGTGAAGAGCGAGAAGCTGCTGTATAGCATGTGCATC
AAGGTAGAAGACCGCAAACCTGCTTGTGAATTCACCACCAAGGACCGTGTTCTTAGCGAA
GTGAAACAGGTTATGCGCCCGGGCGAGGCTACGGCCCGCGATATTAAGATTGCAGTAAAC
GCGGCTGTGACGTATACTGGTGAGAACGGGCAGGAAGCAACCTCTCTGATTACCCCGAAA
GGTAAGTATCTCCCGGCTGGCACCCCGTCTGAAGTACATATTCAGGCTATTGCGAATCTG
TTCGACAGCGTGTACAATGACTACAAACAAAACTTCAGCAAGATGTGAGGAGGACTCATG
AAAGCACAGCCTAAAGAAGTAGAAACCCTGTCCCTCGACAAGCGCCCCAAGGCAGGTGAT
GTTGTTCGACTGCGATCTGACGGTAAAACCTACGAGGTAAATGCTGTATATCCCACGGCA
GTGGGCTGGGAAGCGATTCTCCGCAACATGTACGACAAGACTAAGACCGTCACTGTCAGC
ATGGAGTGGTGAAATGGCAAGAACCGTCAAGTGCGTAAACTTCCTACCTGTCACTCCGGA
CGGTCGAGTAATCGTCCGATTCGGCAAGAAGAGGCTAGGCTGGCTTGGGAAACAGGGTAA
GAAGTGGCATTACTACCCTTACGGATGCGAAGGCAAGATTAAATCAGAGGGGTTTAAGAC
ACTCGCCGAGATCAAGGCTTGGATTCGAGACCCGGAGGCTGTATGGCCCGGTCCGCAGCC
TGAGATTGACTAATTAGCCGACGAATGGTACAATGGTATGTAGGAAATTCCCTACTCAAT
ATAAGGAAACTAGCAATGACTAGCCGCTGGAAAGAGGCCGTGTATCGTAAGTACTCGGTG
CGTCGTCTGCGGCAGGAACTCGAAGAGTTCAAAGAAGCTAGACGCTTTGCACCAAATCAA
CGCATCCGTGCATGGTTTGATGCTCATATCGAATTTCTAGAACGCCACTTGGCTATTCGA
GAGTCCGGCCAAGCCTACCCAGACGACCTTTGGTAATTAGGTAATTAGGTGTGTTGTAGG
TAGAGATTCAAATCATGGTTAGTGGCAAGGACGCCACACTTCAGCCCGCCCACAAGGCGG
GCTTCTTTTTGCCTGAAATTTGCGGTTGACAAGGTTGGCCGGAATATGTAAACTTACGGC
ATCCAACAGAGGAGGGAAGAAAAATGCAATTCAATATATCGAAGCAACTATGGGTAGCTA
AAAGCGAGCGGAAGGGCGACTATAAAGGGACGCTTTTGGCATACATGTCTCAAGTGGACT
TCAATAAAGATGGTAGCTTGGCTGCCAGCTTCAAGAAAAAGCAGCAGACTGGTATGAGCT
GGGCAGGTAAGAATGCCGAGACTTGCTTCATAGACAACATCCCTATCTCGGGGCATTTCA
TCGGGGACAGTGTTGAACGCTGGGTCACTGAGAACAAATATTTCCGTGTGACGGACCCTA
GGGGCTTTGTTCTAGAGGTTCCTACCGGGAATATCTCGACCTTGCTCTACAACTGCACAG
TAATCAAGGGAGTTATTCAAGAGCCTTGCGTGTGGGTTCGGATGGGCTCTCAGCACGTTC
TACTGCCGGAAGGCTCCTCTCTCTACAAAGAAGCTGTAAGTTTCGTAGAGCGAAAAGAGG
CGGCCAAAACTGTTAAAGATATGGTTGCAGGGGATCGATGCACTCTTCTTAGCTATGGGA
CAGAGGAGAAACTAGAGGCTGTCTACCTCGGACAGGTGAAGATCACTTGGCACCTCCTAG
CTAAAAAGGGCCGGTACTCTAGCCGAGGGTGGGGCGGGGGTCGGTGGGGTTACCACCATC
TAGAGAGGGAACTAGATAGAAAAGAATTCACTGAGAAAGATTCGAAGTGGGTTAGTGTGT
TCGCTAAGCCGGTAGGAAAGCGGTGGAGTATCCATTTTATCCTGTCTCCAAAGGCAACCG
ACATTCAATCTGGAAGCGTCCCGGATGAACTTCAGAATCTCGACCTAGTGAATGGTGTAA
AATGGGAGTACAACGAGAAAGACGACCGTCCGTCTTCCTATTACTCTGTGCCGGAGAGGG
TAGTTAAGTGTATTAGTGTAGATGATCCTCTATGGGATAATCTGCACAGCTCCTCGGAGG
TGCGGTGGACCCGCGAATGGACCGTGGTCGGAGCAGAGTGGCGAAAATAAGCCACCATTA
TTTTAGAATTGCCCGGCGAGAGCCGGGCTTTTTCATGGCAGGGGTTATTTTCAAATTATT
TTTAGATTTCTGGGAGTTTCGGCCAATATGGGCAATATGAAATTTCTCAGGAAAAGGCTC
AGAATGCTCGTATAAGAGCCGTTCGAGTGTAGGTATGGTGAGCTACTACTTAGCCGTAGA
AGGACAGTGTAACGCTTAATAGGAGGGTTAGAATGAAGATTGACAACGGTAGCGCGTATG
CGTATTGGCTAGCGGATATGAAAGAGTTTGTTTCTCAGATGGATGCCACAGAGATTGAGA
AGAGGGCTTGTATAGCATACTTAATTAGCTGGTATCAGCGAAGAGTACTGCACAGAATTA
AACGGGAGGAATACGAGGCGATCTAAGCTAGGGACCGGACAGATTTTTAGGGACTGGATA
GATTTTCACAGGCTGCAAAATTAGGAACTGGGCAGATTTTTAGGAACTGGACAGTTTTTC
ACAGAAGGGGATTTTTCTACAGAGGAATTTCCCCTGAAATTTAGCCGGATTTCTCAGAAG
GGCGGATCGTTAGCAGGCTATCTAATTGGTTAGCAAGCTACCTTTAATCGTTAGCACACT
AACTAAAAATTCCTAGGACGGACCTCAGTTGGCACGAACGTTGCAAGCCCGCACCAGTTT
CCCGGGCAGGCGTAGGCCTCGACTATCCGTCGTGAAGGCGATATGTAGTTGGGGACTCGC
ACCCCGCGTTTAAGATGCGCCCATTCTACTATGACAAACCCCTTTGTCAACATAATTTTT
ATGGCACAGTCTTTGCAATTGCAATTAGCGTGCCAACCTAAATCTCAGGCTCCCTCGGTG
TTTATCTCCGGTGCTCGGCCTCCTGCCTGCGTTGCCCGCCTGCCTGTCATTATACACAAG
CTATCAAGACAAGCAAGAAAAATTATAGAGAAAAATCTACATAAAACAGGTTGACAGGCC
TCCTTTATATATGCACAATGACCCCACATTCAACGGAACGGCAGGTAAGCAGCCATGCTA
CATAGTGAAGCCCGGGCGATGGCCCTACAAGAGATGGACAAGTGGAGCCTCCTCGAACAA
GGTTGGAAATTCAGTTTCAATCGCAGGATGAAACGGACGCTAGGCCGTTGTAATCACGCT
AAAAAGCTCATAGAGCTAGGTTACAGCTACGTATCTGCCAATGGAGTGCCTGCGGTATTA
GATACTATCCGCCATGAAATAGCTCACGCTAAGGCGGGACCGGATCATGGTCATGATTCC
GTATGGAAAGAGTGGTGCGGATTGATTGGCGCTAAACCTGAGCAGTACGCCAGCACAAAG
GAAAAAGTAGTCGTCTATCCGTGGCGACTGGCCATCCATCACGGTGGCGGCCAGCTTGAA
CTACTCAACCATTACGGTTTCAGACGGACTAGCATGGCGAGAAAACAGGTACGAGGACGG
CCTGAAACGTTGGGCAGGTTAATTTGGGTGAAGAACGAAAATAAGGGTTGACAGCTTGGG
CCATTCGCGTAGAATGGCCCTCAAGCAAAGGGAATCACCCTGAGCACCCACGCAGGAAAG
CAGATATGAAAGCTCTTTGTAATCATCGGGCACTCTACGCGGCTTACAATCGTAGCGAGC
TTGATCGTATTGCGGTAGATTTGAACCGCTACTTCCCTATCGAGAAAGATGATGAATGGG
AAGACGGCGTATACATGTATCGTCGCCGCACCTATCTGGTGAAGCATTCGAAGGGTACAG
CCCGTTGGCACAGCCTTTACTGCAATGGGACCGTCCAAGGCGTCGGGGTTATCTTTGACG
TGAAATCGGTCGAACCTTTCCGCACAGCATAAGGAGATTCAGAAATGCAAGCTTGGAACG
TATACCAGAATGGCCAGTTGATCGATACTGTTTTCTTCGATATCATGTGTGCTGCCGAAG
AGGTGCGGAAATCGCTGGTCAACCATGACGGGTATCCGTCTGATATCACTGTAGAGGAGG
CCGAGTAATGGATAACCTGTCCGTTAAAATCGTTCTGTCGGAACTCAGCTACAAAGCCTT
GATTCAAGCCTTCGCCTTGCTTGGCCGAACGCTCGACCTAGACGAGGGGTTGGACGATAT
ACTTAATCTTATTGCGGATGAGATCGCTTTCCGCGACGGCCTGCCGCCTTTCGCAGACGA
CTGCGATAAAACAGAATGGATGCTCCGTCGATGGGAATCGCTCCCGGTGGTATCGTACAA
TATCGGGCAGGACGGACCGATTGTCGCTCGGTCTATCGAAGTAAAAACGGCATGAGGGGA
GAACTGATGACCGTCAGAGTAGGAGATATCGTGGCTATCCGGGGCGACATTCGGAAAAAG
CTCGACGGAACATGCCAATACACGCCCGAACAATTGGTAGGTGGTAAATTCCTCAAGCAT
GCCGGCACGGGAGAAATATGGACTGGCCGAGTGAGTAAGATACAAGGTGATATGGCCAAG
GTGGGAGGGGCTTGGCGCGGGATCGAATTCTATGTGCTCATTAGTGAAATAAACGCTTGA
CAACCTGACCCACTAGCTGCAAAATAGCACCCACAGACAACGAAGACGCCGATAGGCGAG
GAGAAAGCAGATGCAAATGTTTTTCAAAACCCGTACCCAAGCCCGTGCAATGGCCACCAA
TGGCCGCAAAGTGGTAGACAACGGCGCTCAAGCTGAAAAGCGCTGGGCTGTCAAGCTGAA
CAAAAAGGAGGCTAAGTAATGGCTAAGTCTGTTAGCGTAGACCGCAAGCGATCCATTCTC
GACGAAGCGAAGGATGGGAGTTTCTTCAGTGTGGAGTTTATCAAGGCGGACGGCACCGTT
CGGAAAATGACGTGTAAACGTCAGATCAAGTCGGCGTATGCTAACGGCCAGTTTGCTACC
CGCAAGCCCACCAGCGCCGGCAAGCCGCACCTGTATACCGCCGCCGAAGTGCTGAACATG
GAAGAGGGTAAATCCGCATTCCGCACTATCAACCTTGAGACCCTGACCCGTGCCAAGGTA
AATGGAATCGAATATAAATTCGATTAAAAGCTTGACAGCCTAGGCCATTCCTGTAGAATG
GCCATCAAGCAAGACAAACTTAAACAGAAAGGAGATTAAAATGGCACGTTCTATCAAGGC
TTCCGACTTCGATTCCGCTTACCAGTTCGAGGCCGCCAAACGTTCCGAACGTAAAGAATC
CCGCAAATCGCGTGACAATCGCAAAGCTAGCCGAGGCCGCGCTTTCGACTTCCGCGACGA
TATGTAAGGCTTGTGCCTAGCCGGTGGGCCGATTCGCCGGCAATCCTAAGCCCATTCGTC
GAGTGGTTTTAGGATTCTCAACCCCAGCGGAGATACCAAAAAATGGTTCGTCAATGCGTA
CCCTGTCCCGATGCTCGCCATGCTTTTTGCCTTGCATGGTTGTTCGCCATGCCGGAGTTC
GCCGGTCTGCCCGCTCAAAAGGACATAAAACTCTTTAAGACTTCGGGACAGTGGGCGGTA
TGTTATGGCTAGACGACAGCGGCTCCCGTCGTGGGTGCAGGACCAGACTGAGGATGATAC
TCCGCTACGGGACAAGATAGACCCCTACCTTAGCAAGCTTGGCGAAGTCGATAAGCTAGA
GGGCCAATTGCGACGGGTCAAGGATGCAACGGACCCGGATGAATACAACGAAATGGCAAG
AGTGCTGAAAGCTCGACGCCGGAAAATAATGCGGCAGAGGGCCCGGGCCTACGGTCTACC
AGAGGAAGAGCCTACCAACGTCCAAGGCTACCACGTCCCGGCAGAAGATTACCGCAGGGT
GATGAGGCTGAAATGGGTCGAGCCTCGGATGTTCTGGGCAGTCCTATCTTTCGTCATTTT
CGTATGGTTCATCTCAAAAAACAGTTGACACGCCCACTGATTACTGTAGAATGGGCGGCA
CGAGAGGGGATAAGCCCCTAGACTGAAAGGAACAACGATATGAAACTGTTCACTTGTGCG
TTCTCCATTGAAAACTGGCAATCCATCGAAAAAGCTGGCGGAGTGGTCTATACCGCCGGC
TGCCTCTGGCTTTCCTACTATGCGAAAGAAAAGATTGTCTAAGGCTTGACAAGTCTCGTT
ATTTAAAACAGAATACATCCGCTCACCACTCACAAGGCGAACCAAAATGAATTTCCATCT
TAACCTCGTCTCCTCCAATTCTAAAACTGGTCCGATCCCTGTCAGCACGTCTCACAAAGA
CACTTGTCCGGACGCTTGCCCGCTCAAGGCTAAAGGCTGCTATGCCTCTTACGGTCCGGT
TAATCTCCATTGGAAAAAGCTAAGCAATGGTGAACGTGGCGTAGAGTGGAAAGAGTTCCT
TCAGCAGGTGCGGTCTATCTCCCGTGGGGATTTGTGGCGTCATAATCAAGCTGGCGATCT
CGTAGGTCAGGATGACGTTATCGATGGGATCGCCCTGATGGAACTGGTGAAGGCTAACAA
AGGTCGTCGCGGCTTCACCTATACGCACTACCCGATGAACAATTTCATGAACCGCCAGCA
CGTATTGTCGGCCAATCGTAGCGGCTTCACTATCAACCTGTCGGGCAACAATGTAGCGCA
CGCCGATGAACTGGCCGACCTGAACATCGCCCCTGTAGTGACTATTCTCCCGATGGACGC
GGAGAATGTAAGCTTTACGCCGAAAGGACGTAAAGTGGTAGCTTGTCCGGCTGAGAAAAG
CGACAAGGTGAATTGTAAGTCGTGCGGCTTGTGCCAAGTGGCCGACCGGGAGTATATTAT
CGGCTTCCGTGCCCACGGCACAGCAAAGAAAACTGTCGATCTCATTGCTAAGGGTTAACA
CAATGGACGAATCTGTTTACGCACCATTCAATCAGTGTAAGATGATGGGCCTAGAACGAA
CCGTGCGGAGCCTAGCGGCTCCAAACGGATGCAAGGTAGTCTTGTATCAGGATCACAAGA
ACAGGCACAGAATTGTCGTATATGACGCTCTAGGGCAGGGTATGTCCGGAGTCATGGTGC
AAGCGGATGGAGAAATTCACTACAAGGAAACTCGCAAGGCCAGCCAAGGGCAGCACCTGA
CAAGGCAGCTACAAGCTCAGCTAACCGCGTGGGGAGTGAAGTGGTTTCCCTCTCAGTACC
AGACGACAGCAGGCGCAGCTTGCTACAAAGGAGGCAACTGATGCGACAGCTTAATAAATC
CCAGCTAAAGGCCTTGGGGCCTAAGATCGACCTAGCCTTAGAGCTAGCTTCTACTGGCCG
GGGCGATCTTATGAATGGCCACGGCTCTACCTGCTACATTGCAAACAAAGCTGGACACAA
CATCTTGCGGATCAGCTATCATAACTCCCGATTCGTTGCATATGGTGCTGAGAGTGTCCG
GGTGACTGGGAATGTCATTGCAGCATGGGCGGAATGGAAAGGGGTCAACCGGGCCGCAAT
CAACGCTCTGAGTGAGTATGGGTATCATCCTAACCTGAGCATAGGGCACAACGATGCTCT
TAAGACTCTGCGTGATATCGAGCGTTACCAGTGACGGCCTCTTACTCGACAGAGAAACGG
GGCCAGAGGTGGGCCATCATCCGTACTGAGCCCGGTTATAGAGGTGACCGGGTGACCGTG
CTAGGATTCTGTATCAATCAAACGCACGCTCTTAAAACGGTAGCCAAATTCCGGGCTTGG
CAAGCGCTAGGCTGGCCCTACACACTGAAAGATGACAGAAAAATAAATGCTTGACAGCCT
AGGCCATTCCTGTAGAATGGCCCCTCAAGCAAGACAAACCAGCCATCAGGAGGCTAGAAA
AATGGAAGCTGTAGCTCAGTTCAAAAGTGAAGATTACGCAAGCGGTGATAGCCGCACCGC
CACCGTTTACAAAGACGTTTACGGCGCATACGTAGTGAGCGTTTTCGGAACTAGCCTGAG
CGAGCCTATTGCCTTCCATTGGGGACCGTTCGAGGATAAAGAATCTGCAATCGATGCCGC
TAAGTCTGCTATCTAACTGAAAAAAGGGCCACAGAATGAAAATCTCCGCTATCCTGAAGG
ACCAGTTGGAATCTAGCTATCAGCCGCATTCGTTTATGTGTGCTTGTGTTATAGAGATGG
ACTTGAGCCGGGACCAACGGTCTGTAGTTATGAAATTTATCGAGGAATTGCTCAACCCCG
AAGAACAGGACGAATGCTTCCCCACGTTACACGCCAAGCTCAGGGCAGAGCTTCCGGGGG
TTTATCATAAGGAGGCGTGGGATCAGGAAGAGTGGGATTTCTTCATTTCCCCATCGGCCT
ACAATATGCGGGTAATATGGTGGAAAACTGTCATTGCACAACTAGAGGAACAAGGGCAAT
GACTCAAGCTAACTGGAGCAAAGGCGTCCGGGTTGTCGGCGGAAAGCGGGATGGTGAGAT
CACACTATTTACCGATGCCAACTTCAGCGAATCTATGGGCCTCTGCGGTGGTGATCCCGA
TTTGATCGAGGCTCTGCCGATGCCTGCTGCACTCCGCCTGCTGGTGAAATGGAACAAACT
GTGCCGCCAAATGAAGCTTGACTATCGGTACGAACTACTGTAATCTGCAATCTCCATCAA
AACAGGAATGCTCCAATGTCGATCTTAGCCTTAACTCTGACCCTCTGCTCTGCTGTCCAA
TGCGATGATTACATCATCGACCACACACTCCCGGGCCGGGCCGCAGAGTGCAATGCTCGG
CTGGTAGAGGAGGCCGAGGAGTGGGGCGACGCATGGGTGGCGACCAATGCCGACGCCCGA
CTGACCCGCTACCTTAGCCGGTTCAATATTCAAGTTGACCCTCGCTTTGTTTTCGACTAC
GATTTTACCTGTCAACTGATAGCAGAGGATGAACTGCCATGATCGCTCCACATATCACCA
ACAAACAATACCGCCAACGTGCTGCTGTCATCGTCCGCCGAGTGAAATACTATGAAAGGC
GCTGGCTCCGGACCGTAGAGTTTTTCTCAGGTGCTGCCGCTCAGAACATCGCAGAACGCT
TTGCCTACGCTGGGCATGCTGAAGAGCAAATGTCCAAGCTCAAGGCTGAGTTTGCAGCCT
TCCCGGTGGAGGTGAGGCTAGATGCTCTAGGTTGGATAAACTGGAATACTCATAACGACG
GTCTGCTAGAGGAGTGGATTCATCAGGATAGTGACCGTGCCATCATGCTAGAGTATGACA
GCGAATCGAAGCGGCCTGTAGCCTGCTGGGAAACCACTGTCTATGCTCTTCCCAAGCTGG
CAATGCTGTAAAATATCGCCCGTTAGGCTGAAATAATGCTTGACGGGCGTTTTTGTACCT
GTAGAATGCCTAGCCAAGGGGTGCATAAGCGCCCCACCTCAAAGGATACAGAAAATGGCC
ATCGTTGATCGAACCGCAGGTAATGAAAGCCCGAATCACTGCTACATCGTTACTGGCGGC
ATTGGACCAGAGTTTGAGCCGGCCCTGTTCACTACCCATGCGCTGGCAAAGAAGTATGCT
CAGCAGATAGTGAAATACGGCAAAGAGAACGACGTTTTCCCGCCTTTTACGCCTGTTATC
GAGACTCGCCACAAGGCGGATATGCATCGGTTCACCATTCACAACAAAATCCCCGAATAG
GAGATATATCTATGAAACTTTCTGAAATCTTTCAAGCCGGTCTCCACTACGCAATTTCAG
CCGGGATGCCGTGGTATATGTGCATACGTCTGCGGGAGTTAGACCTGCCGGGGAATCTCG
ACGGAGTGCTAATTGACATTCAATATATCATGAATGAAGCGGGGATAACGTCTGACGGGA
TCGACGACTACTTCCGGGAAACTGGTATGGCTGATGCCTATGTGATGACGATGCAAGAGG
CCGTCGATTACGGGAGTCCAGCTTACGCCATGTGGGTGCAATTTTGGTTTTTCGTAATCT
TTGACTTAGCCCGAAAAGGGCAGTAGAATAGCCAGCAAATAATGTGATCTAGAGGGACGA
TCATGGGTGACAAGACAGGCATGAATGCCAAGACTGTAGTTTATCGAATCGAGTGCAAGA
ACGGCGAGGGCCCTTATGTTAACGGGTGCATGACGAATTCGTCTTCCACTCCAGAGCGGC
CTGTCCCTGAGCATGACGGGATACCAGATGTTCGCCATTTTGAGTATTTCGCCTTCACGT
CCCCTAGGCAGCTAGACGATTGGTTTGGCGATGAATACGATGTGCTGTCCTTCTATTCTA
CCGCACGGATCAGAGTCTATGAGGTAGACAAGCAACATGTAAGAGTCGGCATCCGGCAAT
GTGTATTCCGCAAGGCGGAAGCTGATTGCGTCCAAGAGGTGAGCATAGACCAATGGGCTA
GCATGGTACGCGCCGGACTATTGTCCGCCTCGGTCACACAAACTGTAGCTCCACGTCCTA
CCGAGCAATTGTCCCTAGACCTAGGGGATGACTCGGCCGGTGAGGCTTCGAAAGAAATTT
TGAAAATCTTCGGTTTGTAGGGTTGACAGCTTGGGCCATTCGCGTAGAATGGCCCTCAAG
CAAGACAAACCGCCGATAGGCAAAACCTAAGGAACTATAAGCCATGACTACCGAAAACCT
TTCCTCTAAAGAAATCGAAACCGCCGTTGACGAATTCCTGAAGTCAATCGATGTTACCGT
GGCCACCGTGTGTCGAGGTGAGCGCAATAGTGAAGGTTGGGTGCATGACCTGTGGGATGT
AAGTTTCATCCGTGGCGATGGCCTCCGTGGAGTTCTCGACACTGAATTCCGCACAGGCGT
CGGGCATCGCAAAGCCTCGATTCCCATGCCCGCCGACATCCGCCGTCTGGCCCCTAACAT
CCTGATGCGGGTAGAGTGGGAAAAACGTTACATCAAGGCTGTAGCACCTGAGGCTACCTG
TATCCTGTCCAGCCTTATCCGGGACTCTGAAGCGGGCGGCTACACTTTCGAGGAGTTCTG
TGGAGAATTCGGCTACGATACTGATAGCCGAAAGGCCTTTGACACTTACATGGCTTGTCA
GAATATTCTGAACAAGGTGCGGAATTTCTTCACTCAGGAAGAAATTAAACACATAGCGCG
TCTGGTGGATCGATACTGAAAAAAAAGGTTGACAGCTTGGGCCATTCGCGTAGAATGGCC
CCTCAAGCAAGACAAACCACAAACCGGAGACTCCCCATGAACAAGCCAATGAACAAGCCA
ATGAACACTTTCGCATACGCCCACTACGTCGCCCGCATGGACAAGGCCTCTGGCACTAGC
CTGCCCTACGCCACCCTGTTCCGCATCGCTCTGCGTAACGCCTACCGCAAGCCGGGTGTC
CGCCAGTACGATTGTGCAGCACTCGTCGAGGATATCAAAGCGCGTGAACTGGTCCAAAAG
CGCATTCGGGCTGAAAAAGCAGTAGTGATGGCGGCAGTAATGCGTGCAATCCGTACTGGC
TTCACTGTTAGCGTGAAAGATGGCAGCGATGGCGAGTGGGTAGTGAAAAAGTCTACCGAT
ATCAAGGAAATCTCTGATAGCCTGCAATCTACCGACGAGGATATCATCCGCTTCCGCAAG
GGCGACGGCCCGGACAACATCGTCGGCTCTATGTGGGCAATCTACGGTAACAGCGCCGGC
GAAGTGATCGCCGACTGGACTGATAATGCCACCATGGCCATGATTATGGCTCCGGCTGAG
CGGAAGATGGAAAAATACGCTGAATTAGGTATCTAATGCTTGACGGGGCCCGAAAAGGGC
CCCATAATGCACCCATACCAGCAAACAACATCAGGACCGCCCCGATGAGCCAGATCAAAA
TCCAAGAGTATATCGTAGCCGAGATCAAGGTTAACCATTGCGCTCACCTGCGCAAGGGCC
AGACCATCCAAGCCCGCGATGATCGTAGCAGTGAAAAGTGGATTGCATTCATGGTGGAAC
GCGGGTATAGTGCCTCTGAAGCCGCTATCCTGTTCAAAGACGCCCATGATGTGGCAATGC
TCGAACTGGCAGCCTGAAGAAAATCCTACTAGGAGTACTGACAAATGAAACGCCAATATA
CCGACTCTTACCAGTGCAAAGCAATCGACGGCATGATCTCTATCCTCGGCAGCAAGAAAG
TTACCACTCAAGTGCCGCCGTCGATGAAAGCCTCTCGAAATAAACTGCTGAAAAAGATGA
TAAAATACGTCGCCCGGGCAGGATGGAAACCGTAATCGACTAATTATCACAGCCCCGGCG
AGCCGGGGCTCACAATAGGAGATAGAAAGCATGAATACCCTGATTATCCGCTTGAATTCC
GCCTATAGCGTTCAAACTGTCCGTAGCTTCCTTGTGGAGGCTGTAGAGAGTATTCAGAAT
CATATCCGCGACTATGCGACGCATACTGAGTACGATTCAGGCTTGAGCCCGGTAGCACAC
AATCACCGTCTCGCAATCGTCACCTTGGACGAAGATTGCCGAGTGTTTCACATTCAATGC
GAGTCACCCGATCTTTATCTGGCTGACCCTCGAATCGTGTTTACCGATGTTGAAAGCCCG
GCATATACTATGCCTGCTAACGAGATCGACGAGTATAGTTACATGACCGCATGGCAACAT
ATCCGCCAAAAAGATATGACAGCAAAAGACCACCTATCCGCTTGGGCGATCCTTTTCGCC
TCAGAGGAGAATGTCATTGATATTGACCCGCGTCCCAACCTGAAAACGCAAATCTTGCAT
TGACCGAGGAGGGTCATCAAATGAATAACAAGTATAAGGATAACATCATTGCGGAATACT
GCCATTTCGACGGCAGACGGCCAGTCCTTTCCTTGGCGGCACGTTGGGTCCACCATGACA
GTCGGGTTGTGAAACTGGCAGCGCTCTTTGCCTGTGCTGGCTATGGCCGTCCTTACAAAG
ATTGTATTCGTGCCTACAAGGCCGCCAAGCAGCGGGAAAAGGATATGCGAGACCCCGCCA
GATGGAAGCTCAGCCGAGCGACTAAGCGGGCTCTACGGGCCCGGCTGGCGTCCAAAAAGA
AACTCAAATAAACTGTTGACAGCTTGGGCCATTCCTGTAGAATGGCCATCAAGCAAGGGG
ATGAGCCCTAAGCAGTAGAAGAGGTGAGAACGATGCAAGCGACCTACCAAGCCCTGAAAA
CCCTCCGCGATGCTTGCGAAGCTGCCAAGGATGAAAAAGGCACCATCAACGGAAACAAGC
TGAACTCGCTTCGCAATAAGGCTGTCAAGGAAATGCAAGCTGGCGGCGAAACCTACTCTG
ACGCCATTAGCATGGCTCACGACTTGATTAAGAAGTATCGCAAGTAATCAATCCGTAACA
AGCCCCGGGTGACCGGGGCCTCTCATAGGAAAGAACATGGACTACGAATACGACGAAAGC
TGTAACGCCTATGGCCCTCCACCGCACCCTGATGACGTGTACAAGCCCAACGCTGCCGAT
AAAACGCGTTGGTCCGCAGTATGGGCACGTATGGCGCATGACCGTAACGTGGAACGTGCC
GCCGAGCGCACCGAGGAAAGACCATGAAAAACGTTCAAATCTGTTGTTCGAAGTGTGGAG
CCATCAACGGCGGTAACAGCAAACACGATTGGGTTATCGCATTAGGTAAGAAGTGGTGCG
GTCATTGTGGGTCCAATCTCGCAACCCTTCGTCGCTAACCATTCACTGAAGCCTAATCGA
GGAAAGATCATGAACGCCACTCTGGCACGCCTACAGAACGAACGCTGTGCAACCCTCCGC
CTGATGCTCCTGCCGGAACATCGTGGGTATCAGTTCTCTGGCCATCCTTGGGCCGAGCGC
ATCCGCAATCTCCACGATGAAGCTAAGTGCATCCGCCGCCATCACTAAACCGCACTAATC
CATTAAAGCTCTAACAGCCCGCCTTGTGCGGGCTTTGTTCTATCTGCGAAAGCGGAGCTT
TCAAGTGTAATTAACATGTAATGTTGTAACACTCTGTAGAGGTAACACCAGCATGACAAG
ATAGACCACTTGTAACGTTAACGTTACATGTATAACAGCATGACAGCGAAAGCTGTACAG
ATAGCATTCTGTCCAGTTCACTCCTATCAAATAACCCCACAATAACCCACCTAAAACCTA
TCGGTTTTAAGCGGCCTGTGAGGCCGTATATGAAGCGATAGCTTCGCTATGTTAGTCTGC
ACCGTCAAGGCGAAAGCCTTACAGTAAGAGGCTTGTAGGAGGTTTTAGGGCCATATGCGA
TTAGCATAGGATGTTGGTTGTTTTAGGTAGATTTTTGGTATAACCCCTTTCCGCGCTACC
ATTGTCTGGCTGATGTTAAGCGACAGCTTACAGCCGCTCTCATTTTGCAATGAGAATTGC
GTACAGTTCATCATGCGCCTCGAAAGTGACTTCACTTTGCATGCGGATGCATGCTATAGT
ATACCCTGTGATAGCTCCGCTATCCCGTTTTGCATGGCACACGAATTGCATAAGCATGAC
AAGGGTAACCCTCGAAAGCGGAGCTTTCAAAGTGGTCTGTGAAGTGTAGGCTCTACCTCT
ATTATATTTGCGACCGGAAGTAGTGACACTGAAAACATTGACTCTAGCCCAGTAAATACG
TTAAACTAAAAGGTTGATAGCTGCCGCTATCGAGTAACCAACATTCACACAAGGAGGCAC
AATGACAAGCAACAATCATGCCAAGATTCACATCCATTACGCTAAGCAAATCTACTACGC
CATGCGTAAACGTGTCATCGCAGGCGATGAGATATGCAAGGAATGGGCCAAGCCCAAGAC
AGGCTTTGAAGCGTTCTATGATTGGGTGGTGAATGTGTCAGGGTACGCCGTAGGCTACCG
CCTAGATAAGAATATCCTCTTCCCGGGAAACAAGCTCTATGCTCCGCATACGTGCGAGTT
CACGCCTACATACATGCATACACTCTTCACCAACTGTGACAAGACAAGCAATAACCGTGC
CAATACGTGGGATAGCTATATCCCTCTAGGCGTCCGCCTAGCACGCTATGACAAGTACGG
GATGCCTGTATACGTTGCTCAGTGTAGGACACTTGGAAAGCAGTCTACCCTTGGATCGTT
CGACGATCCGATGCAAGCCCATGCGGCATGGCAACATGCCAAGATAGCAGCCATCCATGA
ATGTATTGATCTCTATCAGATGGAGGATGTTCACAGTGTGAACGTTGTTCAAGCGTTGCT
TGAGAGAGTGGACAAACTTGGCAAGGATATTGCACAGGGAAGAGAGACAACCCTTTTGCA
ATGATTTGATGGGGTCGATGGTCAACCCTTCGAGAGTGCGAGAACTCTTGTGCGGGAACT
CCGATAGCGAAGCTATCAAACGTATATGCATATTCCATGCCAACATGTGGAAAGATTTCA
CCCGGCAGGGCGGGAGCCCGTTGGCATTAGTTTTGCATAGCTTAGCTGTCGCTAAGAAGG
AAAGACCACGGCCACCCATTATTTTGAATTTACTAGGGGTTAGGAGAGGACAGTGGGTTC
GTGGTTAAGTAGCTCGGAAATAGAACCACAACTCCCGAACAGGATACACTCGGACGTAGG
GCCACACTACATCATTATTTTCCCAGCCATAGAGTAAACGCACTCTTCAAGTGGTCATTA
TTTCTGGGAGGGGGATTGGGGTCGTGCATACAATAGCAAGCTCCGCTTGCACAGGGAGAA
TGGCCAATGCAAATCTATAGGATTGGTATTGGGAATAAGCTGACAACAGCTAGACCGTAA
CTGTGTAAAAGAGAGCCCCGGGCAGCAAAAGCTGCCCGGGGCTTTTTGTCTCTACTGATT
GTATTCCATGTCCTCTGCTTCCAAGCATCCCTGCATAACCTTGCAGTACTCTTCGTTAAT
CTGGTCCATGTACTGCAACGCTCGTTCTTTGCTCTGGTCAGGACTGAACCCGTTGTGACG
GAGAATCTTGTTCAAATTCTCATCATCCCAGAAGTCTCTGGACCAAGCCTCCCAAGCCAC
TGCTTTCAGACTCTTTATGCACCCGATAGGGGCTGGATACCAATATTGCTCAGACATTAG
ACCCTCCCGAACGTTACGATCACGCCTTGCTTGGCTAGGGTTGCTTGTAGCTCATCCAGT
GAGAGGGGCTTACCGCCCACGATGACATACTTATCTGCCTCTCCTAGAGTCATCACACAC
TTAGTCTGGAAGGTAGGCCTATACAAGGCGTACATATCGGGTTGCCACTTGCTTCGCAGG
CCTGTTCCGTAGCTAATGAACCGGTCTTCGGAATGATCCCGGATGTACAGGCACCGGGGA
CTATCGTCTGGCCCATCTACGGAGATAGGGTGTTCCATCCACTCCCTGATCTTATCAACG
ACGCCCTCTCCTACCTTCAATTGAGCGTACTGACAGTACTCAAGGAACGCATCAAACTGT
TCGGCAGTGAAATTGCTGACATCGATCTCTTTAGTTTTCATTCTCTTCCTCCATGTCTGC
AATGATTTCCTTCAACGCTTGAAGCGTGTAGGTGCCATTTAGCTCTGTAGTAGGACCAGT
GTCACACTCATGAAGCGTGTACGCGGTCACTTTCTTCTCAGTGACGAAATGGAAGTCTAC
CCTTCGGAAGTCGTAGGTCGATTTCGAGTATCCAATGGCCTCTTTGAGTTCTTCCTCGTA
CCACAGGAATGTCATTGGACTTCCGTCGCTTTTACGAGTGTAGTCCAGCAGATTATCTCC
AACCCACAGTAGCACTTGAGCCTTGTCGTACATGAAGCCGTTTCCGCTCCCAAACTCGAT
ACCATAAGCCTTAAGGTGCTGTTGTACTGCAATGTTCTCTTCGGGGGTCTTCACAATAGT
GTAAAACTTCACCAAACGCTCTTTCAATTTCATTCCTCCTGTCTGTGTTTTATGGGAGTG
TAAAACGTTCCCAGTCCATTGTCAAGCTCTCTGTGGGGATAGACCGTTCCAGACGCTCTC
TAGCCTCTTTTAGAATGATATCCCACTCATCGCCTTCTTGGACTCCTACATACTTCTCCA
TCATCAACGCACGGTCAATCAGACCAGCCTTGTAGTTATCCCGGCTACGCTTGCGGGCTA
CCAGCTTGTCGATGTAGTCCTTCTTATCTGCCAAAGCGGCGATAGCCTTCCTAGCCATAA
GGGCAGCGTATTCTTTTTCCTCCGAAGTCATCCACGGCATATTGGTCAGTACGAGGTCAG
CGGCGTCCCTGACCAAGGGGATATCTCTCCATAGGAATCCTACCGGTATCAGGTCTGAGT
CTGCGGTAGCTCTCCACTGTAGCACTGTTCCGGTCTTAGAATCTGTAATATGCACCTTCT
CATCGATACGGTGGGCCATCATCGAAAATCTCCAGTTGCGGTCTACGATCCATCGCTTCC
AGTCGAAGAATGTAGCACAAATAGCCTTAACCGGGTCTCCGACCTTAGCATCCAGTTCCT
TCAGACGTTTAATCTGCTTAGCGTTTATATACTTTACAGGCCGGGAGGCTGGATCATAGC
ACTCCTCTACCTGAAACTCCTCAGCCCGAGACTCCAACACTTTAGGCTCATCGTTACTTT
CTTCCTCTCGGAACCATGCGAACAGCTTCTTAAACATATTCAGTCCTCCTCTCCTGTGAT
AGCTACCCTAGTCAGTCTCCACACTTTTCTAGGGAGACTAACGAGGAATAGCATAGCCAT
AAACGGTACGGCGATAGGCCAGAATATTCCAGCTAACACCGCTCGGGCCTCTTTCTTACG
CCTCTCCGTACTTTCTCCCCTCCACCCAAGAAGGGGGCGTAGAGATTCCCATACGAACAT
CCCTATCACAGAGTAGAACAATAGGCAGACCACTCCGACGACTATGCATACGAGAATGAG
AAGCCCTACTTGTTCCATGGTGCGATCCTCTTAAGTAGTTTACGGCTGTTCCAGATAGAC
AGAGCCCACTTAGGTAACAACACCACTTTCAAAACGCTGTATGTTGCGTAGAGTAGCAGA
AAGCTAGCATACACTGTGTATGTAATAGGCCATAGCAGTCCCAGTACAATGGCAAAAGCC
TCGATACCCTCTCTGTGATCTTTAGTCGCACTAGCTGGGAAGTTATCTTTGAAATACTCC
GTGATACCCATGTAGGTCCACATGAACACAATTCCCCACGCGAGCGAGAGGACGAATAGC
ATTGGGATTATCTCCATTACTCCCCTCCTTTTCGAATCAAGTCGAAGTAGGCCCACACGT
AGAAGTTGCACCACGCTCTGCCTATGGCCCAGCCTTCCCAATAGTCTTCCCAGTCCTTGT
TCGGAGGGTTATTCTCGAACATGGATAACACGCATGAATCAGCTACTTCGTCCAAGAGGT
GCATTACCGAGTTAAGCGGCCCGATTCCAAAGGTCTTATCTAGCCACCCCTTAAATCGTC
CCACGTCTGAGACGGTGACGCTGGAGTCACTGCACAGTGCCAATCTCTCCAGAATGTAGC
ACATGTATGGTTCCTCTTCGTTCTCGAAGAATGCCCGCATGCCCTCCTTGATTAGAGGTG
CAATAGAATTAGAGTTCATTGTTTTCCTCCTTTGAGAGCCCCACTAGGGCTCTAAATTTT
TGGTTCGACCTGCGGTCAACACATCACAACCCAGTTGTACAGGTCAGCCTCCTCGTAAGC
CGATGGGTAGCGATTGTACTCCAAGAAGAACGCATGGTCAATAGCTGCGTATTTGGTTGC
GAAGCTGTTGATGTACGTTATAAACCCGTTGTCGCCCCGGCTAAACAGGGCGTATTCCTC
AGTCCCATCCTTGAACGTATCTAACGCGATAATATACTTGTCGAAGATCACAGCATTTCC
TCCCGGCTGATGTAGTAATTGTATTCGTCCTCTTGGACGAGGAACGCACGATAGAAGCCT
TTCTCAAAGTCTCCCTTGACCAGCACCAGATTGCCCTCCACCTTGCATGTATAGATATAC
ATGGTGTTTGCTACTCGGATAACAGGATCATCCCCGGGACGAACATCCAGAGCAGAGAGC
ATAGCCTCCATTGGCATGCTTGTCAAGTGTGCAACTACAGCCGAGCAGTATTCTGCATCG
CGGCCAGAAGTGTCCTCTGCATAAGCAGGAGCGACCCCGCACGAATGCAGGGCGAGTGTA
AACGCAATAGCTACGAGTTTCTTGAACATACTAACCCTCCTCTTGGTCTGTCTGGGGAAC
ATCCGGCTTGGGGTAGACGAATGTCTCTGGATACTTCATGCATCTTAGCTCATCTTTGCA
GAACCCGTCAATCAATTTCTCATGTGCGAATTCCGCAGCCTTGTAGTAGCGATTAGCCTG
TCTTGCCTCCACTCGAAGGAGGTGGCTTATCGTGTGAGCGTTGATATTACTAAGACTTGC
AAAAATTGTCAAGAGCTTCTTTGCAGAGAGGGGGATTGACCTTTCGTCAGGTCTGTACCA
ATCAAGTCTGGCCACTCCTTGGAGAACGTCGTCCACCCACAGAGGGTAGTCTCCATCAAG
CTCGACCATGACTTCGTACATTTCAGGCTGAACAGCGTTGAAAAAGAAAGAGGGCTTTCG
CCCTCTGCTGGTATCTAGAGGAGGAACAAGCCCCCTCTCCACCTTGTGAATCAACCGATC
AGCATTCGCCCCTATCCGAGACTTTAGCTCCTCGATCTCTTCACATGTCAACATACGGAG
GGCACACCTTAGATTTCTCGATAGTGAACACGCCTTCGCATGTCAGGTTAGCAGGTCCAT
ACCACTTGAACATGTTGTTGATATCGTATCGAATCAACTGGCGGAACTTCTGCCCGTCGC
ACATATCCACGTCGAACCACGCCACGACCCATCTGACGTAATCTTCAGGGTCGTTCTCTT
CTCGCCATCTGCACTCTAGATCAACGTGACTGGGCTCTAGAACGTAAATGTCTTCGAACC
CTGTACTCTGGTTGTTCTTAAGTCGGATGATTCGAGCGCGAATCCATTGCATGCACCTGC
GGTTTGGGTCTGTGATATCGCAGACTACCGGAACCTCTGGAACCTCAACTGTATACATGA
TTGTACCTCTATTTGTTTTACAAGAACGCCATGATTCTGTCTCTGTCTGCATGGCGGTAC
AGATTGAAGCAAGGCACGCCTCTAGAGGACGCCAGTTGCCAAGCGGTCCTAGTCCCGCCT
TCTGGAATCCCGTTGTGGTCTGTCTTGCTCCAGCACACCAAGAACTTGCTAGGCGTGTTG
AGATCGATTCCCAGCACTTGGAAAACGTTCCGAGTGTGGGCTCGTCTTGCGAATGGACTC
AGAACAGGCTCTCCATCATTTCTGACAGAGTTCCAAGCTGGGTGTATCCGGCTAGCAATA
CTCCCAGCTTCCTCCCACTGCTCCGGCCACTCTTCTGGAAGGATTGTAGCTCCTAGAGTC
TCAGTTATCACATACTGATTGAACCCGGGCTCCGGCAGATAGATTTCTGCCGTAGTCCCT
CCTTTGTTATTGGATATATAATCCAGCCAGCCAGCCTCGAACGCTGAATCCGCTCCCTTC
GCTCCTCCTGACCGAAGAATAAAACCTCGTTCCGCTAGTTTACGACCTAGCTCTCTGAGA
ATGCCCCACTCCTTGTTAGGCGTATCTCTACTTCCGACTCCTGTATAATATCTCATCGTC
TCACCATTTGTCCCAGTTCTCCGTATGTAACCCAGTGGTGACGATAATCCCCTTCTTGGT
TGGTGTACTCCACTAACACCGGATAGAAGTTGTCTTCGTAGTCTATACTCACCACCTTGC
ATTCACATCCTCTGGGAACAGTGTATCCATCGCTGCTCATGGTTAAGAGCATTCCCCGGT
ACACGTCTTTTATCTCTAGCTCACCTTCTCCAGACTCTTCAAACTTGAGTCTCAATTTCT
CGATTATTTGAGCTTGCAAATGGAGAAGTTCGTACGCTGTTAAGTTGTCCAGATCAATAG
ACATGTCACTCTCTCCCTTCTAGCTTTTTGAATTCCTTGTCCAGCTTAGCTAGATGCTTA
TCCAGCTTATCTAGCTTTTTATCCTGATAAAGCTGGAAAGCCTCCGAGCCCGGGGCCAAC
CAAGTCCCCTTATACTTAATTGCACCCCGGATCATATATCCTCCTATTACAGTTCGTAAA
CGTATACCTGAAACTGGCCGAGCGTCTCCTCGATAAGAGGCTCGACATTGCTCCAGTCCT
CTCCGGCTAAACCGCAGCCAATCTTCGGCAGACCTACACACAACTCCGAGGTAGGAATCG
CCCGAGCGTCAGCCTCTGCCTCAAGGAACAGAGACATAGTGTACAAGGCTTGGCCCAGTG
CGTCAAGCTGAGTGTAGACTCGACCCTCTTCTCGGCCATAGTTGTACTGTCCGTACAGAT
TATAAATCGATCCGTACTCGTTCATTGTGAAGGTCAGGGAGCCGAGTTTACCTCGGTCCC
CTTTCACCGTTGCTTGGTCTGCCTCGTAGGCCTCCGGGAATTGCTCCCGGATTTGCTTAG
CAATGCCGCTGCCCATGGTGTTGAAGCAATTAGCCTGATGTGCAATAGCGTGCAACTCTT
TGTTTTTGAACGCGGCGAGCAGGTCGCCCTTTCGGTATTTAATCATTTGAACCTCTCTAC
ACTTGTGTATCTGATATCCAAACCTCTCGCATCGGCTCTGATGTTATCGTACATCGAGTC
TAATGCTGCGAATGGAGACCAGTACCCTTTCTCCCAGATTTTAAACTTGAACAATCTATG
TCCTTTATTCTCTGGTCGGCCTTGCTCGCAGAAGGTTGTAAAATAGTATTTAGCCAACAT
CCTCACCTCCTCTTATACGCCGTTCTTAATCCGATAACGGATAGATTCCAGATCATTGTT
CTTCAAATCTTCCGTGTCCCATTTCCCGTCTTTGAAGAACGTCCGCAAGGAACCAGTAGC
CTCCTCCTCTTCAGATACATTATCTTTCAACTGGAGGAATCGCCCATTTTGCAGGTCTCG
GTACACTTTCAGGAGACCTTTAGCCGACTTCTTCTTGCTGTCAGTTTTCGGGTCTTTGAA
GATTGCAATGCCTTCACCGTTCACTTCCGTGTAGGTAGCTTTCACTGCGAATCCGAAAGT
ATCCCGGGTGTTGCACTGGTAAGTGTAACTGCCAACTCCAAACACTACGTTCAGGGAAGC
GAAACCTTTCTCCTTCAAGCGCTCCAAGATTTTAGCTGCTCGGCGAGTCGTAATGGAATC
CCCATAGATCAAACCGATATGAGAATCGAGCATCTTATAACCTGCTTCATTCACAGTACC
GCCGAAGGTTTCCCACAGAACTTGGATAGCTCCTTTTACCTGCGCCTCGCTCACTTCTTC
GAGTTTGTAGCCAATTACATACTCGTATTGATCCCACTCAGTGGGAATAACCTTGAAGTA
CTTATCTTCAAAGTTCAGAACAAATGCATCGTTTCCATTTACTGCATCCATGATATCCCA
GTGTTCGAGCGACTCGACAACTTCAATATCACCCAGTCCGCAGATAACCTCTACAGGATC
ACCAGAGTCTGGACGAATAACCAGCTTGCCATCACGCTCCATGATCTGATCCTTGATGGA
CGGCAGAATTTCAGTAAGCACGCCCCAGAAGTCGAAGCTGTCTGCCACGTACGACAGAAT
ACCACTCGGGAACTTACCCATCAGTTCGATAAGGAATCGACGTTCTGCTTCCTCACGGCC
ACCTTCACCTTCCCCATCCTGCATTTCTTTCTCAATACGGAGGATGTTGCTAGTAGCTAC
AGCGTGTTCAGTCGCAGGTACGGAGCAAGCTACCAGACCAGTCGCGCTATAGTAGTCCTC
GGCGTAGATAGCCGCTGCCAAGGTGTCCGAGCCTACGAACGAGGTCAAGTGACCAACACC
GCTTCGGGCCGCGTCTTCAATCCCACTCATACCCCGGGCACTGAAGTCGTGAAACTGAAC
GGACAGCAGGAAGTCGTCGTAGCACCCAGTGTGGTTCGCGTAGTACCGGCCCATAGCTGC
GTATTCTGCGGCAATGGTTGCGTTGGTTGCGGTCTTCCAAGTCATAGCCGAAATCAGGGT
CTCATGGTAGTTCACCAGCCAGTAGAACTCAGGCAGGGTATTCTTGATAGTTAGCACAGG
CACGCCCATAGGAACGCTAACGCCCTCGGTCAAAGACTTAACCTCCAGAGGCAGATAGCC
GAGCTTGTGAAGGGCGCGAAGCTGCTCCACGGCTTCCATTTCCCGGCCAAAATAGCCAGT
CAGGAACCGGGAATACCGGCCAACGGCGTTCTCTTCTTCAGCCGCGAAGAAGCCTTCCCA
AGACTCTACGATCTCCATCCAAGCGGCCCGTCCGCCGACCCACTTGAGAGTGCCGTCGTA
GAAGTCGGTGGCATGCGTCTTTCGATAAATCTTATCGGAGCGAGGGGTCAGGTTGCTATA
GACAAGCTGAGTTCCTTCCGAGTACATGGAGCCGTGTCCAATCTTGTACCCATCAGTGGA
AAGATGCGGCAGAATTTTCATGTTATTTCCTCCTGTTGTGTTGAATAGGCCCAGACTACA
TCAATCTGGGCCTCCTGTCAATATTCGACTTCTTCTACTGGCAGCGTCAGCACAGGGTAG
ATGCATGGAAGGCGCAGCAATGGTTGCTTCTTGCTGTGGAAGTCTTCCCAAAACTTATCG
TGCATCGTCTTGTACCGAGCGTCCAGTTCCTCCTTGGTGTCGAACTCCTCCACCTTGACA
ACCCTCTTCTCTGGAGCCGAACGCTTATACTCTACAATCCAGATACTCAAGCTCACAGGC
GTTCCGCCTTGGAGTATTCAACCGGAATGACAGTCAGCGCTTCGTGCTCTTTTTGAGGGA
GCGTATCCGAGGTGTAGATGCATCCGAAGGAATCCAGCAAGCAGTCGATACCCTTACTGA
AGATTCCATGAGTGACGAACAGGTCAGGGAGCACTTTACTGTACTCTCTTAGGGCCTTAG
ACACGCTTCGGAATGTAGCACCTCCGTCACAGATATCGTCGATCACCAGAAGCGGAAGTT
CAGGATCGATATCCGAAGGATTCAGAATTTCAAAGCCTTCGATTTTACCGGTCTGGAGAT
CGCGCTTCTTATTGCAACGAATTACAGCGGCTGCTCCGGCCTTCTTTGCAAAATCCTCGG
TCCGCTTTGTTGCTCCGATATCAGGGGCTACGAGTTGATATTGCTCCCACTCTGAACGGC
TCAGTAGGCCACCGAAGACCGAAGATTGACGGACAACTTCGACGTTGTTAATCAGGTGCA
GAGTTGCGTCGCTGTGAGGGTCCACAACGATAACTCGGTCATATCCGGCAGAGTTCAGCA
TGTTTGCAAACACTTTCAAACTGAAGGCGTCGCCCGGATTGCACCGACGGTCTTGGCGAG
CATACGGGACATAACCCAGCAGAAGAGTCATGTGCGGATTAATCATTTCTGCTCGGATCG
CCTCGGTGACGTTGAGAAGAGCCATGATATCATCACTATTCTGAATCTGAGCTTTAACGT
TTACGAACGCATGGCTTTCGATGCCGCCCACATTAACGCCCACTTCGCCGCCCGGGAACG
TCCACACTTTTGCCTCTTGCCACGGACGGCTCATAACACCTTCCATTTCCTGAAGGCAAC
CTACAGCATAACTAATCATACATCCTCCTCACAGTTTCACAGAGAAGCGATTCCGCATTG
CTTCCATCGTGCTCTCGGGAACATCGTGTACAGACTTATTCCCATGACGATTCTCTACAA
TCAGAGAGATAACAGTGTAGCCAAACTCTTCAGCCATGTCAATGTATGGTGCTACCTCTC
GCTCCCGGGTACTAGTATTGGATACGATAACCGCATCTAGTCCTATCTCCATAGACCGTC
GCGCTTTGTCCATGCACTTTTTGTGAGATTCAACTACCCTCTCAGCTTTCCACACATACT
TGCCGAACTCCATTTGGTAATCGTCCGCTTCGCAGATAGACGCCTGCCGGCCTGACTCCC
AAGTTTTGTTATACAGAATCTCGGCAAGAGAGGACTTCCCGGAGCCCGGGAGTCCTCGAA
TGATATACATGATCTTTTCTTGCATACTTCCTCCTTTAAATTCGAGCCATATCGAAGTAG
GTTTCGATCAGAAGTCGTCGCTGTGCATCGGTCATTTCTGAGAACCGAGCCTCATCCACT
TCATTTACCAAGAAGTCTACCAGAGGATAGAACTCTTCGTCAAGCGTCTGCTTGAATCCA
GCCGGGTCTTGGTACATCGCATTGACCTTCTTACTACCCATCCTCATGATAAACTTCTTG
CCGAGGTAGTGAGTTGACTTGCACTTCACTGTCCCTAGCCCTGTTTGTACCATGTAACCT
TCTTTCTCACAAGAACTCAGAAGACCCTTTGCATGTTCCCAGCTACACTCTATGTGCTCT
GGACGAAGAATCTTTACAGAACTGTGGTCCGTTACACCTAGGGCGTGAGAGTCAAGAATA
TATTCTGAAAGCTGGCCCCCAGTGAAGATATCGCGGATACCGATCAAATATGCCCCTTCT
TCTTCCTCGACAATGTGAGGGTCGTCTGGAGAGCATATCTCGAAGTTATATGTGAAGCCT
GCGATGTAATCATCTGGGTTATTCGACACATACTTCTGACCAAGGGCAACGTAATCGCCG
GTCAATGACCCCGTAGTACTGAAGATAAGGGAGCCATTGTGCTTAGTCACGGAGAACATG
AATCCATTCACTTTCTCAATCAGCCGCACACGGAATTTAGGATGGAGGAAACTCCCAGCA
CCATTCTCTCCCAGATTAAACACCTTCTCGAAGGGGCGTACAATACAATCACCGGAGTGC
TGGTCAAATACATGACCCCGTGCCTCCAGAAGGAGCGGATGCTCATTCCACAGGTTCTCG
TAGAACACCTTCCGGGCATACTTTATAATCGACATACCGTTGAAGTGCTTAACAGTCACC
AGCTTATTAGCGATCAGGTCTTTGTACATTGCAATGTTGAGATTACCTTCCATCCTACTT
CTCCTTATTTCAATTCGACAATTGGGCAGAATTTAGCCTTCTTTGCCTTTAGATACGATA
CCAGAATCCCATCCTTGCTGGACGATTTACTCGACATAAAGCGAGAGAATCGGTAGAAAA
CCCACACGCCATAAAAGACGGCGATGATTCCAATCCATACAAACCCCATGACAGCCAGAG
TCCCACCTAGAACATATCCGGTAAGTGGACCGAGAGCCAGAGAATACAATACAGAGCCTA
CAACAGCAGCGAGCGCTACAACCGTTAACGCCAGCCACACGACGAGGAATACTGTCTGCC
AGAAATAAGAGCAGAGGGTTACAATTTGCCAACCGCTTGAGATAGCCGAATAGACCGGGG
TCTCGAACGTACGATGGAGCCGCATATGCCACGAATTCTTATCAATCTTCATGCTTGTTC
CTCCGGGAAGATGTTGAAGTTAAGTACGTTATGCTCTTCAAGTTCCATGGAGGCTACCAT
CTTATAACCTCCGAGCTTGTGAACGATCTCCAGTATACTCTCAATAGAGAATTTGTCAAC
ATGCTGCTTCATCAGATTGGAGATTCGGCTCTGATGGGTTCCACACCGCTCTGCCACTTC
CCGTTGAGTCAGCCCAGACTGAGTGATGTAGTGTGCAGCAACAACCATTACAGTTTTCTT
GAAATCCTTGACCGGATCATTCATGTTAGTCCTCCTTATTGCTCAGCGTTACTTTGCCAT
CGAATACTCGGAATTGAGCGATCTCAAACTGATCCGTCCAGCGGGCGTCCTCGAAAGCCA
CTCCTTCAAAAGTCCCGTCTTGTTTAACATCAGAAGTCATGAGGACGATAAAAGGAACTC
CGTCGTCATGGATCAGTTCCACCAGAGTGTTAGCTTTAGGTTTAACATCCTCCTTGTCAC
GCGAAATCAACACATTGACCATTCTTTCCTCCTTTTATTTATGGTGGTCTACAACCACAA
ACTCTTGCTCTCGCATATATTCCCTCACTTCGTCGTAAGAGAATACCTGATGATCTGGGT
GATTGTCAATACCTACATCAAGGCGCTTACCCTTGGAAGGCAGGCTGCCGTGAGTGTGGC
CGTGCAGGTGCCAAGCTCCATGATGGGCAGTATTCCACGTCTCGAAAGGATAGTGGCACA
TGACGATCTTAACTCCGTCAATTCGAATCTCCTTGTACTCACGAATGTCTTCTACGTGAG
AGAGATTGCTATCAGCGATCAACTTCCACAGACGAGAGTCGCAATGATTTCCCTTCAGGA
AGGTGATACGGCCATTCAACTGCTTGATGATATCCAGCACAGGCTGTAGCTTGTTCTTTC
CTGCAAATGCGAAGTCTCCCAGATGGTACACTTCGTCAAAAAGGCCTACCCGGGAGTTCC
ACCGAGAAATAAGCTCCTCGGTTTGCTCCTCAAAAGTCCACGGCCTGTTGCAATACTCGA
TCACATTCTTATGGAAGAAGTGTAGATCGGAAGAGAAAAATACAGACATTATGCCTCCAT
TTCAAATTCGTAAATTTTGTTAATCCTGCGGATGAGTCGCATAGCGGCCCCTCCCAGCAG
ATGTTCACGCTCCGGCTCCATACTAGCCATAGCCTTGAACTCTGATAACATATCCCGACG
CTCGTAGTGGAAATCTACTACCCAGTAATGGTCCGCACTAATCTTACCCTCTCGGTACAG
ATGCCCTTCGACACCCAGCCAGCGATCCACTGCATCTCTCTTCAGTAGCTCTTTCGGAGA
CCACTTGTCTACACCCCGCAACTTCTCGAAGAAAGAGTAAGGACGAGAATAGTTGTTGAT
GGCTTCCTCTACAGCCGACTCAGCCTGCAATTTAATGAACTCCCATCTTGCAAGAACTTC
TTTAATCTCCTCGGTGGTGACCGGGGTGTAGCTGTACTGTTCTTTATATTCATTCCACAC
TGTACTGTTCTCCTACATAGCCTTTGAATTTGTCGGAACGAGTTGTCTTCTTCCGTGCCT
TGTTTTCCAGAACTGATGCCTCCCTTTCGAGCATGCTCAGTTGGTTGCTATACTTCTTGA
TCCGCTTCGAGTTACCACTCATCACAGAATTTGTAAGATTTGCGATAGTATCGCAAATTT
TCACTTCTCTTGCAACCGGATGATTACGGCAAGCTTCGATATACTTACGGTAGCTCTCAG
CACGGTTCTTATCGAGAATGACCAAAGCCTCTACGATGTGAGGCATCACGCCCATGGACT
CCAAGTCTTCCTCTGTCAACTCTGTATCCTCCAGAACGTCGTGCAGGAAGCACACAGCGA
GAAGAGTGTCCATGTACGGAAGGTCGGAGAAAGCCTGACCCGGGTCCATATCTTTAGGAG
CGTTGCGGGCCACGCAGACTGTATGCACCTGATTCAGATGGTAAGCATACGGGAAGTTGG
TCTCTCCGTACCGCTGACCTTCGTGAGCCGAGAGTGCGATCTCAATAGCGATACCAAGCT
GAGTGTTCATATTAGTCTCCTTTGTAGAATGTGTGGTTGCCTATCTTGATTGTGCGCTTG
TATTTCCTAGCCCACCGAGGAAGCTTGCCATTATTAGCCCGTCTCACCTTCCTCTCGTTG
AGGTAGTGATCGGCTCCTCTCGTTGGATCGACAGTATACCCATATAGGGCGTTGTATGCA
ACATGTTTCGCTGCCTCCCACTTGTCAAGCTCCTTGACACCTTGCCGCATACTCCCATCG
CAGGTGTAGGAATACTGGCACTTGAAGTAGAGCACTCCGGCTACTGTGCTCGGCCACCTG
TCGTGCTTCATTCTGTTCACTACGGTATGAGCTACAGCAATCTGACCGATCTCCGGTTCT
CCCCGGGCCTCGAAGTATACAGCTTCAGCCAACAACCTGCAAGGCTTTCTGTACTCACAC
AAGGTGCGCTTGCTTTCTATGATTTGACCGGGACTGGCTTGGAATTCCACTACAGGCTCC
GTGCCGTATTTTAGACGAGAGTATTCCATGTCGAGGAACATCCCAATGAAGGCTAGAAGG
ATCGACAAAACGAGAGCTTCTAAGGTTTCCATAACACCTCCTTAGACAAAGAAGCCCGCC
TTGTGGGCGGGCTGTATATCACTCGGCTATTATACTTCAGCCCAAGTTGTAACGACGGGC
GTAGTCTTTGTTGGGGAACTCGACCATCATCGACTGAATGTGAATGTTGCCTTTACGATC
CTTCTGGATTTTGGCATTTTTCACAATCTTACTAGCCTGCGCCTTTGCCATAAGCTCTGG
ACTTACAACCAGATCGATGAATTCTGCACTCCGATACCCGGCACCAGCCGGGGCCCAGAA
GCCGTACTGGGTCACCGTCGATGTAGGTACAAGGTACAGGTTGTGCAGACGCACCGCAGT
GTTGAAACTCAGCTTACTGATGTGCTTCGCTCCCCGGGTTTCAGTTTCAAAACACCCAGT
CATGTAATTGAATTTGTAAGTGAGAGCATCCATGAACTGAATGACACTTCGAATCTGGAT
AGCAGAAGTATCCAAGAGCTGGAATTTCTCAGCAGATTCGATTGCAGTGGTCACATTGAC
AGACTTAGCGTTGAACATTCTATATCCTCCTTATTCTTCAGGGACAAATACACCGCCGAT
TACCCGGCCAGCGCGAATTAGTTTACCAGTTGGGAACTGAGCACGCAAGGTCTTTTTGAA
ACGACTTTGAATTTGCACAGTCAGCCACTTACCCCGGTAGTTCTCAAAATTAGTGATCTG
GTCTTTACGGGCTTCAAAGTCGCCATACGTCACCTCAAGCATCTCTTGAGGTACAGGGTC
GAACACCACCAGAACAGCGTTTCCATTCTTGTCAACCACGTAGTTCACGATCTGCATTTC
CATATCGAAGAACTCTTTGTACTTCTGGAGACCGCTGGAGCGCTTACCAGATTCGTACAA
GCCCTCTGGGCTGCGCCACATGATACCCTCATAACCGTTCTGACGGTACACATCATGAAG
ACGTTTCAGTTCTTCAAAGGTGGAGCAGAATACGTACTCAACAAAACGAATGCTCCCCAG
ACCACTGTGTAGTGCAGACTGGAACTGGAAGTCTACCAGACGCTCCTTAAATGTCAAGGC
ATCTTTTACGATATCGAAGACATGGAACTCCATCCGCTTACGAAGACCGTAAATAAAGGA
CGTGCTGTCCACTTCCTTCAGGAGACGATCATACTCCTCCTCTCCGTTCTCTAGAGGGTA
AGCTTCAAGAGCTTTCTCGGCCTTCATCCACTTATCGTAAGCATCCTCTCGCTTGACCGC
CGAGTTGATATCCTCCAGCACCTCACCGTGGACGTACAGTTCGCCGTCCCACACATCACC
CTCTTGCATGATCTCTTCGAGTTCTTTGATGATGTGCGGTACGTTGTAAGGCTTGCCCAT
ACGAGACGCTAGCGTCACCTTGCCGCCGACCTTCTTAGCCATGCATCGCAGACCGTCCAG
CTTAGGAGAACCATAGCCTGCTTTATACTTCGCAGGATCGAGCGGCTTGGCGAGCATAGC
CATTACCGGCAGATCGTTGAGTTCTTCCTTGGTTGCACGATAACCCTTGTCCAACTGCTT
GCTCACCTTGGACTGAGCCTCAGACACGGCCTGCTCCTCTACAGAGCGTTTCTGCTTGCC
CGCACGGATGTTGGTAACCTGAGAGGTCATGGCTCCATGTTCTTTGCCGTATTTCACGAC
GATATTGAAGCTACCGTCTTCCTCTCCGGCCACCTCTACAGTCCACTCCTTGAACCCGCC
TTTCTTGTCGAGTCCATACAGTCGTTGAAAATAACTCATTGATCCTCCTCGTATTTGATG
ACAAGAACATCATTCTCCCGTAGGTGCCTAAGACCTTCGTCGAGCCGATATTCGTGCTTA
TAGTACACTACTTTGATCCCAGCTTCAACCACCGAGATAGCACAATTTTTACAGCAAGAG
TGAGTGACGAACAGGGTAGCCCCTTGGGCACTCTCAGGGCTGCGTATAAGAGCCCTCAGT
GCGTTTTCTTCGGCATGCCTCACCTCTGCCTTGGTTACTCCCGTTTCGTCCTCCAGCGGC
CCGTTTAGGTGCTCTGGAAGGGCATTATACCCGCAACTGATGATACGGTTACGTTTTACT
AGAACTGCACCAACCTTGGAACGAGTCGAGTCGCTGCACTTAGCGAAGGCCTCAGCGGCC
TCCATGTAAGCTTTAATATGCTTGACCTTCACGACTAGCCTCCAATTAGAACCGCGATCT
CCTCGTAGTACCCCTCTTCAGGGCACGCGAATTCCATGTAGTACTCGTCAGTGTCTGTCA
AATAGACAACGCTAGGCGGGTAATAGCTCCAAGTCGGGTCTCCGTGTTCAATCTCCGCTA
CCTTCAAGTTGCCATACACAGTGCGAAGAGTCTGTAGAGCCTCGATCACATCGTCTATGC
GCATTACAGTGGGTTCAGTCGGTTCAGTCATATCTCCTCCTTAGTTTTCTACTTTACAAA
CGGCATCGCCCCGGCGAAGGAACACTTGCACTGATGGCTTTCCGCTCCACTTGTCCCACG
CTTCAGCTTTAACACTGACAGTCTTAGGATTGATTGCAACCACCTCGCCTACCAGCATAA
CCATTCCAGTTCCGCCTAGGCAGAATGCTACTGCGTCGCCGATCTCGATATCCCTTCCTG
CTACGTCCTTCATTTGTACTCTCCATCTGCACCCTTGATTAAAATAACGAAGTCAGAGGG
ATCATCATCGCTGCCGTAGGCCTTTGCCCGAAACTCCTGCTCGTATTTATTCACTTCCGA
TGGCTCGCTACTACCTTCAAGGGTACTGTATAGCTCTTGCATGAATTTCCCAAGGTCCGT
GGTCGCATGTGTTGCCGACAGGTAGCCAAGAAGCGCTACCAGCATATCAATCTCTTCGCT
CTCCAGCTCCAACTTGTAACCATCGTAATCGTATACTTTCATATTTCCTCCTATCGCTTC
TGTCCGCTTACGTCAAAGTACGATTTCCATTCTTCTCCGAATAGTTCTCTACCCTTATCA
TCGTAGACTTTATGAGCCTCTTCTGCTGTTTTATAGCAACCGAGGTAAATTCTCTTACCT
TCATACCTGATCCGGGCAACGTACCTGTTGTTTCTAAAAAAGATACCGGGATACCCGTTT
GTATTACGGGTAGACGCGGGTTTATTCTGCTGCTGCTCCGAGTCCGTCGCCCACCGGCAA
TTAGACTTGCAATACCCTTTTGTCGAGTCCTTTCTATCGAGAGTCTTTTTCTCGGGTCGT
TCTCCCATGTCCTCATAGAACCCCTCGAATGTCTTCCACTTAGGATCGATGGTAACATCC
TTATAATATTTGTAACTCTTGTGCTTTGGGTTCGTACATCTGTCGATCATTGTCCTCCAA
GAATTGTATGTCGGAGTTCCGTACATTCCATGGGAGGATAGTAGTTTAGACTGCATGCAC
CCGCAACTCTTATTATCTCCTACCTTGAGTGCTCCAGTTCTAATTTTCAAAATTGCCCCG
CAGATGCATTCGCATAGCCAAAGAACCTCTCTTGAATTACTCCTCGCTCCAGAGTCTCCG
ACTACCCTGAGATATGTGAATGTCTGCCCTGTCAGGTCTTTAACTGCCATCCTACCTCCT
TACTTGACGAGTGGCTACGCCGTAAGCTGGCTTGCTCCCCTCGCCCGTGTTGTGTTTCTT
CTGCGCTCGGCTGGCATTGACGGTGTAACGTCCTTTGCCATACTCTTCGTCTATCCACGC
TTGAGCCTTAGCTCGCTGAGACGTGTGGACAAAGATGTAGTAGCCAGATGCATCCTTGAT
GAACCAAGTGGCCGGGGGCTGGAAGTCCAGCGCCGAAAACTCTTCGAACGATACCACAGT
CACCTTCTGCTTTGCAACAGTGTATTGACCAAATACAGTCTCTTTGTTACGTAGTTTATC
TAGCATCTGAGTAAAGAGATCAGTCATTGCGATTCTCCTTTCTCGGCTGTAAACGAGTTC
AAGCTCAAAGAGTGATAGGTGTTAATTCCGTAGAAATGCTTGTTGCACAGAGCGTTCACT
GCTTCTTCGTACTGCTCTTCTTCCAGTTGCCACACAGTCCCACTAATTGCAGAGAGTATC
TGCTCCCTGCTCGGCTTGCTTCCGACCCACAGTCGTAGCCTCCAGTCTGGTTCATACTCC
TCTTCCCACACAAGCTCCCACACTTCCACTTCAATATTTTCAGACATTCTTACCTCCTTT
CCCTGTATCTACAGGAATCTTATATAGACACATATTTCTCTTTCCGCCCTGATACCTAAA
GACCTCGTCTTCTAGAAGGATTTTGGGTACTTCATCCAGCAGTACATCCTCTAGAACCCC
TGATGCCTTGATTACCGTCCGAAGCTGTGCCTCGGAGGGCGGATTTACAGACCACATGCC
GAGTCGTTCATCTGCCTCGTACGCCTCCTCCAGAATAAGCTCCCATACTTCGATCATCGG
TAAACCTCCTTCTTCCGGATATTGTAGATTACCCACTTCTCTTTTCCAGAGACTGGACAC
GTAACGTCCAATTCACACTCCGTGTTTGTCAGGAGGGAAGCCACAACATGGTCCAGTGTC
TCTGCATCCGGAGCAGGAAGTCCCGGGTAAGTCGAGATTACCTTACGGATTGTATCCGCA
TTAGTATTGCCCAAGACACCTATGAAGTGGAGATCAAAGTCCGCTGCCCAGTCATCCCAC
TCTTGTCCAAAGATAACCCAAACGTGATTCATACGCCCTCCTCAGAATTTACATAATACT
TCTTGACCGTCGATGATCTCGTATTTGAGGCCCTCTCGCTCAGTAAAAACGCGAAGTCTG
ATTTTCTTAACGCCCCGGTGCACACCCTTTTTGAAGGCATCGTTAACACAGTCTCTCAGT
GTTCTAAACGGCCCTGCAATATTACAGAACGAACCTCCGGAACTTGCCCACACCGACAAG
TAGCCTATCTGCCTGTCTCTGTAGACATAAACTCCGTTGCGGGTCATCCGCTGAAGCTTT
CTTTTGAGTCTGCTCATACACCTGCATCCCTTTGCATCTCTTCGAGACACTCTTCCGGCA
TCACAGAGAGTGCCAGCTCTTCCAGAGAGTGAATGTAGTCCTCCAAGTAGGTCCACTCCC
GGAGCACCTTCTGAAGGTACACACCCTCTTTGCTGTTGTCAATAGTCTGTCCCTTCAGTT
CCTTAATCAATTCAAACATCTTGTATACCCTCCTTTAGGCGTAAAAATGGCCGGTGACTA
CTGTCCCGGCCTGATAATACTACTCTGAAATTTCTTCCATTGCAAGGCGTTTCTTATCGA
AAAATTCCCCGAGTTTCGTATCCAGTTCGTCTCCTCCGATGTAGAGTTCTTCACCGGCTT
TGACTCGCTCCATTTCGCTCTCAGTTAGGAAGTCCTTATAAACATACTCTAGCCAACGGT
CGCACCATTCTGTGTTGAATGCTGCGTTTCTTAGGCTGTTTTTGTAGTCAGCGGGAACGA
CTCCGAAAGATGGAGCATGGATCATAAAGTATGTGAACTGATCGATCGACACGGAATCAC
AAGCAAGTGCAATTGCCGTCATTGCAGATGCACACTCACCTTCCAGCCGAGCATGAACCG
GGGCTTCACATTCCCTGATCGCACGAATGAGGACGTTTGCAGTCTCAACAGACCCGCCAC
AACCATTGATTGTGATGTGCACCTCGTCATTATGACCTGCGTTTTCAAGAGTCCACAGCT
CTTCAGTTAAGGTCTCTAGCTTATTGATGCTATAGGGAAGGACGATTGAGTATCTGCTAA
CAACGCTCTGTGTACAAGAAACAGGCATAACACCTCCTTTAATAAAAATGGGGCCATAGG
CCCCTTGGTTGTTACTCTTCGGTAGCAGTCTCTTGGCTGTGGTTTTGACCCAGCATAGCG
AAGAACGGTAGAAGCACTTCACTGAGTTCTGCACTGATGGCCTCAGCTACTTCAGCGCCT
GCACGAGATACATTAATGAACTCTTCGGTCTGAACGTACTTGTCCACCTTCACAAGTGTC
TTGAACTCTACACGCTCCAAGAATGCCTTGCCTGCGGCCTCTGCGAGAGGTTCGAGGTTT
ACAACCTCCAGCGCACGATCTAGAGCGCCTTGATCGATCTCCAGACCGTTTTGAGCTGCC
ACATGGTTGAGGGTAGCTTTTACGCTCTGTACAGCGTAGTTCTTGAAGAATTCACGTTGA
GCTTTGTTAAATTTCATTCACTTTTCTCCTTTGTAGTACGACGACGGCGGGTTTTAGGTT
TTTCCTCTTCAGAGGAAACTTCCTCTGTTTCAATCTCTTTCGTATCAGTCTCTGCCTCTG
CCTCTGCCTTCGCCTCCTCGGTGGTGACCCGGGTCATCTTTACGGTCTTCATGGCGAAGC
TCATATTCGCGAACTGAGGGTCTTCTTTGTCGATTCGGAAGCCTTGATCGAAAGCGTTCT
GCATGCTCATCAGAAGACTGAAAACATCCCATTCTTGCACAATCACTTCGCTTCCGTCAA
GCTCTTTTTCAATTTCATGTTGTACGCCGTCTTGGCGGAACATTTGGACTTGACAGAGGG
TTCCGTACACCGGGTAACCTTCAATCGAACGCATGACTCGGAAACCTTCTTCCATGTGAG
CGTGAACGGACCGGAGCCACACGATTGGGTTGTACTCGACGATATTAACAACTTGCATAT
TCTTTTTACTCCTTGCGGGTTAGTGTTTTACAATAATACCACGTTTCTCAGGAATGTCAA
CCCATTTTGTTCTGGTAAAGGCTTGACATAGAGGAAATCTGTGGTATTATCAATATTCAG
CGTGGGAGAGATATGTCTGAAAGCACTCACCGGCCCACGCCTAGCGCCTATGAAGAGGAA
TCCACAAGGGCAACCTGAACTCGAATGCTGTTAAAGGGTGGAGACGACGCGAAAGCGGAA
TGACAGCAATCCGATGCAGCCTACATGCTGCCCCTCACCGAACTCATCTGCATGAGTAAG
AGGAATTGGATAGAGCCAAGGCACGTCTTAGGCAGATTAAATTCTGTATGGCGAGCCTTG
GGACGACTCTATCCTTCCCTAGCCGAATCTATCTGCATGGGGTGTTCTCCTGATACACAT
ACACAAATACCCACCACAGATAATCCATCAATCAACCCATAAGGAATTTCTATGAGATGT
AAGTGCTGTGATAGCGAACTCTCGTTTGAGACTCCAGTCATCAATAAACATACTGGTAAG
GAAGACGATCTATGCTCCTCTTGCCGTAGGTTTGCTCTCAATCCTACACTGGATCATGAG
TATTTTGGTGGTTGGTATCCAAGCGAAGGAGTTACCGCTCCTCTCCCTACCGGGGACTAA
CATTGTATATAGAGTGCGCGTACTCTGACAATATGTATAAATAGTAGATTACGGTGCGAA
TAATTCTTTAAGGGCTTGACAACAGGAGATTTCGTGCTATAATCGGAGTATATGGGGCTT
ACAAAGCTTCAGAGGATTTAATATGACTCAAGAAAGAAACAAGGGCGGTCGCCCTACGAA
TGCCGAGCTAGAAGCCCGGGGTATCATTCAAACAGACCTAAAAGCAGGACTCAGACTTCT
AAAGAAGAGCTTTGCAGAGAACATTAGGTTCCTACAAGAGCAATCTGACAATCCTGAGGT
TTCTCTACAAATGAGAATCAAGCTCAAGAAAGAGCTTTCTGATATGTTCGTCGCTTACTA
CAAAGCTGACATTGCACTCAAAAAAGAGCTTGCAAAAGGAACAGAATCAGGAGATAATGA
GAACACTGAAGAGGACAAGGCTCCCGGAGTAGTTCTCGCGTTTTGATTAATTGCCGCTTC
GTTCAATGGTAGGACGCCAGACTTTGAATCTGGAGATGATGGTTCAATTCCATCAGTGGC
TACCAAATGTGGTAAAAGAACATTCACCCGACAAGGAATGTGTCTCGCTCAGAGGACAGC
GAGTAAGAAATGTCCTCCAGAATTAAGGGTCGGTGAGCGTAATTGGCAACCTACTGGATT
CCAAATCCTCGTATTCTCTGTTCGAATCGGAGTCGGCCCGCCAAATTATATGGAACTTGA
ATCCTTCTGGGACCAAGTTCGCAGCCGGAGAGCTAGGCTATGCTGCTAGCGACCGATGTT
CTTTAGAGACTCGGTATTCTCTCCAATTGGTGTTGACAGGAGAGTAAGGCTCCTGTATAG
TGACACAAATTGCTCGTATAGTGTAATGGATGCACAACGGTCTTCTAAGCCGTAAGGTCT
AGGTTCGAGTCCTAGTACGAGCGCCAAATTTAAGATGGACGGAAGCTAAAGTGGATCAGC
ATCTGGCTTTTAACCAGACTTATAGTGAGTTCGAGTCTCACCCGTCCAACCAAATTTAGT
GAGTAAATCAGATAGGTTCTGAGGCTCCCTGCTAAGGAGTACGTCTGCTAACGCGGATGT
GGATCGAGACCACTGCTCACTGCCAAAATCACTGCCAAAATAAGTGATTTTAAGTGTTGA
CAAACTGAATTTTTCATGTTTTAATACACTTATCAGATGAAGAAATACTTAGCGAGTAGC
CCTGAGTAGGTCGGGAACTAGTCTAGAAAACTAGGCCGCTGTGATGAACGGTGAGGGTTC
GACTCCTTTACTCGCTGCCAAATTAAGGCCCTGTGGTGGAATTGGTATACACATCAGTCT
TAGAAACTGACGCCGAGAGGATTGAGGGTTCAAGTCCCTCCGGGGCCACCAAATTAAGAA
TCTCTTTTGCTATTTGGTTAGGGTTCGAGTCCCTACCCGGTCACTTAAGGCCGGTCTATG
GCGGCCAAGTAGTGAGAGAGCTAGGGGACTGACGAAGGTAGCGCTGCTTTCAGACCTCCC
CGGCGCTATAAAAGTTATCATGAAGGGGGTTGACAAACAAGAAATTCATGATAATATAGG
TACATAGAGTAACAAACAATATAGCCGGATAGCTCAATTGGTAGAGCACCCGACCGATAA
TCGGATGGTTGAAGGTTCAAGTCCTTCTCTGGCTACCAGAATTTACAGGCCCATTAGCTC
AGTCTGGACTAGAGCAAGCCCCTGTCTAGGGCAAGGTCGTCGGTTCGAATCCGACATGGG
TCGCCAACAAGGTCGTTGTAGAGATAGATGGCTACTATCATCCGGCTGTAACCCGGACGC
CATAGGCTAGAGGTTCAATTCCTTCCTTCGACCACCAAATAGCGAGAGCGTTAAGACTGG
CTGGCGCTGTCACTCGGCTCATAACCGAACACAAGTGGTTCGATTCCACCTCTCGCTACC
AAATTGCACTCCGAGGAACCCTAAGTGGTGGGTTCAGTGTCGCTACCTATCTCGGTAAGG
GGAAGCGCCTAAGCTGGCACGGGTAATTGAGTAGCTGTGATAAGCTACTGGCAGCCAGTA
TAAATCGTCCGGCTCGGGCCCGTTATAGCTCCTAGATTTGAATTAGATGCTGTAAGCCAT
AGGAGGTGATCCAGTATCTCCCGGAGGGGCCCGGGTTAACAACCTCATGAATTTAGCCCG
CGTTGGCCGAGAGGTTTAGGCGGCGGATTGCAAATCCGTCTCACATCGGTTCAAATCCGA
TACGCGGCTCCAAGGTTTATATTGGGATGTAGCTCAGTTGGTAGAGCAGGGAGCTGTTAA
CTCTCAGGTCGCAGGTTCGAACCCTGCCGTCCCAGCCAATTTCCAAAAGAGACTCTTCGC
TTTAGAAGCAGAGTCGAACGCCCGATACGGGCCTTATTATCTCCTCGTAGCTCAGTCTGG
TTAGAGTGTCTGATTTGGAATCAGAAGGTCGAAGGTTCAAATCCTTCCGGGGTGACCAAT
TAGGAGTACATAGTGAAGATCAAATCGCGTGTATGTCCAGCGAAGACTGAGTATCATCGC
AAACGAAACAAATGTCCTTGCTGTACGCGGCCCAATTACGTAATGGAGTTGAGGCGTCGT
CAGGAACTCAAGGAAGCGAGACTTATGGTGTCTCTAGTGTAAAATAAAAGCGGGTATAGC
TCAGTTGGTAGAGCGTCTGCCTTCCAAGCAGTTCGTCGTCGGTTCGAGTCCGTCTATCCG
CTCCAAACAATGCATTTGAAGCTAACTAGGTAGAAGCGCTGGGTTGAAATTCCAGAGGAC
TTGGATCGTTACCAAGCAGATGCACCAAATAAAGCAGTTATAGATTAATTGGTTGAAATC
GCCAGACTTTCAATCTGGTGTTCCGGGTTCGATCCCCGGTAACTGCTCCAATCAAGTCCA
AGCCGGAACATTCCTCCGTATGTGCTTTCAGCCGGCTTGGCATTATTCGTGTGGAGATTG
TGTAGCCCGGATGCTGCCTTTCGGTTGTGACCCGATTGTTGGGGTTCGAGTCCCCGCCTC
CAACCAATGTCGTGCAATGGTATATCGCGTTGACGCTTTAGGCTCTCTGGATCGTAAGCC
AGTAAAGCGAGAATAGCGGGCTCTCGCAGCAGAGCGATAGGTGGTTCGATTCCACAACAT
GACACTCTTTCCTCCTCGCCTGTGCTGAACGGTTTCCTCCTCCTTTCCCGTCTCACAGGC
TCTATTCCCTGCCCTTTAAGCATTTATGGTGATGCACCGGCTTTGTAACCCGGCGAATTC
TGTTCAAGTCAGGAATGGGGCACCAATTCACTATCAAAGAACCCGCAAGCTCCCGATAGG
GTTCACACTCTATAAGGTTGTAGCATGGAAAACACTAAGGTTCCTGATAAAAAACTCGGA
CCAATCGCGCTAGCGATTAAAGAGGCCAGAGAGAATTTCGATCTCAGCCCTCATGTTATT
GGTCCAAAATCTTTCAAACAGAAAGAGTTCACAGACAGCGATGCAAAGATCACTGTATTC
GGTGGTGCTGCTGGTGCTGGTAAGTCTTATCTCGGTGTAATGGACTTCATGAAATATATC
CATGATCCTAACTTCCGAGGTGTAATGACTCGTCGTACTACTCCTCAGATTAAAGGCCCG
GGCGGTCTGCTTGAAAAAGCAACAGACCTATTCAAGCTCGTTGACCCTAAAGTCAAGTGG
AAAGACAAAGACGGCAAGTTTGTGTTCTCTTCTGGTGCAGTTATTTTCCTTCGACACTTC
GAACAAGAATCTGACAAAGACTCCTTCCAAGGTTGGGAGGTTAGTAAGTTCCTAGTCGAC
GAAGGTCAGCAGTTCACAGAAGGCATGGTGACATACCTTATCTCTCGTATGCGTAACCCG
AAATGCTCGGTTGTTCCGCACATGAAGATTACATGTAACCCTGATTACAATTCGTTCCTT
CGTAAATGGATTGAATGGTGGCTAGACCCTGACACAGGAATCCCGATCCCTGAGCGCTCC
GGCGTAACTCGCTGGTTTGTACGCAAAGGCGGTAAGATGTTCTGGGGAGACACCAAGGAA
GAGTGCATTGCCCTTCATGGTAATCCCAGTCTAGCGCCTGACGATGAAGATCAGGTGAAG
CCTATCAGCTTCAAATTCATCGCGGCTAACTGTTTCGATAACCCAATCTTGATGCTCAAC
GACCCTGAGTATGTAGCTAACCTTGAAGCCCTTCCTAGGGTAGAACGTGAAAAGCTCCTA
GACGGTAGCTGGCACGCTAGAGAAGAGGGAGCTGGATACTTCACAAGGGACTGGTGCCAA
ATCGTTCCCCACCCGCCTCTACGGGTGCTTAAAAGGGTACGTGCATGGGACATCAGCGGT
AGCATCGAATCCGAAACCAACAGAAACCCCGACTGGACAGCCGGCGTGCTGATGAGCCGT
ACAAAAGAAGGCTTGTTCACTGTCGAGGATGTTGTCAGAGAGCGTAGGTTGTTCGGAGGT
GTTTTCGACCTCATTCTAGAAACAGCCAAGCAAGACGGTCAAGACGTTGAAATTCAAATC
CCATGTGACCCGGGGGCTGCTGGTAAAGCTTATGCTGCCCAGCTAATTAGAGACCTAGCG
GATCATGGATTCCACGCCAGACCGAAGACAACTAACAAATCGAAAGTTACTCGATTCGCC
CCGTTCGTATCTGTAGCTGAAACTAAATCAGTGCAAGTCGTTGCGGGAGATTGGAACGAA
GATTACTTCGATGAACTTGAGCGATTCGACGGAAGTAAGGCTATCAAAGATGACCAAGTT
GACGCTACATCAGATGCATTTAATGCTCTATCCCTTGGCAGCTTGATTATCCCTGATTTC
CTACCGCCTGATATGACTCAATCCAACAAATTCAAACTAAATTAATAGGAGGCGGCGATG
GCCGAGACTGAAAAGACAGCACCGGGTATCCCGCGACTTCGCCTAGGCGAGATTGGTAGT
ACAGGCCTTAAACAAGTCAATGGTACTATTCTGGAAGAACGCCGACCAGAACTTCGGTTC
CCTAGGGCATGCAGAACATTCCAAATGATGGCAGAAGACCCTACCATCAAATCAGCTCTT
GATCTCTTCGAAATGATGATGAGCAGGGTTGACTGGGAAGTTGATCTAGGAGTTGACCCC
GACGAGGCTATGAAGGCCCGTGGTAAATTCCTGAAAGAGTGCATGCATGACATGGAGCAC
AGTTGGTACTCCTTCATCAAAGAGGTTACTAGCTTCTACACCTACGGATTCTCCGTACAT
GAAATGGTGTTTAAGCGACGTGAAGGATACCCTGTATCGAAGTACAATGACAACAAATTC
GGTATTAAAAAGTTGCCAATCCGCTCTCAGTCTACTATCACCAAATGGTTGTACTCTGAA
GACGGTAGAAACTTCCTAGGGTGTGAGCAAAGTCTTGCCAATGTTGTCAATGGCGACCGT
TACGTCAACCTAGGTAATAAGGACGGAACTGTAGAGATTCCAGCTAAGAAGATGCTTCTT
TTCCGGGTCGATGCTAAACGTGACAGTCCTGAAGGTAACAGCCCTCTCCGTGCGTGCTAT
AACGCTTGGAGATATCGAGTAGAGATTGAAGAGCAAGAGTCCGTTGGCGTAACACGCGAT
ATGAACGGTATGCCTACGCTCTATCTGCCTCCTCGATATATGTCCGAAGATGCTACAGAA
GCTGAGAGGGCAGTCTACGAATACTACAAGCGAGTAATTCGTAACATTCAAATGAATGAA
CAATCTGGACTTATCCTTCCTCAAGCGTTTGACCCAGAAAGCCGACAACCTCTGTTCAAA
TTCGAACTGACCTCTTCGCAGGGCAGTAAGATGTATGATACAGATGCCATCATTCGTCGC
TGGGACAACAAAATTCTGCAAGCCTTGTTTGCCGATATGCTGAAGATGGGTCAGGACCAA
GTTGGTTCTTACTCTCTAGCTGGTGCCAAGACTAACATCATGGCTATGGCGATTGAATCG
CGGCTCCGCGAAATCAAAGACGTACTAGATAATAAACTCATTCCTACGCTGTTCGCACTG
AACGGTGATTATAGTCCAGACTTGCCGAAGCTGCAATACGGTGAGCTAGATGAAATCGAT
CTTGAAGAGTTCTCGAAAGGGATTCAGAGAATCGGTTCTGTCGGTGGTCTTGAACGTGAC
CGTGAGGTTTACAACAAGATTCGCAAAGCTCTCAAGATTAAGCCTCGACCAGACGACGAG
CCTGTTGATGTGGATAATATCATGGGTGGTCAGTCTCAAGCAGGTAAAGCTGGAGTAGGT
AATGGTGCATCAACATCCGCAGCCGGTAGAGACAACGCCGCTGCAAATAACGCATAAGGA
GACAGAATGCTGACTCTTGAAAGTGTTATTGAAGCTCTCAGCAATGCTTTCGGGGCTCCC
GCCAAGGCGGAAGAAGCCCCGGCTGTAGAGGTCACAAAGTCCCTAGACAATGAAAAGAGG
ATGGCTTTGTTTGTCGTTCTTGAGCCCCAAGAAGGCGACTCCACGACTGACCTACACGCA
GACACCTACTCCGAAGAGGAAGTAGAGAAAGCTTGCATCAACTTCAATACTCATTGCAAC
GTAGCTAATATCTTCCACAAGATTGAAACACAGGAAGCTGAGATTGTCCAGTCCTTCATC
GCTCCATCCGCATTCACAACTGACGACGGAAGAGAGATCAAGAAAGGTACATGGCTCCAG
TGGTGGCACTTCCCTGAAGGCTCTGAAGTAGCCGATGCACTATGGGAAGGCGTTAAATCT
GGTGAATTCACAGGCGTCTCTATCGGTGCCAGAGCTACAGTCGAGGATATCGAATGACCG
TAAAAGCAAAACGTAAACTGACCGATATCAAGTTTGAACACGAAGGTGCTCATGTCGCTC
TGGTCAGTAAGCTCCAAGGTGGTGCAGCCAACGGGCACACTACTCTAATCACAAAAGCTA
CCAATGGCGTAACTGAAGAGCTTATCGATAAAGCTGCTGAAGTTACAGTCACAATGCAGT
TCCCTGAGTTCCTTCGTAAGTTCTTCGGGATGTATTATGAAGATGCCGAAGTTCTCTCTG
TTGCCATGGGATATGGCAGAACGGAGTATCCAGAACTAGATCACAAAGACTGGATCGACC
AGCGGGTCGAGTCTATGTCCATTCTTAAGTCGGTTTATAAATCGGCTGACCTGAATCAAG
CTCTCTCCGAGCTTACCCCTGAGCAGACCCTTTCCCTTAAACAGGATCAGGAACTGCTTG
AAAAGGCTCTGGAGGTAGTCTCCGAGCAATCCAATGAAAATCCATCCAAGGAGATTACCA
ACATGGAAACTATCCTGAAATCGGCCCACCTAGAAGCTCTAGCTGACGCTATTGCAGTTG
AAAAAGCTGCTGGTGTCGCTGCTGTTGCAGAAGTTCAGAAGCAACTAGACGCCGCTAATG
TAGAGCTTACAGCTCTTCGTGAAATTGTCAAGGCTGCTGAGGCAGAGAAAACCGCTGCTA
TCGCTAAAGCCCGTAAAGAGCAACTGGCTGAAGTCCTCCCGGCTGACCAAGTAGAAGATA
CTTTCAAGTCTCTGGAAGTTCTGGACGATCAAGCTTTTGCACAAACAGTAGGAACGCTCC
GCATTCTTAAAGCTGCTGCTGACCAAAATGACATGCTTGTCGAGAAAGGTGTATCGGGCG
CTGGGGAAGAAGACGACTCTGTTGTCGCCGGTGTTGCCGCTATCCTGAAAGCTCGCCACG
GCTCCAAGTAATATCTAGCCAATCTAGAGGAATTCCAAATGGCTCAAAACATTATCGCAA
AAGATCATCAGCGTCTTAGCAACTGGCTGAAAGAAGAACAAATGGGCCACCGTGGCCTGT
TCTACACTCGCGAAACTCTGCCTGTCGCTGACATTGATGTTAAAACAACTGGTTCTGTCC
TAGACAGCACTGGCAAGCTGGTAACTAAGGCTACTATCGCCGACGCTACCTACATCCTAA
TTACCGACCTGCACGACTATGCCAACGCTCAGATGAGCCACGCTGTCGTCCTTGCTCGCG
GTTTTGCCAAGATCGGCTCCAAGGCTGTTATCTTCGGTGCTGACGTTGACGACGCTGATA
AAGCTACCGTCTTTGAAGCTTTCAAAGCCAAGAACATCTTCGCCGTTGACCAGATCGAAG
GCGCATTCGAGAACGTTACCTTCGCGTAAGCGAGGGTCGTTCCAGTAAATAAATACTAGG
AGTAACTTTAAAAATGGCTAACACCCGTTCCTACCTAAACGATGGTCAGTTCTACATTGC
CGACCAGACTGAAAACCTGCTTATCATCCCGAACACTTGGACCCTCGTCGAGAACATGGG
CGTCTTCACAAGTGAAGGTGTGACTCAGAACACTGTCCAGTTCGAAGAGATCGAAACTCG
CTACGGTCTGGTTAAGGATGCCATCCGTGGAACTCGTCACCAAGTTGCTAGCGACCAACG
TCGTCAACTGCGTGCCTTCGCGATTCCGCACTTCAACCAAGACGACTACATCACTCCAGA
AGATATTCAAGGTAAGCGCGCTTTCGGTGCTGACCGCGAAGAAACTCTGAACGAGGTTCG
TGCTCGTAAGCTGGAAACCATCCGTCGCAACTGGGCTAACACCGCTGAAGTTGCTTCCGT
TAGCGCTATCGTAACAGGTAAGAGCTACGCCCCATCCGGAACCATCGAGTACGACTGGTA
CGACCTGATGGGTAAAACTCGTAAGGTTGTCGGCTTCGACCTGACCAACCCTACCGCTGA
CGTTATGGGCAAGACCGAAGAAATCTTCGTCCATATGCAAGACAACAGCCAAGACGGTCT
GATCCGTGGTGACTTCGTTGCCCTGTGCTCTCCTGAGTTCTTCACTGCCCTGATTAACCA
TCCGAGCATCAAAGAGTTCTACAAAGCTTACCAAGCTAGTCCTCAATACTGGCGTGAACG
TCTAACCGCTCGCGGTCTGGACCTTCGCTTCCGTGAGTTCTACTTCGGAAACATTCACTT
CATCGAATACCGTGGCGTTGACCCGTACGGCAACCGTCTGATCCCGGCTGGCGATGCTTA
CTTCATCCCAACCGACAGCGGTGACCTGTTCGCTCGTTACTTCGGACCGGGCAGCACTTT
CGATGACCTAGGAACTCTGGGTAAAGAACTGTACGCTACCGAGCGTATGGCTGAAGACCG
TCGTTCGATCCTGATCGAAACCGAGTCCAACTTCATCCACGTTCTGCGTCGTCCACAGAT
GATCGTTCGCGGCACTGTGAATGCGTAAAGACTTCAGGGAGGCTTCGGCCTCCCTTTCGT
CGTAGGAGGGTACCAAAAATGGCTTACACTGGTGATCCAGCAAACAACCCTATCGACCGT
CTACGAGAGATTGTAGGGGACGTGTGGGAGCCTCCGATGCTTTCCGACGAAACCTATCAA
TGGGTGTTGGACAAGAACGAAGGCAACGAAAGACGAGCCGCACTTGAACTTATGCGTATG
ATGCTCTTCCGCCTGACAAGGGGAATGAGAGAACGTACAGGTGATATCGAAGTATATGGT
GCTGAGTATTTCAACAACTACTTGAAAGCTCTTCAGCTCATTCTCAAAGACCCGAATATT
ACAATTTCTTTGGCCGTGCCATATGCTGGCGGTATCTCCAAATCGGATATGCTGGCTAAT
GACCTAGACCCCGACAACGTAACACGGGAATTCTACATCGGTTTTGCAAGACGGGAGAAG
CTTTACAACCAGTGCAACCCCGGTCCTCAAGACCTTAGCATGGGGTGTGATTATCTTGGC
AAGCTTCAGTTTTAAAACAGATCGCCGTCGCCTCACATCCTTGATTAAGAGGGTGGAGGC
TCTAGACGGAACAACGGTAGAAGTTGGTTTCTTCCCCGAGGACCGATATGGTTCTGAAAA
TGGAAACCTACCAGTTGCACAAGTTGCAGCTTACAACGAATTCGGTACTACTCGCAACCC
AACCCGGCCATTCATGGCTCCAACCTTTGAAGAATTCACATCTCAATTCCACTACGCAAG
ACTAATGAAGTCTACGTTTGAAAACGTTATCCGCGATGGAAGACAGGTTAATACTCTCCT
GAAGAAGCTGGGCAGAATGGTTGCAGAGCAGATGCAAGTTAACATTGACGACTACCCGGG
CTCTAACAGTCCCGCATGGGCAGCTTACAAAGGGTTCAACGATCCGTTGTTCCATACTGG
CAAGATGCTTGAGTCTGTCAAGTTCCAAATCCATCGGAGGCAATAATGCTCTATCCTACC
TTCTCCATGACCAACTTTGTCAAGCTAGATTTGATTAGAAGAGGGCAGCCCGGAGACGAC
GGTTTTGGAAGACCTACCCCTCCAGTTGAGACAGTAGTGACAATCACAGCTAACGTTCAA
CCTATCGAAAAATCGACAGACACTCGTATCCTTCCAGAGGCCGACAGAAGCAAGGCTTGC
TTCAAGGTGTACTCCAGAGGCGAAGAGATTCGCCAGTTAAAGGAAGGACCGGGAGGGTGG
AGTGCCGATAGATTCATGTGGGAAGGAGAGTTGTATGAAGTTATGAAAGTCATCAACTAT
TCGATGGGAATCCTAAACCATTACAAAGCAATTTGTATGAGAGTAGAGAGGAATAGTACA
GCATGATCCATACAGAGCTAGAAAACTCTCTCTATCTTATGATAAAAGAGTTGTTCCCTG
ATTGGCGTGTCATCCAAGCATACACAAATAATCAGGAACCGCAAACCCCTTATCTGGCTA
TCGATATTAAGAAGCTAGATGAACTGGGAAGGGAAAATGTCTCCAACATGAGCGATCCCA
TTAGTCCTTCGCATGGAACTGTTCAAGTTCAACAGGACTTCGCAGCCAAGGTCGTATTCG
AACTAGTTGGCAAGTATGGAGAGACAGCAAGTGTCTCTGACATGGCAATGGCGATTACTC
GGGCTCTGCGTACTCCAGCAGGACACGCCGCCCAAAGAAAGTTTAATCTATCCCTTTTCA
AACTCCCTAGCACAAGACGAGTTCCTATGCTAAGAGAAACAGATATGTACATGTTCTATC
AAGTTACATGTGAATTTGGATTCTCTGTGATAGAAACCACAACTCAAGAGTTTGCTGCTG
GGGCTGATATTCACGGCGTTTATTACGACGCTGGTCGCCCGGGTCACATTATTGAGTCCC
ACATCGACATAAACTTCGAACACTAATAGGAGACAGGAATGACTGTTCTTACTGATGTAA
TTGACATTCAGATCAGCCGTGAGACTGCTGCTGTCGCACAGACAAACTTCAACGTTCCTC
TGTTCATCGCTTCTCACACAAACTTCTCGGAACGTGCCAGAGTCTACAACAGCCTGAAAG
GTGTCGCTGAAGACTTCGGAGAATCCGATCCAACATATCTTGCCGCTGTTCGCTACTTCG
GTCAAGCTCTCAAGCCACGCAGTCTAGTTATCGGACGCAGACAAGTTCCTTCTGCTACCG
TCTCTGTCAGTGTTGTTCAGGAAGGACAAAGCTACGTCCTTACCGTTAACGGACTACCTG
TCAGCTATGTTAGCCAGCAAGACGACACTGCTACTCTGATTGCCACAGGCCTAAAGGCAG
CTTATGACGTAACTCCGGTAGCCGGCGTAACCGTCACAGACAACGAAGACGGAACTCTAA
CCGTCGCTTCTAACGAAGACTGGAGCCTGAAGGTTTCTTCTAACCTGACTATGGCTGCTG
CTCCCTCTACTGAAGGTTGGCCGGCTGCTATCACAGCAGTTCAAGGAGAAAACGACGAAT
GGTATGCTCTGAGCATTGACAGCCACGCCGATGATGATATCATGGCAGTAGCTACTCATA
TCGAGGGCACCAAGAAAGTGTTTATCGGAGCCACTGCTCAGGCTAACACCAAGACTTCCG
CAGAGAATGACATTGCTTCTCGTCTGGTTGCTGCCGGGTTCCAACGTACGGCTCTAATTT
ACCATCCAAACGCTGACGCTCAATTCCCTGAGTGTGCTTGGGTAGGGTACCAACTGCAAG
AGCAACCGGGTAGCAACACATGGACCCATAAAGCTCTGGCCGCTGTAGACGCCTACCGTC
TGACTCCAACCGAGTCTACCAACCTGAAGAACAAGAAAGTTACCACGTTCGAGCGTGTTG
GTGGTGTCAACCGTACATTCGGTGGGGCTATGGCCGGTGGTGAATGGATTGACGTAATGA
TCTTCGTAGATTGGCTGGAAGCCCGCATGACCGAGCGTCTGTGGTTCCGCATGGCCAACT
CCAAGAAAATCCCTTACGACTCTGTTGGTGCAACAATTCTGGAATCGGAAATCAGAGCCC
AGCTTAACGAAGGAATTCGTGTTGGTGGTCTGGCTGAAGCTCCAGCTCCTAAAGTCTTCG
TACCTGATGTTCTATCCATGTCTCCGAACATGAGAGCACAGCGTATCTTCGAAGGCATCG
AGTTTGAAGCCCGTCTAGCAGGCGCGATTCACTTTGTACACATCCGAGGGACCGTGACTG
TATAAGTCTGGTCCTTCCCATAAGGAGACTCATAAATGGCTGTTCAACGTCTAGCTACAT
TCTCTCCAGCCGATGTTACCATTGTCATCACTCACCCTGCAACTGGTGAGAGCATGGTTC
TCGGCGGATTCAGCGAAGACAGTATCGTTAACATTGAAAGAAACGCTGACACTTACGTGA
TGTATACCGGAGCCGACAACACATCGACTCGCGTCTACAACGCCTCTAAGTCTGCTACTC
TAACTGTTAGCCTTCAACAAACTTCGCCTTCGAACGACTTCCTGACTGCTCTTTACAACT
ACGACGACGCCCGTCGTTCGTCTGAGGGATTGTTCACAATCCACGTTAAAGACAACTCTG
GTCGTTCCGACTACTTCAGTGATGACGCCTATGTCGGTGTTGTTCCGGGTTCTAACTTCT
CGAACAGCATGCAGACACGCGATTGGGTTATTCATGCACACAACCTGCAAACTCTAATCG
GCGGTAACGCCAAGCTGAGCCCGGGTGATGCGGATACTCTTCGTAACCTAGGTGTCACAC
TAGACCAGCGCTGGCTGTAATATAGCGCTTATGCCACATCGACGGGGAGCTGCCTTAACG
GGTGGCTCCCTTTGTTGTTTCTGGAGGATAGAAATTGATTACCACCTACTCGCCGCGTGA
CGTGGTTGTAACTCTCGCTGGTATCCATTCCGTGACAGGGTACGCAGAGGGAGAGTTTAT
CAGAATTGTAAAAGATATTAAGCCTTTCATCAAGCACGGTTCGATGGATGGTGAAATCGC
AAGGGTCTACAACAAAGACCAAGGCTGGCGAGTAGAGTTGACAATCATGCAATCCTCGCC
GACCAATGATATCCTTTCGATGCTTTACAACGTGGACATTGCAACCCGAATGGGAAAATT
CCCACTGATGATTAAGGACACGAAGGGTTCTACAAGCTTCCTAGCTCTGACAGCATGGGT
GGAAGACCTACCTAGGGTATCTTTCTCTGGACAACTGGAGACCCGCACTTGGATTCTAGG
GTGCTCTGAGGTCGCCATGAACATTGGCGGAAACGTCGATCAAAGTTTGGTCGAGCAAGC
TATCCTGCTGGGAAGCTCTCTTCTGCCAGCCCTTACGCAATTCGGAGGCTTCTAATGGCT
AACACGGTATTGACATATAGCCCATCTGATGTTAAAATTGTCCTTTGTGGGTATGCTCTC
ACTGGTGTAGTTTCTTTCGAAATGTCTTGGCTTTCGAGACCCTACACAATGGTTCGAGGA
ATCAGAGGGCACCACACCCGGGTCTTCAATAGAGACCTTTCTGCGCAGATTAGAATCGAG
GTTCTTCAGACTTCGGTGTCTAATGATGCATTATTCTCGCTAGTAGAGCAAGACCGAAGA
ACACAATCCGCCCGAATCACCTTGTCTGTCAAGGATACCCACGGTAGCACCATGATGAGC
ACAGACAACGCTTATGTCAATGGCTACCCTAGCATAACATTCACCGATGGAATCGAGAAC
AGGGTCTGGACTATTGATGTTCTGGACTGGACCGATGGCACGGTAGGCGGAAACCAGCAA
GTCGGCTTCGACGTGTTTGGAACTGTTCAAGGCGCTCTTAGCTACCTCAGATAAATAAGG
AGTATTTATGTTCGGAAACCAACGTACTGTCATCCACAATGGGACAGAATACACTATCAA
CCTTCTGCCAGCAACTCGCGGTATCAGCGTACTGAAGCAGCTAACCAGCTTGCTGGGTCC
ATCCCTTGCCAAGTATCAAGCTGACCACGACTTCTCTGGAGCCATGAAAGAACTGTTCGA
TAACATCGACAAGGTTCCTGTTGAGAATTTGATCCAGAATCTGATGCTGACAGTTTTCAA
AGGTTCGATGGCAATCAATTTCGACACCGAATTCGCTGGCAAGTATGACCTGCTGTACGC
ACTCACAAAAGACGTGATCGAGTTCAACTTCGGCTCGGTTTTTTCTCTAATCGGTTTCGC
AGAGGCACCGACGGTATAAAGACCGGGGATGGGCAGTCCGAGACTTCAGTCACTACTGAT
CGAGTTCAGAGTGATCGGAGGGTTAGGGAGGCCCACCAGAAGTTCTCGCAGCATTGGGAG
ATTTATGTGGCTATCACTCACCCTCTCAAGCTAACGACGTATGGGGAACTGAGTACAGTC
CTCACTACAGAAGATTTGTACAACATCCTTGAGGTTATAGACGTTCACGATACTATCACT
CAAGTGGCAAAAGAACACGCAGAGGCTGATAAGAAATGATTACAGAAAGGATTGCCCAGC
TAACTGGGGAACTTAAATTTACAGTCGATTCCCGGCCTCTCACTGCTTTTGACAAGAAGC
TCGCTGGGGTCGAAGCCCGGCTAAGAGAATTCTCCAAGCTGACGAACAAGCGGTTTGGAG
TTAAGCTAACTCTAGATACAAAAACTCTGAGAGAGGAGCTTGCCAAGGCAGCCACTCAAA
GGGTAGTCTTGAAGAACATCGCGGTAGATGCTGCCGCTGTTCGTCTTATCTCTGAGAAGC
TTCAAGAAAGACTGAATGCAACGCCGATCAGGTTGAAGTCTGTTAGGCTAGACCTTAGCG
GTATCCGAGATCAGAAAAACTTCGTAAAGACGGCTCTCGGCCAGACCAAGGTCGATCTAC
CGGTTGAACTGGGCTTGGCTCAGGCTAGCCGTACGCTGTATGAATGGAAGAAGCGCACAG
AGAGTCGTTTTAAAATTCATCTGAATGCAGACATTAGCCGCTCTAAATTGCTCCAGAATG
CACGAAACACACTAAGGGATGTGCAGGGTAGGCTAAACGGTCTTGCTGTCGCTACGCCTC
AAATTAGGCTGTCTGTAGACCGTGCCCATCTTCGTAGAGAGATTCAAGATGTTCTTGAGC
AAATCAGACGCGAAGTGAGAATCCGCATTGACCTAGAGTCTTCCATCCGAGGAGGTGGTG
CAGGTGGATCGAGAGGTACTTCCGGCCATATCCGTCAAGGTATGGGAATGGGGATTGGTA
GCGAGCTAGCCGGGTGGGGACGCGGGTTTATTCCCGGCCTTGGTGGTGCGTTCGCTATTA
TGCAGCTTAACCGTGCAAACCAAGAACTTCAAGGTCAGCGCCTAGCGATGCAAGCTGTCG
GAGGCGGAGTACAAGGTGGCCAAGAACTGCAAGCTACCCTCCGTGATATCTCTCAACGCC
TAGGTCTCGACGACAGAGCCCTTGGTAGCTCCTATGTTAAGATGATGGCTGCTGGACAGG
CATCGGATTTCAGCAAGGAACAAGTTGACAGCATCTTCCAGTCTATGGCTGAATATGGTC
GAGTGATGGGCCTTGACGGCGAAGCGATGAAAGGCTCTTTCCGAGCGGTTGAGCAGATGA
TGGGTAAAGGGCAGATTATGTCCGAAGAATTGAAAGGTCAGTTGGCCGAAAGATTCCCCG
CTGCTGTAGCTCTGATGGCCAAGTCTCAAGACATGACTATCGCGGAACTGATGAAAACGA
TGGAAGACGGGAAGCTTAAAAGTGATGCCCTGATTCCATTTGCCAGAACTCTCGCTGAAG
AAGCCCGTAAAGGTGGCGCTTTGGATGCTGCTATGCAAGGCACCGCAGCTCAGCAAGGTC
GATTCCAGTTCGGATGGAACCGCACTATCGAAGCATTCGCCGCTGGCGGATTCGATAGAG
GTATGAGTGACTTCTTTAAGATTGCTGCCCAAGGCATGAAAGAAGCGCTTCCTCTGGTAA
CTGCACTTGGTGGCGGGTTCGAAGCTCTTATGAGGCCTGTCAACGCTCTGGTCGGTATTG
GAGGGGAGCTTGGTTCCCAGTGGGAGAACATTGCCAAGCAGTTCAACATGACCGGCACAG
GGCTGACTCTTACCACGGCTCAAACCCTAGCCTTGCTGACCCCTATGGGCAGGTTGATCT
CTGCTATTAGCTGGGGTGCGTTGGCACTGGAAGACTTCATTGTCTTCTTGGAAGGCGGTG
ATTCGGTGTTCGGGGACTTCTTGAACAACAACGTACAAGCTGCCGAGACATTCGAAAAGC
TAGCCAGTGAATCCAGTGAACTGAAGAACAATCTCGACGGTATCTTCTCTGTTGTCCCGG
GGCTAGCTGAAGCGCTCAAAGGTCTAGAGTTCAATGAAATGCTGGTCAGCACGATGAGAG
AACTTGCTGCCATCATGGAGTTCTTCAACAGTGTTGTAGAGAGATTCGCAATAGCCGGCA
AGTACAGGGACGCTAAGATTGCTGAAGCCGGAGGAGACAGAAGTACTATAATGTCGAACA
TCGACACGATGTACGCTATGTTCAATCCGGAAGATGCAAAAGACAAGGCCACCTTCATCG
GTGACAGGCTAGTAGCTCAGAACATTGACGCGATCCAGACAGAGACTTATACCCGTGCAA
CCCAGTCCTTGACTCCAGACCAGTTTGGGTATATGATGCAACGTGGTCAAGTTAGAAACG
AAATGGAGGGTGCCCTCAAGAAGAGTGCCATTGACATTAGTTTCAACCTCAATGTTTCTG
GTATCGATGCTCAGGGTAACGTCATGACAACTGAAGCGCAAGAGCGAGTACGAGAGATCG
TTAGTAACGTTCTTGAGGAAGAAATCTCCAGAGCTTCGGCAAGTTATAAGGAATCCCAAT
GACAATTGCTATCAAAAGAGAGAACGGAGACCTAATCTGGTTCGACGCTGTTACAGAGTT
CGGAAGACAGTACCGTGGCTCTGTGAGTTCCAACCCAATCGAAACGGGAGGAAAAATCAC
AGACCACATTACTACAGAAAACCCAGTCTTCACTCTTACAGCCGTCGTATCAGACGCAGA
CTTCAACTTGAACAGGCCCGTTATCAACGACAACGAGGCCCAGACATACAAGATCAACAA
CAAAGAGTTCGTGAATACGCAGCCGGTCAGTGTGCCGGCTGTTATCACAACTTCTAGATT
TGATCCGAGCCGAATTTTCCCGGAAGTTATTACTCAGTTTATTCCTCCTGAGATTCCTTC
TGCAACTGTCCTCCCTCAAAAGGGTGATAAAGTCGCTTATGATATTGAGCGCCAACTGAT
CGACATGCAGCGTAATGCTGAGGTCTTCAGTTTGCTGGACTTCCGAGAAGGTATCATCTG
GGATCAAATCGAAAGATGCATCTTCACCGACTTGTCTTTCACTGAAAACGCCGAGACAGG
TAGCAGCCTTCAACCTCGTATGACAATCGAGGCCGTGACATTCACAGACACTCGCTACAT
TGAAGTTAGGGTGAACAAGGGAAGAAAGACAGCCAAGAAGGAAAAGAGAGACACCAAAGA
TGGTGATACAGGGGCTAGCAACGCTACTGGACAAGACTCTCCCACATTCAAGCGTAGCCA
GATGAAAGAGGCTCAAATTAGAACTCAAGTTGCGAGGTGATTAATGAGCACGACTTACAT
CGACACACTTCCTTTGTACCAAGATAGGAAGTATAGATACGCGGTAGCTCTGGAGGGCAT
TTCCCGTGTCCTCCAATTCTACTGGAACAGCCGCTCTAGGCAGTGGCACATGGACATATT
CGACGAGGAGCTTAATCCAATCCTAACAGGGTTGGCATTGGTTCCACAATACCCGATAAT
TGCAGATTACGCTATGCAGCACATCGGGTTTAATGGGTACTTCTTGCTCATGCCTGTCAA
CCTAGAACAGGTGAAGTACAAGCACGATGCAAGCGACATTGTACCTCAGTTTTTTGAACT
TCTGTATGTTAATGTTGATTTGGAGGAAGATGCAGAGTGAGACAATACGACAGAGTATAT
AAATTGACGCTCGGTAATACTGAGTCTGGTCAGGGAGTAGAGATTACAAACCTTCATCCT
GACGGAAGTGTTAACAGAGAAGGACTTCAGTTCAGGTTCGATATCTCTAAAAGCTCCGAT
AACAAAAAGAGCGGCAACTCGGCTACTGTTGAGATATACAATCTGTCGATTGCAACTCTA
AACCTTCTTGAAACCGAATACCTTACTTGCAGACTAGAAGTGGGGTATAAAGAAGCTGGA
ACTTCCGTTGTTCTAGATGGTAATGTTGTCGAAACATCCACAAGAAAGAGTGGAAACGAC
TACGTGACTCAGCTTATTCTTGGTGAGGGTTACACTGCTCTAACTGAGACTAAGCTGAAG
GGCACAGTATCTCCGGGCAAAACTGTAAAGGATGTTATCGAAGAGATTCGTCTTCAAATG
CCGGGAGTGGACAGAGGAGCTTATACAGGCCTCAATTGCAATAACCCGATCATGTACGGC
TATCAACTCCGTGGTCTGGCCAAAGACGCTCTAAACAGCGTGTGTGAAGCCAACAATATT
GAATGGAACATCAGTGGAAACGTTCTAAACGTCACAGACGTTAACGGACCAACAACGAAG
AGTGTTCAAATGGCTCCTCTCGTAAACAGAGAGACCGGTCTGATCGATATCCCATTCTAC
GCCAGTGCCAGCGGAACGGCACAGAAGAAAGATAAGCGGAGACGGAGAGGCGTTCAATTC
AAATGCCTTCTCAATCCTGAGCTAACTCCCGGGGTTCTTGTCCGGGTAGAGTCGGATAGA
TTGTCAGGAACTTTCAGAATCAACAACGTCCGAATCTCGGGCGGATACAGAGACAACGAA
TGGTACACTGAATGTTGGTGTTCCGATCTTAACCAAGAGGATATTGACCAATGAGGAGAA
CAGGCCTACAAGAGCTTCTGAACCTGCACTCGTCCACGGAAGGCTCGAAACAGTATACTG
CCATACCTTGTGTGGTATTGCGCGTTCTGGACGATTTTAGACGCCTTTCTGTCGATGTTA
GACCAGTGGTCAATGACCTGTACAAAGACGGCACATCAGAAGAGCAACCAGAGATTCTAT
CTGTCCCTGTCATTATGCCGGGAACAGCTAACACCCTTATCAGCTTCCCATTGAATGTCG
GGGATACGGTGTTGTGTGTATTCTCTCAAAGAACTATGGACGTGTTTAAAGGCTCTGCCA
CTGGACAGCCTCACACTCCAAACGATCTTCGTAAGTTCAACATGGCGGATGCCATTGCCA
TTCCCGGGCTGTTCACCTTCCCTAGGTCGATGAACGACCCTGCAAGACATAGTTGGCCAC
ATGATACCAAAGACCTTACTATTGCCCACAACCTGATGACGGGACAAGAGGCGGAAGTTA
GGATCAAAGCCAATGGAGATATTCTAATCAACAGCCGCAAGACTATAAGCATTAATGCTC
AAAATGTCAACGTCAAGTGTGCTTCACTCACTGTCGATGCAGCCCATACAACATGGAACG
GGAACATTGCACATACAGGTAACTACGTGCAGACTGGTGGAACTTCTACATTCAACGGTA
TTCCATTCCATACCCACAAACACGGTGGTGTTATGCCGGGCGGTGGTGTTACTGCTGTCC
CACAAGCTTAAAAGGAGATCATATGGACTTGTTTGTCAACCCCGACACACATGACTTGGT
TTTTATAAATGGTGAAGCTCCAGTCACTCAACGAATGGTTGATATTGTTGCTCAGCGACT
AAAGATCAAACTGTACACATTCCTAGGTGAGTGGTTCTTGGATGATAGGATCGGCATCCC
CTACTTCGAGAGGATTCTTGGTAAGTCTAGGAGCCTTCCCGCTGTTGACGCGATATTCCA
ATCTGAGATTATGAGAGACCCCGGCGTCCTTGAGATTACATCTTGGCAGTCGGGGATCGA
CCCTCACACACGTGAATACTCCATGGAGTTCACAGTCAGAACCACAGACAATACAGAATC
CCTTCCCATCACTTTCAGAATGATAGGAGTTTAATATGGCTGGAATTACAGCAGAAGGTC
TAACGATTAAAGACTTGGACCAAATCCTGACAGACTACAGAAACGTAGCCTCTCAGGTCT
TCGCCGACCTAGTTTCAACTGGAGACGAAGTTGACACGTCTGGTAACTCTGCTCTAGGCC
GTCTGATCGGCGTAGTTGCTCCATCGGACGAAGCTATCTGGGAAGTTATCCAGATGGTGT
ATAACTCCTTCAACCCGGCAGCCGCAACTGGCGTGGCTCTGGACAACCTAGTGTCCTTCT
CGGCAATTAGCCGGCATGCTGCCCGTCCGACCCGGGCTCAGGTTGTTCTAGAGGGCAACA
TCGACACCGTTATTAACTCGCCTCCCGCTAAGATGATTTCCAGCAGTACAGGCCGAGTGT
TCCACCTGCTACAAGGCGTGATCCTCACTCCTAAAGCTTGCTCTGGTGTTGGAATCTTCC
CTCAGACAGTAGGCAACGACCTGACATACGAGCTTAAGATGTACGTTGATGACATTAACA
CAACGTCTATCAAGTACACAAGCCCTACCACTGGTACAGTAACATCCGAGTCCATCCTAG
CAGGACTGGCCGCAGACGTAGCTACAAATCACGGAAATACCTTGACAAGCTACGAACAGA
ATGGTATACTTTTCATAGTACCTATTGACCCATTCAACACCAAGACTTTCGAAGAAGCCT
CCAACCTGAGTATTCAGAAGGTTAGAAAGCTTGGTATCGCTGTTGACGACGTTATTGGCC
CTGTGCCTCAGCAAGCTCTAGCTATCGATACGATCTCCATTCCTATTGCCGGATGGGACA
GCGTTATCAACCCTGTTCCAGCTATCACTGGCCGTCTGCGCGAGACCGACGATGAGCTTC
GCGAGAGATTCCGAAACTCTAAATTCGTACAAGCCACCAACATTCTGGAGTCCCTAATCG
ACGGTCTGATGAACGTAGAAGGGGTAGAGGATGTTAGGATTATTGAAAACGATACCGACA
ACCCAGACCCCGTTCATGGAGTCCCGGGACACTCGTTCCTTCCAATCGTTCTTGGTGGTA
TTCCTACAGAGGTTGCACAGTCCATCTGGCTGAACAAGCCATTCGGGATTGGTTCTGTCG
GAGATACAGAGGTTCAGGTAGTAGACAGTCTAGGCTACACTCACAGAGTCAACTACCAGC
GACCTGTCGAGGTTCCAATCGAGATCAAGATCAGTGTAACAAACACAGGATCGATGCCAG
AGAACATTGAAGATATCCTACGGCCAAGGATTGTAGCGTACGGGACCGAGAATTACAAGA
TCGGAGACGACGTAATTTATTCTCGATTCTATGCTCCAATCATGGAAGTCCCGGGCTTCC
AAGTTAACAGCCTGACGATTGCCAAGAAAGGACAGACTCAAGGCATGGCGAACATCGAGA
TCGGGTTCAAAGAAGTGGCTACATTCGCCGCAGCAGATATCACCGTAACTACGGTGTAAT
GATAGAAGGAGAATTCCATGGCTGTCAACCAATTTGACAGAGAAGATTATCTGGAGGTGG
CCCGGGAACGGGTCACTGAACAGTTTAAAGAGAAGCCGATCTTTGATCGCTTCCTGCAAG
TGCTATTGTCTGGTAAGTTTGATATCCAGAATGCACTGGAAGACCTCCAGACTCTCCGGT
CTCTGGACACAGCCACCGGGAAGCAACTGGACATTATCGGAGACATTGTAGGGCGACCAC
GCGGTCTAGTGTACCAAGATATTTTCAACTATTTTGGATTCGCTGGAACGGAGCGTGCAG
GTTCTTTCGGAAGCCTGTCGGACCCTACGGTCGGTGCTCCATGGTACTCGGTCGGTGCTC
CA

[0130] In another aspect, the invention provides an OMKO1 bacteriophage targeting Pseudomonas aeruginosa. In certain embodiments OMKO1 binds a molecule of an efflux pump and/or Type IV pilus. In certain embodiments, the OMKO1 bacteriophage has a genome comprising a nucleic acid sequence comprising SEQ ID NO: 2.

OMKO1
(SEQ ID NO: 2)
AATTATTAACGAACGACTGGAGTCCAGCGGAAGTAGATGGTGCGTATATGCGCTATCGTG
GTTATGAGCGCATGGCAGGGACTATTTTTAATGAACTCAATAGAGCGGTACGTGTATTTA
ATATGCGTAATGGTGGATCAGTACAAACTGTCGAGTTAGATCCGCACGTGATCTGGCGCA
AGATTGTACAAGATCCGACAGTAGCCACTATTGAAGATTCTAACCCCATTGCAAATATCC
GTGAACAAGAAGCGATGACTTATCGTGGAGATGGTGGACGCGGTTCAACTTCAATGGTTG
CACGTACACGTATTTACGGTGAAGCGGATGTTGGTGTGGTTAGTGAATCAACTGTTGACT
CAGGTGACGTTGGCGTTATTGCTTACTTAGTACCTGATGCTAACTTTGTAAACATGCGTG
GTGTTACGCGTATGTTTGATCCAAAGACAGATGGACCAGCTAGACTACTTTCAACTAGTG
CACTGCTTGGTGTTGCAACCGAGCATGATGACCCTAAGCGAATTAACTTTATCTCAATTC
AGCAGCAGCAAGGTATTTATGCTGATGGGTATACAGTTACACCAGTTCGTACAGGCTATG
AACAAATCATAGCCCAAAGAACTAGTTCTATCTTTGCTGTAGCAGCAGAACAAGATGGTG
AAGTTGTAGCTATTGATGAATATGGTATCCAAGTTAAATATGCTGATGGTAATGTATTTG
GATATCAATTAGGTACAGTTCATGGCACAGCAGCTGGTGTTAACTACCCACACATTCTTG
TTACCTCATTAAAGAAAGGTGATAAGTTTAAACGTGGTGATACTATCACATATAACAAAC
GTTATTTCTCTGAAGATAGGTATACGCCTGGGCAAGTATTATGGAAAGCCGGTTGTATGG
CTGTTGTAGCATTTGATGATAACCTTGACACTTTAGAAGACGGTTCAGTTATTTCTGAAG
ACCTAGCTAAAAGGTTAAATACTCAAACAACTGCAATCAAGAATATCGATGTTAGGTTTG
ATCAGACTATTCGAGATATGGTGAAAGTTGGGGATCATGTCGACTTAAATTCAATTCTAT
GTATAATTGAAGATCCTGAAACAGCTGCTCACTCACTATATGACGAGGCATCTATTGAGA
CATTACGCAAACTATCAGCATATTCGCCACGTGCTAAGCTCGTAGGTACAGTATCAAAGA
TTGAATGCTTCTATCATGGTGAAATAGACGATATGACACCAAGTTTACAAGCATTAGCTA
ATACGTCAGATAAACAACGTGCTGAACGAGCTAAATCATTGAAAGAACCTACCTTCACTG
GACAAGTAGATGCTAACTATCGAGTGAAAGGACGAGCCTTAGAATATGACCACATGATTA
TTCGAGTGTATATCGATCATGATATCCCATGTGGTGTTGGAGATAAAGGCGTAGTAGCTA
ACCAGATGAAAACGGTATTCTCCCGTGTAATGACTGGACGTAATGAAACTGAAGATGGCC
GTAATATTGATCTACTATTCGGTAATACATCGGTAGAAGAACGAATGGTTCTATCTCCTA
AAATCATTGCTACAACAACTGGTATCTTGTGGGCAGCTGGAAAACATCTTGTAGCTGTAT
ATAGAGGAAACACTAATGCAAAAGCTAAGTAATAATGTAGCACATGGTCAGAACATTGCT
GTTCTTCATGCTGCTGTTAAACTAGGTACTCAAGCAATTCTACAATCGCTTGGTGGCACC
ACCAGCTCCCCATCTCTGAATGGGGAGTTTTTAACTGAGGCTGATATTGCAGCAGCTTTA
AACGCTCGCTTAATGAAGAACCTCAATATCTAAGGAGTGTTAAAATGTTCTGTAAAGAAA
CCCAAGCTGCGATTGTTGGCTCAGCACGTAGTCTAACTGAGGATAACCTTGTTCTAGTTA
TCCCTAATGAAACATATCCCCTTGCGGTCTTTGCAGATGGTTTCAGTGTAGATGGCAACT
CTAATAAAGTTGCCCTCTCTGAAGAACTGGAAGCATCTGTAGAAGAGTTCTTCGAGGAAG
CTAACCAAGAGCAACCTGTTAGTGTAGAAGAAGAGCAAGAAGCTCTGATTGCACATGTCT
GCTCATCATTACAAAAGATCCAATTCAATACGCAGAATGTTATTTGCCCTGCAATTGAAT
ATATGGTACGTGTCTTTAATGAGCGTCAAAGCATTAGTTGTCAACCAGATGTAAGCGCTA
CATTCTACCACTATAATGCAGTTCACAGTGATCCCCGCCTAACTGCACACGTTAGTACAC
GATACAATAATTTACAGCCGTTACCTGAGTATCGTACCTTTATTCTAGAATCAATCGATG
CTAATGAAATTATTCGGTTAGTATCAATGGGTAATCCGCATCTAGATCAAACTGAAGTTG
AAGAATGGCTACTATCTATTCCTAATAGCGCTGCTGTTATTGAAGGTGTATGGAATTCTA
TCTTCAATGATGGTCGTCTTCTCATTCCAGGTGAACTTGAATATGTTGTGGGTAGATCCT
TCCCATTCACTGTTGATTCACTAGCTCTGGCTTACATGATTTGCGGTCACTACATCGATA
ATCCGGTTGAAGTTATTGGCGAGAGTGATGTTGACCTAGAAACATGGTCACTAACTATCC
GTAAACTACATGAGATGTTTGGATTCTATCTCAAGCGTGCTTATGAACGTCGTCAAGCTG
ATCGCGATGCAGGTCTACTCATCCTAGCTTCAGAAGCTAATAATGTAGTTGCTAATTCTC
GTTGCAAAGTAATCATTAATGGTGATGTTGCACCTCAATTTGAATTAGCAGGTGGTGACA
TCCAAGCTATCCTTGGTGCAGCTGTAGCAGGTAGTAATAACATCTACCTAGAGCAGATTC
TTAATAACTCAGAACAGTTTATTCAACGTTGGCTATCGGTATATCCGCTGATTAAACAGT
CAGCTATGGATAAAGGTTTACGTAAACTACGCAATGACATCCATGAATCATTTATGGATG
GCGTTATTAATACTGAACTTAAAGATCGTCATGTTAATGAACTCGAATATCGTATTAAAG
AAGCAATGAGTACGATGACGACTGAGGATCTTAAGAATCCTTACATTACCTTTGGTAAAC
TTATCTGTAAAACATTCTTTACAGAAAATGTTTACTGGCAATATCTGTTAGCCATTGATG
AATTTAGTCAAATGTATCCTGAGGCCACTCTACGTGAACTCAATACACAATCACTAATTT
CGCTAATGGCAGCATGGCTATCTCAACAGATTAAAGTTGAGCGGTTCACTGGCGTTGTTG
ATCCATATGCGAAACTGCCAGTAAAAGAAGTTATTGAAACTGTAGAAGATGATGACACTG
AAACTTTAGATGATGTTGAAATCGAAGAAGAAGTTTCCAATTAAATTATCTTAATGGTTA
ATAATCATTAAAACATGCAATCGATGATAAACTCCGGTATTTGGAAGGATACCGGAGTAA
TACAGCGAATATTTAAAGGTGCATGATTTTGATTAAGTATTTTAAACTTTACATAAATGA
ACAATTAGGACATGATAATGGACGTACGTTCTCTTCGACGGGATCCAGAACGGGTCCACA
GTCATCTAACTGATTTAGAAGATAATTCAGTAGTAACTAATGCCCCATGTAAAATACAGA
TTCCAGAAAGATTTACAGGAAGACATCTAGCTGTTATTGGCAGTGAAGTATTTACTATTG
GTATATTTCCTATTATTTTTAATGATGAATATTACGCAGTGAATAATACCATTGCAATGA
TGCGGATAAATCCAGTCTCCACTGAACGCGTCCACATCAATGGTGAAGTTTATCTAGAGT
TTCATTTTGATAAAGGCAGTAAGATTTTCCAGAATACTTACTTAGTTGTTAATGATACAT
TAACTTACTATGTTTATGATGAGTTAATTAACAAAGGAAACTTCCCTTGGTATATTAACT
ATTATGACAAAGCCAAATTATTTGAGACAGCTAATTTACACGCTGGTGTTAATCTTGGTG
GATGGCCTACATTACAACTTATTATTTCAACCACTCAGCGTGCCTCGGATGATATGTCAC
AACTATATCGACATGTGCTAACTAGACACAGTGATATCGTGGATAATCCACCAGTCGACG
TACCATTCCGTTCAGTTATCTGGAATACTTCAGACACAACATCAAAACTCAATGGGGCTT
ATTTTGATCAAGCTATCACATCAGCACTTGTTAACCCATCTGAGTCAGTAGAGCTTATTG
AAGAACTCCTCAGGACCTAAGGAGTTGCGTTATGCAACCATATTCTAATTTTTCTGGTTT
GCAACAGCGTACTAATAACCAAGTAGTTATCGGCAGTGATATGTTAGCTGGTACTAATAA
AAAAGGTGTATTAGTGCCTGATGCGGATGGTTACTATCTAACTCCACTAGGAGCTTATGG
TACCCGAAATTCAGCTGGTATGTTCTATGAAATGGCATCCGGCGTATCTATGTTTAATCC
AGACTCACCTTTAATGCGTCGTGTTAAAAAGGGTGTTCTATTCATGGAATACAAACACCC
TGAACCCTATCGTAAAGATGGCACACGGATGAATGAACACGAGTACCTAATGCGCATTCG
TCAAATCGATGATGATCGTGTGTGTGCGCATATTAAGGAACTTATTCTGGTTGATTCTAC
AGATGAGAAAGGTCTTCCTATTAAACTAGTACTTGGCAAATGCAAACCATACGGTCCTTT
TGGTAAGTACTTCGAAGCATCTATTACCAATCCTTCTCAGAATACTTATTGCTCAGTAAG
GTCAATAACCCAAGATGATCCTATGCGAGGTATTAAATATACCCGTGAGATTTCAACTTG
GGATATGGTTGGGGAAGGTGGTATTTACGGTGCTAATAAATGGAATTCACCTGCATTAGA
GAACTATGAAGATCAATTAATGGTTATCACGCCTGATACTCTATATCAGGTACAGCGTGA
ACGTGAACGTCAAATTAACATGGGTTTTGAATGTTCTGACATCACCAACGTGACGGATCT
AGCAAAAAGTCTTGGCTGGGATATTTCACCAGTTAAACATAGACGCCCTGGCTTCATGCG
TTAAAAAATAAAAAAAAAGACATAATGCCCTCCCGCAATGGGAGGGCTTATGCTGTCATG
TTGGAATAGCGATCATTGGATACATATCCCTAAATAACTCTAATGCTTGCGCTGGCTTAT
AAAAAGGTGCCACAAGCATAGGCGTCCTATATGTATCATTACTTAGAAACAGTGTAGTAG
CATCATCAGAGGCTGTTTGCAGTACACCTAAATTAAATACTTTTTGAGTATTGCGCAATG
TCCAAAACCAATCTGGTTTTAGCTTGTCCATGATACCTACTAACTTACTTAAAATAGTTG
GATAGTCCTCAGGTTTTGTACCTTCAGGAAATACATAATTAGCAATTATCCTATTTGGAT
AATCTGGCACATCAGCGGTAAGGGCCTCAGCTCCAGAGTGTGTAATTATTCGATCAATTA
CATCTAAATCAATATTATTACCCAGTGAGTCAGCAGTACGTTTAGTTAATGTGAATCTAA
AATCATCATTATACTTGTAATCATATCCAACCCAGTTGCCTGACCCATCATAACGCTTTG
TAGCACCGAATGTATCGTCGATCAGGTCAGGGATACCCCATTGTGCTACTTCTTGTAATA
CCCCTCTTAAAACGGCTGCCTCGGCCCCTAAATCAAAGAACTTAATAATGGCGTTAGAAC
CAGACATGTCTTCTAAGAAACTAAGAATAGAAGACATGTTTTGATAATTACTGTTTTGTT
TATAAACATCCACTCCATTAATGATCATCTTTACTTCATTGGCCATTCGAGTGGCTTGTT
GTACATACCCTGGACCACCATTTGAACCAGTTAGTTCACCGAATATGACATTCTCTAAGC
TTTGGGCAATATTCTGTAAATCTGATCTAGAACCTTTTAAAGCACCTTGAATACGTCGTG
AAGCATCTGCTAGATTAATGCCGTCAGATGGTATTAAATCACCAATACCGCGAACAGCTT
TAAGAGTCCGATTAAGGATACCGCTAAAACCTTGTTCAAAATTCGAAATACCAGATACTA
AAGAATTTCGCACATCCGAAGATACTTCGGTATATGCGTCGATCTTAGCAACTTCATCTT
TACCTGTACCTATAAATGAAGGTAATGCAAAATCAACCATGGTAGTCTCCAACAAAAAAA
ATAATCTATAAGATTGGGGCCAGATACCCCAAAGGAATATCAAGCCCCAATATTAGAAAC
TACTATTTTTTATAAGTGATAAATTTTCCAATATGCTTGAATCCTTTACAACTAATAGTA
ACTTTAATCGGATATTTAGCCCTCATTACATAAATTAGACGGGATCCATTAAGCGGTGCA
TACAGTATAAAATCATTATCTACCATTTCTTTATGGAACGCATTAATCTTATCTTGGACT
AGTTTAATATAATCCTCATCATTAATAATGCTTTGTTTATCTGAAATAACAATCTTATCT
ACAGTATCGCCTTCGGCGCATAGTCTTTCATATACAGCAGTACGGATAAATGTATTAACT
GCGATATATGTATTTTCTGTTACTTGTGTAGCTTGCGCACTATAAATATCACTAATATAG
TAATTAGGTTTATATGGACCAAATGGATCAATAATATCTTTAATAGATACACTCTTTTTT
GGTAGAGTATGGGGTGGTTCTAAAAATGAAACACTGTCATGTGCATCGATATCTAAATAC
TTATTGACTAGTGGGGCAACGCGGTTGAATGCTTCTTCATAGATAGCATACATGTAGTCA
CGGTAATCTGGTAAAGACGCATAATAATTACGCTGAACAGCAGTCTCGGCACTACTAGCA
TAATTATAAAAAATACCCGCGTGCCTTAAAACATTTTTAAACTCATCTACACCTAGAATT
GAACTAATCCAACTAACATCATTATCGTGGATAAATATAGCTAGACGAAGGTTTTGCCGT
TTTGGGTTAGTTTCATCTTGGAATGGATATGTTGTATATAGTTCAGTGATAGCCTGTTTA
ACTACATCTGAAGATTCATTGATCAGTTCCTTTGAGAATTGATCAATTGACATAATCTGT
CTTTTCTGATATAGTACATTAATACATGCTTCTACCTGTAATAGAAAATTCATCTTTTTA
CTAATTTCGAAACTATGACTATTCTGCATTACACTATTCCTATCTAATTGATTTAATTAC
TTCGCATACCACATCAAACCATTCTTTTTCCTGAATTGTTGGATTTGGACCTTGTAGTGA
TAAAGCGCCGAGATTTTTAGCTTTAAATAGAACGAATGGTCGACTATTAAGATTTAATAA
TAGGGTATCACGAAGGATATTAGTAAGTCCATCTACATATTGGTATTTTAAACCATAATC
TAGTTTATAATGAGAATTGACTTCTGGTTGAAGAAAAGCCTTTTCTTTTTTACCAGTGAT
GAGATACATCCGAAGACCTTTGAATGAAAAGAAATTCTCATTATCAAGTGTGGTCTTCTT
CTCTTTTCCATTAAACTGAAATAGATCAGGGAGCGGTGTATTACCGCTCTGATCTACAAT
GATACTATCTACAGGATAATTATTTTGTACCCATGGGGTTTCTGGATTATTCATCTGAAT
TAGGCTCCACCCAATGAGGATCAGGTACAGGAACAATATGTACACTGTCCTCTAGTTTAT
CTCGAAGATTAGGATCATCAGTCCATTGTAGAGAAAGAGTATATCTCTCCTCTTTAGGCC
GTAGCAGTAGGAATCCACGTCTTAATGTATTCCAAGACATATTGGGTGATAGTAAACCAC
GCCTTTGTGTATTAGCCAATGAAGTAAGTTTCTTTTTATCTAATCCAACAAGGTTGACTG
GATTATTTAAAAACTCTTCCCATAGCTTATCCCACTTCTCCTGGTTAATTCCTTCTTTCC
AGAGAATATGCCTATACAGATGGGCCATTGTAGTTGTAGCTGGTTTTTGATTCTTAAAAA
TTTCACATTCTTCATAGGGGAAATCATTTGCAGAGCAAGTTACCTCATCTTCAGTTGGAT
CAATATTGATCGTATAAACTGAATCAGGTTTTGATGTACCCCAAATCAGACGTACCTCTA
ATGTTGCTTTAACAGGTGATAAGAAATCAATAGCTTTCTTAAAGCCATCCCAACTCATTG
TATCAGCTTTAAGTGCTTTATTAAGATTACCTTTATCTGGGTTATTCTTGTTATGTGGTT
TTTGAAAATATGCATTCAAACGTTTATCCCAAGCAAACTGTGTCATATTCCTCCACAGTA
ATACTTCTCGGAAAACATAACACAAAACCCCTTCAGCCTGCCTTAATCCTTTTTGAGGAT
CGCTTAATAAGTCTTTTACAGATTCCATCTTTTTTACACCTACGGTGAATTGATAATAAA
CACACTTTATATTAATTTATACTTGTATAGTCTGCACCTCACAGTAACTTAATAATTGCT
CTTGATAGTTCAATAATATCATAGTACATTCTATCCATCTGACGCTGATATGCCTGATGG
TTAATCTGTTCAAGATATTCAGTTTGTTGCCAAATTAGGTCACGCATAGTTTTAATAGAT
TTACATACATCAATAAAACTATCATTACTGTTTATAAAATATTCATCAAGGTCAATTGAT
TTCCTGTCGATAAACTCATTACGGCACATTTCACTAATCTTTAGATCATCTTCATTTGCA
ATATGATCATTTAACCTGGTTAGAGCATCTAATAAATAACCAATACTGTAATGTCTTAGA
TAGACAGGAACACCCATCATCTTCCTGATTGTCAGAGTTTTTAATTCATCCAGATTAATT
AATTGCCAGAAATTATTAATAGCTTTTAATCGTTCTTCACCTGAAATAATATCTTTATCT
ATCCGTTCTAATTCAATTAGAAGTTGTTCTTTACCAACTTCCTTTTGGAAGCCCCGGAAA
TATTGAATAATTTTCTTAAACATGATATAGGACCTATTTTTCAGATACTTAGCATATGGT
AAGTATGTTAGGTATTACTATTACTAATTAGAGGATAATAAAATGTTCCATGGTGCAGAT
TTACCTGATGAACCTTTAGAAAAGAAATCATCCGCTACAGAAGAAAAGGTATATGCTGAT
CTAGAATATGAGCAGCAGATACGGTATACACAATCAGTCAAAGAGAAAGTACTAAAAGCA
GTGTTAGAGAATACTACAGGCAAAGTACCTACTGACAAAGAATCAGTTGATATGATTCTT
AAATTAACAGATTCAATGGATAAGACAACAATTGCTAACCGGCGTATCCAAGTTGATTCT
GAAGGTGCGCGTTCTAACCGTGAACTTGCTGAAGGCTTTGCTGAATTCGTTAAGATGCAG
ATGAACCGTAATCCATTAATACGTGATCCGAATGATGGACCAGTAACACCACGTGAGATT
CCAGATATCCCTGATGAGGAATTTGAGAATTACACTATTGAAGAAGGTGAAACTGAAATC
GGTATCATCATGGAGGAGTCCAATGCATTTATGGAACGGATGGATGCTGCACGAGAAAAA
GAATTAGAAAACGACTGATATTAACGACATATAGCCCTCCCATTACGGGAGGGCGTTATG
CACTTAATACAAATCGATATCTAATACATCACCAACTGTATTTACGATTACTTCGACAGG
TGGTAGCTCAATATTACCAATTGATTTCTTAATAACTTTCATTTGGTTAATAACTTGATT
ATGATCAGATGTTACTTTGAGAGCTAATAGTCCAATAGCAGTTAAACTTACAATAGCAGT
TGAGTTATCTGAAATAGTTTCATATGCAGCTTTACCTACTTTCTTAATAGTTTTAAATAG
AGTAGGTTTATTTTGACGAATTAGTTTTCGTTCTTTTGCTTTAGCTAGCTCATCATCGAA
TTCTTTATTAAAGCTACGGCGTTTACTCCAATCATAAACACCTGGTGAAACTTCTTCAAA
ATTGGAAGAGATTGCACCAAAATCACTAGCATGACTAAACATCCATTTAAAGATAAAGCG
ATTAGAAAGAACCCACGCCTGTAGATTAGTTTCTGCATCGTTGATTAGTTTAATAGCATC
ACTTCCAGTAGCCACTTGGCCATTAGCTTTAACAAATAAAATCAGTCTTACAGTAGTACC
ATTGATTACTGTGTTATTAACATTTGCAATCCTGGTATAAATTTCTTTAATAATTCGCTT
TTGTTTATCTAAATCAGCACCATTTAAACGAATATTAAATTGACGGTCTAATACGGCCAT
TGCAGTTTCCTCTAGGGTTATTGTACCTAAAGTATACTGCATGACCGTATTATTTTAATT
TTTTACATGCTTTATAAAACCGTGTACCAACGTACAAAATAAACCCGCCAATAACAGCAA
CTGATGTGATTGTTTCCAGCGGCATGCGCTTAGCGGGTTCTTCAATTGGTACTGTAACAG
CTGGTAATTCAATTCTTTTCTCAATAACTTTTTTACCAGTTAACTTATAATAAACATCTG
GTTCTAATGTTATCGATTCAAGAATCTGATTACTACATGGATAGCGTGTGACGCCTCCAT
GTCCATCTGCAACATAGAAGCTGAATGTATCGCCTACACGATGTAAGTCAACCACACTAC
CCATATATGTCATATGAGCTGGATAGAGTTCTGCCTTGACCTTTCCATCGTTGAATAAGT
CAATGACGGAACTCTTCTTTAGCTCACCCATTAAGTTTGCTAAAGTGAATGCCGCCATTA
GCGATAACCCTATTATTTAATCGACTTGTTGAGCACTATCATCAATATCGATTTTATCTA
GCTCATCAGTTAGAATATCTACTTCACTGTCTAGTACCGTATCATCATCAGCTACGGTGT
CATCAATAACGGTTGATTTAGAAACGGCCTTATATAGATTAATAGCGGCAACAGCGAGGG
CACCAGTTGAGATAATTGCAGCTGCGATCTTTAGTACTTTCATTTTCTATTTTCCTAATC
ATTAAGTTTTAATAAGTATCCAATATAGATACATGTCTGTAATATAGATCTTAAACTTTT
TTTAGTGTAATAAAAAAATTAATGCGATATAAACCCCCTCCCGAAGGAGAGGGTAATATG
TATATCAGTATTCCATCGAAGTTAATACTCGATAATGATCTAATAGTAAATCAATAACAG
AGTAAAAAGAATCACAGTTGAATTGCGTATCTATATTTGCAGATACTCCAGTAATACGAT
TGATAATATGGAGACACTTAATATCTCCACCACGTTGTCTGATAAAAACAACTGCCCACA
CTGGCCACGTACTATCTGGTGTGGTGTCTTGAATAACTAATCTGTAATACCCATCATTTA
CTGTTTCAATGGATGCTTGGATTGGATCATCTGTATAAGCCGATTCTACTTGAACATATT
GATCATTATAATAAAACATTTCCTTAATAAGTTTAGCACAGGCATGTAATGTCTCCATTA
CCTTAGCTGAACTATTTGGATTATATTGTTGATTAAACATGTCATTAACCTCTTAAGATA
TTGTATGCATAGTAGTAATATATATCTTAATTATTTTTTAGTGTAGTTGTGAAAACTTAG
AGGAATATACGATGCCTAGTAAAAGTAAAAAACAACATAACTTCATGGCTGCTGTAGCCA
ATGATAAGAAGTTTGCTAAGAAAGTTGGTGTACCACAATCAGTTGGTAAAGACTTTGTTG
AGGCTGATAAAAATAAAAAGAGTTTTGAAAGTGTTTCACTTAATAGCACTTATAAAGATA
GTTACTAATATAATGCCCTCCCATTGCGGGAGGGCTTATGTTGCTTATAATTATTTTAAT
ACTAGATTTTTATTAAATACTTCTGGAGTACTAATATTAGCTGGATCAAGTACAATAAAT
TCAGCTTGGTTAAATGCACCGTGTGTTGATTCAAAGTGGCTGATGAAGAACACTTGATTA
ACAATGCCATTTTCAATTAACCTGTTAATGAATGGAATAGCATTGGCTCGATGTTGTTCA
TCAAAAGTCCTGCTAAATTCATCTAAGAAAAGGGGCATGTCATCTAGATGTAAAAATTTC
AAGATAGCCATTCTAAAAGCAAAATCAACAATCTCTAATTGTGAGTCAGACCCGTATTCA
ATGTCCGGTGGCTGAACGTCACCACCTGCAATATGCATTGGGAACTTATAATCCATGCCA
TCTTTGTCAACATTAGAAGGTAATACTTCTAACCTATAAGTCCAAATCTCATTGATGTAT
GCATTTACTAGTTTAACTACTCCTTGTAAGAAACCTAATAAATAGCGACCAAGAATACCA
CTTTTTGGTGATAATGCTTTTTCAAGAATAGCTAAATCAGTAGCCATTTGTTGTGCATGG
TTAACTTCTGATTCTAAAACTTTAATACGTTCTTCATGACGTTCCATTTCACTTAAACGA
CTATGCACACTAGATAGTTCTAAGTTAACAGCATCAATCTCTGCTTGGTATGCCTTATCT
ACAAAGTTATCAGCTGTATCCACTATCTTTTTAATAAACTGCTCCCATCGTTCAATAAAA
GAATGATACTTATCTTCCCATTCACGAATAGCATTACCAGCTTTATTGAAATGAGATGCT
TTTCTTTGTAAGTCAGCTGCTACATGTGTTTTATTATTAATTTCAGTTTCTAGTGCAGTT
GTACGTGCCTTAATGAACCCTAATGCATCTTGATCCATCTCAGCAATAACACGTAGTCGT
TGAGCTAATAAAGTAGCTTCCGCATGAGCTTGCTTAGAGACAATGAGTTGCTGCATTGCA
TCTCGCCAGTCTAATGCATCATTTATATATTTTGCTGGTGTGCGATACATTACGACATGT
TCAGCTACATAGTTCCATAATGTATCAAATTCGTTATACTCTTTCGTTAATTGAACGTAG
CCATGTACATAACTTACATATTCATTGAAGTCAGTCATGTACTGTTCAAGAACCTTGATC
TCATTTGAACAGCTATCCATCGCTTCATCTAACTTAGCTTTGCGCTCTTCTGCTATTGTG
ATATCTTGTTCACTAACACCAGGTTTAAATGAATGAGTGCATGATGGGCAAGTAATAGAC
GCACATTCCTTAAATGAATTTAGGCGTTGATTAATTTGTAAATACATGCCTTCCATGGTT
GAATATTTACTTTTTAATTCTTTTAGCCTTTCTGCATTTTTAATAGCAGTTTCTTTACTT
AAGTAACCATTCTCATTATTAGGGAATGTAGTGAGAAGTTTGATCCAACGATCTGAGAGA
TCAGTAAGTTTACCAGATGGATCACCGTTAACAGAAATGTCAACCAAAGGAAATCTACCG
GTATACTTTTTATATTTACTAATAGCTTCTTCAGCAATGCGTGTATGATGTTCATGTCTA
TCCTTAAGTTCTTGTATTTCTTCTGGAGACATACGTTCAGCTGTATTCGGATTAGAGCTT
TTTAATTCCTCTAATTCTTCAACTAAACGTGCAATAACTGCTTGTATAGATTTATATTCC
TCAATCTTCTTATTATTTAGTTCTAAGAATGATTCATACCCATCTACTTTAACTTGAATA
GGTAACATTGGAAATGACATTAACAATGAACGAGCTTCATCTAAGATAGAATCTAATTCT
TTACGTGCAGTAGTTTCATCTCTAAAATGAAGGACACCTTTCTTATCACGTGTTTTATAA
AGTAAATCAATACGGCTAACTAACCGTTGTTTCACTTCTTTCAACTGTGTCATTTCTGAA
TCATTCAATACCCCATGGTGTTCTGTGACCAATCGCTTATTAATTGTTTTAACAGTACCT
TGCTGGTTAGATAATTCTTTACGTACTTTGTTATAAACATTAAATGCATAATCAAGGTTA
ACTACAGACATTCTAGTTAACCATGCTTTACGTTCATTAGGTTTTAACTTTGTAAAACGC
ATCTTACCTGTCAACATTTCATGCAGTTCTCGGTTTAACCCGAAATGCGCCATTACAAGT
TCTTCTTGTTCTTTAAAGGTATGACCACTATTTAATTCTTCATCATTACATAAAAAGGAA
TGATGTCCAGTGCCACGGTTATATTTAGAAATTAATTTATAGTCTTTACCATTTGCATGA
CAATGGAAATGTTTCTCGCCACCTTGCTTGAAGTTTGAACTGCTAGATACAACAGGTGTC
AGTTCACTAATAATAGATGATTTGCCAGAACCATTACTACCAAGTATAACCATCATCTGT
TTGCTTGGAGTCCATTCAAAATAATGTGTATTATTGGCCATCAACCTAGTATAGCCAATT
AGCTTAAGTAGCTTGATCTGCATGATTAACCCTTAATAATGTCTTACTCTATAGAGTTAA
TAACCCTAGTAAATATTGGAGTTTATAATGGACGAAGCTGTGTCACTCTTATCAAATATG
CAAGATAGTGAAATACAAACATCAGAATTTAGGTTATGGAGCATTGGACGCGCTACTGAA
AATAAACCACGTAATTCATTTACACTAATGGTACTACCTATTGAGTCGGCAACTGCTACT
GATGGTGAAACAACATTCAACCCTGTTGAAGAAGTAGTTGATGGTGTAGATGCCGATGGT
AGGGCATATACTACTAAAGTTAGTGTATCGCGTGATATACCTTGTATATGGTTACCTAAT
GAAGATAACCGTGCAACGCCACCTGATGTAATGCGTGGTGAGAAAATTGCAATATACAGG
TTAGGTGATACTAGTCAATTCTATTGGCGGTCAATGGGTTTATCAAATGATTTAAGGACA
TTAGAATCTGTGGTGTACACTTTTAATGCGTCTTTATCTCCTGGTGGTGCCGGTAAGAAT
TTTGATACCTGTTATTTCATGCAGTTCTCAGCTCATGATAAACACGTAACTATTGGGACA
TCTAAAGCCAATGGCGAGCCTTATCGTTACTCGGTACAAATCAATACAGGTACAGGTGCA
GTCTATATACTTGATGATATTGGTAATAGGTTTGAATTGGTTTCTAAAGATAAACGACTG
ATGTTAATGAATGCTGATAATTCTTTTGTGAAAGTAGAGAAGAAAGCTATTGATTTGAAT
GCGGATCAATATATCAAATTGACATCAGGTGGTTCTACATTAGAATTAAATCCGACTGAA
TTTAAAGTTAACACAACCAATACTTCTATCAAATCAAGTGGTACACATGTTCAAGAAGCT
GGTGGAACTATGACACACAAAGCAAATGGCAACATGTTGTTTACTGCTCCACGCTATGAC
TTTACTTAAGAGGTTAATATGCCGGGAATAGCTGTTTGTAATATGGACAGTGCAGGTGGT
ATTATATTACCTGGTCCTAATGTTAAGTGTTTTTATAAAGGTCAGCCATTTGCCGTTATT
GGTTGTGCAGTAGCAGGTCATGGTAGGACTCCGCATGATTCAGCTAGGATGATTCAAGGT
TCAGTAAAGATGGCTATTACCGGTATACCTGTGTGTTTGCAAGGTAGTATGGCTAGTTGT
GGACACACAGCTACTGGTCGACCTGATCTTACTTGTGGTAGTTAAAGAACATAATGCCCT
CCCATTGCGGGAGGGATTATGCTGTTAAATACCTTCATTCTCATAGTGAGTAATGCAGTG
ACTAACAAATGTTAACCAGACTTTAAGAGTTACTGCTAACCAATGGGTGTAGTTACCAAC
AGGTTCTGCTAATTTTCGGGATATCTCAGCGAGCATATTAATTGCCTCGCCATTTGCCCT
TCCTAACAACTCACTACGTTCAGCTAGCTGTCGAATTGAATCATCTACAACTACCTTAAC
TGTTTTATATTCTACTTCGCCTTGCTTAGCACGTTCAGCGATCGTTAAAATATTAGCAAT
ACCAGTTACAATATCACTTAGTGTAGTTACAGAAGGTACTTCTATATCTCGTTCAGTGTT
ATCAATTGCATTGATTTGTAACTCTGTAAACTCCATCGTAAATGTATTGCGAACCATTTC
TAGTGCAGATTGTTTATTAGTAACTGATGTGGCTATATGGTCAGCATCAGTATAAACAAA
TGCACGATTAGCTGGTAAAATATAACTTCTATGGGTACCAGTAGAAGTAGTCTCACCTTT
CTTTAGTGGTTCATCCCCTGGCGGTGCTTTAAAATCACGACGCACGATATCGGCAAAAGA
TTGTAATAACTCATCAATGATTTCTGTAGTAGTATCTTCGCCTTGATTATCTAAGATATT
CAATGCCTGTCTACTAATATTTCGAGCAATATTAGAAGTCATTTTAGGGTAAGTCATTAA
AATATAATTAGTGACTTCTTTGATATCTAAAAGATTATCTGGTCGATCGCCAATGAATTC
ACCGTTAATAGATAGCCGCTGTAAACCAGAAACAGTCAGTCGAGTATTAGTCGTACGATT
ACCTAGTTTTGCAAGTCGCCTAGATAACTTTTGCTGTGTTTTACGCACATGTGAAATACT
GCCAGTAAACTTGACGTAGAATGCCGTAAGTGTTTCGATTACCATCCGCACAATATCACG
TGCAGCCTTAGCAGCTCGAACTAATGCATCTTTTAAAGCACGTAGTGTAATTATACCGCC
TTCTTTTATGGAGAAGGCGGGATCGATACTTTCTAAAGCAAATGTCATTTGCTTTAGACA
GGTCTTCAGATGCTACGTCACGTCCATCTAGCAGATCTTGATAACGAGCTAATCGATGGC
GATATGCTTCAACAGAAACAATAGCCTCTTTGAGTTCATTATTGGTAATTAATAGTTCTG
CATATGTGGACATTATGTTTACCTATTCAGTTTCCTTGATTTCACTATCAACTAGTTTCT
CAAGTACGGTGATCCAAATCATCACACATTTAAACAGATCATTACTAGCTTCAGTGGTGC
CAGTTAGATAAGCCTTACCGACATTAGTTGCTTCTTTATCAGTCATCTGTGCAATGATTT
CAGCAGTTGACTCTTTAGAGATACCGCGAATATTATTTAGATGATTTAGAAGGTTATGAA
CTGCTTTTAGCTGAGCCATAACAACATTCTTATCAACTAATAGTTCAACAGTAATTCCAT
AGTTGGGTTTACCCGGTGCATCAAGAATGGAGAAGTCTACCGCAGCTTTGTCTTTACCAA
AGGTATAAACACGATTACCGGGTACAACCGGACTAGCATAGCGAACACCATTAGCATTAA
TTTTGGTAGCTGTTCCAAACATACCTTTAGCTAAAGCCAGTGCTTTATCATCAGTTGTTT
TTCCAGCTAAGGCTGCTTTAAGAGCACGCAGTCCATTCTTTTCAATACTGTCAAATAGAT
TACGGATTACAGTGACCCCCTGAACAGGGTCTACACCCACCCAACTCTCACCAGTGTCAC
CTAGAATCAGATCGCGTGGAATTGCGATAGTACGAACTTCATCGGGTAGTTCATTCTCTT
TAACGCGTTTCATGATCTTATTAACGCGTTCTATTTGATTACTGACATTCTGGCGAATAC
GTTGATAAGTTTCTACAACAATGCGAATTAGCTTCTTAATGAAATCTAATGCAACAGTAG
ATACTTCTTTTGCTTTAGCTTGTAGATTATCTAATACTTCAATAGAAGCTTTAGGCCGAG
TTAGCGGTGATATAAAGGATTCCATTGATGGCACAGTGTTATTAAAATATTTATAGTCAA
ATGACTCTAGCGCGATGCTAATAGCTTTAGCTAGATCATGATCGACATCATGCCCGCGAT
GATGGCGGTTACTAACTAAACCAATATAGTTTTCTAATGCAGTTTGAACAGATTCTACTT
TAGTCAGTTCATTTACAATTGTAAACATTTCAACTGATAATGATTCTAGATGATCATCTA
GTTCACCAGTGATGATATCTTCAGTAGTTTCCAGTAGTGCGGTGGCATCATAGCCATGGT
CTAGCTGCTCAGTCTCATTGGCTTCCATAATAGAAATGTCTTCATTCGATGGGACATCTG
CAATTTGGTGTGGTTTTTTGGTACTAACATTAAGATCTTTAGTATCACTTACTTTAGTGA
TCATTTCATCAGCTGTTTCAGTGATTTCGTTTTCAACACGATCACCTTTAGCTACTTGGA
ATTCTTTTAGCCCTTGACTAACATGAATCTTCTTATCATTGATCTTATCAGCAGTTCCAT
CAACATCTGGACCTTTGCATACGTCAATTGGGGTATTGGTAACGACATTGGTAACTTCAT
CACATGGATTTACTTTACCATCTTCATCATCTTTTAATTGTTCTGGTAATTCTTTACCAA
CATCAAGATTGACATTCTTATCTTCAGCATCAGAAACGCGCTCAAGACTTGCAAAGAAAT
CCATTGCGGGAACTGTTTTTTTCTTAGCCATTTTAAAACTCCGGAGTATTAAAGTTCATA
AGGTTGTTAGGAGATAATACCATTCTCAATGAGAAGATTCTCTGCAATTGCTAACCTTTG
TGATAGACTTGTGTTATCTGCTTCTAACTTAACAATTCTAGCGTAATCAGTTTCACGATC
TTTGATTTTCGCTTCACGTGCATTTTCTGCTGCTTCGTGTTGTTGTGGTGTCACGTCTGA
CATAAGAGGCATTGACCCAAGATTTATAACAGGTTCTACTCCAATCACATCAGAAATAAC
ACCGGCTACTTTAGCTTGTAGATTAGTTAAGTCTAATGTTACTGGAAGAGCCCCTAGTGA
TGCGGATAGAACAGTTTGCTGGTATGGCACACCGTTCAAATCAGGATAACGTGCGATATA
ACTGCTTGGTACATATACCGGGTTATATTGTTCAGTCGTGAGAGTAACAATATATTCGCC
ATTCTCACGATCTTTATTGTACTCCGATATATCAATATTTAATGGTTTATAGTAAGTGTC
ATAAACATTTCTACCATTATTTTCAATATCGATAAATGCTCGTACAGCACTATTGACATA
AAGTGTATTGGGTTTTATGAGTTTGTCAAAAGGTGAAATTAACTCATAACGCCCTTTAGT
CCCAATTGGTGGGATCATTAGAGATTTTTTCTCAGTAGCCATTATAGACCCCAATAGGTT
AATTATTCATTCAATTGAGCACTATAGTTACTTTAAGACGAAATAATAGCGGATCTGCTT
TAAAGCAGATCCGCTTTAAATTAAAATGCTTGACCAGGACAAACCCAAATATAATCACCA
GTTGTTTGGCCATTAGGTCTGACTAATATAAATCTTTGTCCAACCGTACCGCGCACAGAA
GCATCTTCAAATGGAAAACCTCTAGGTATAACTAATTTACCATCTTTGTCTTGTGCCCAA
AAACTTAATGAGTTCCTAGTCTCTGCGCCATTAATAGGATCTTTTTCATAGAAACTTAAT
ACGAAAGTAAATCCATTCGGCAATGACGCATTGTATTTAATAACAGTGCCAATGAATGTA
GGCGTTGTCGGCGATGATACATATCCATCTTCTTCTTTAAAGATAATGTTAGTATCAAAA
TAATCTTTAACATCTAGTAGATTATAAATAACATCATCTCCATAAAGAGGGTGTTTCATT
TTTAATGGATATTTATTTATTGTTGTGTAAAATGCACCAGGAATGAAATTATCACATTTA
GATGTATCTGCCATGATTTACTCCTGTACATCCATCATTACACGTCCTTCAATAGACCAG
TATAATTCATTTTCTAATGAATTATAAACCGTTCTATATTCACATGCCTCACCTTTGTTT
AATTGACAGTCAACTTTGAGTACTCTGTTACCAACTAAACGATTACCATAAGCACGAATC
ACCAGTAATCCATTTGTCTTATTAGCAATAGTAAATACATATTTACCTTTTTTGGTATCA
TAAGCAGTAGCTGGTAAATTTACTATAAATGGACTATCTGAATTATCATTATCAGTATAA
TTAGGATCTTCAACGATAATGTGTGCATTAAGATAAGTTGAGTCAATATCAAACTTACGT
CCAGTTGCTTTAGACGTATCAATTACTTTCATAGGTGGGTAGATATAACAGAATTCACTC
ATGATTGCATCCACCATGATAGACCAAGTGTATACATCGCTTTAGTTGTTTCATTATAAC
AGATAAATCGAGTATAGCCATTATTAGGTAAGAAACCAGTACTTGTATACATTGGCCTAA
TGATACTCTGTTGATAAGCAGTGGCTATATCAACATCTTCATTAGTTAAATTCAGTATTC
GATATTCAGCACCAGCTTTAAGTTTCTCGCTATTACCAGAGGGCAGTATAACACCTTTAG
GTGACTCTACTATTTGAGCATCATCTGGTTTAGGCATTAGTACTAATAGTCTACCTATAG
CTTGGTCATAAGGTGGACAAATCCAATTACCAAATTTACCTGTTTCATTATCAACTGTAA
TTGTAAATGGTACAAGCAATTGCGGGAATATCTGATATCCATCTGTTGGTTCTGGATCAG
GATCTGGATCAGGGTCCGGCGGATCAGGGTCAACATCACCACCTGAATGTAACCATAGAT
TTAACCATCCTCTCCACCATAGTGACGAATCAATAGCTTTAAATAAAAAGTTTGGTTGTT
TCTTACCACCGGTATACGTTATATTAGATATTTCTAACCATATGTCACTAGCAGTAAAAT
TTAATTTAGCTTTATTAGCAACATACGCAACTAAAGCTTCGCTATTTTTTAACCCTTGAA
CAACCGTTACTTCTGATGCTGTCCAATATGGATTTTTAATATAATCATTAACATTAAAAC
GATTATAAAGAAAGTCGTAATAAACAGCACTATTAGTTGCATCTTTCTGAATGCGAACAA
ATGCCCTATTAGGCTCATCGATAGTTACACTATCCATTACCATTACAATAATGGACTTAT
CCTCAGATAAACCTAAATCCGGATATGCTGTTGTAACTGCTTTGAAGAAACCTATTCGTG
GATCTTGTCCACGCGGGTTATCCGCAAGATTAAGAGTGAATCTACGCATTGCACCACCTT
TAGATTAATATAAGAGAGGGCCTTTGCCCTCTCTCATTTATGCATTAACCAAATTGTTCT
ACACTCTTACGAGTTACAACCATGTAGTTAATATTCTTATAGACTTTAGCAGCATAGATA
ACATCATCACGGATCATTCGTGACATACCCATTGGTACTGTAGTGTAACGATCCATATCT
TCAGCAGCTTTCAATAGATCAGCAAAGACTAATAAGAATTCGCGTGTTTCAACACTAATC
CGGTTAATGTCTTCAGATGTGTTAGTAGCAATTATGTAATCTGGGAATACTTGAGAGAAC
TGGGTTAAATTATTACGGTTCTTTGCATTACCAATTACACTAAAACCAACAGAGCGATAA
ATATTGCAACTTAACTCATAGTGACTATCAAAGTAAGTTGTAGTATAACCACTACCGCGT
GCAGTACGACGCATTAAAGCGATCCTTTTACGTGGATCGATAATGGGACTATAGATACCG
CCTCGGAAATCTGAGTTCTCTAAAGCTAATTGATTCCAAAAAGGACAGATGATGAATTCA
GTTGTCCGAAAAAGTTCAGGTAGAATCTTCTCCCACTCCTCACGGGTATGGGCAGATCCA
TCTAATAACTCATCACAAATAGCATCTTTAATGATATCTAAGTTGTTACCAGCAACGCCG
TAAATGATCACAATCCAATAAGCTGGGAATTGCATCGTATCATCACGTGGATTATGATAA
TCAAATCGATAAGCGTTCTGGTACGTATATGGATACTGTGCACGTTTTGCTTGAACTTCT
TCAAGTTTGGTAGGTAGATCAAATTTATCTAGAAGTTTCTTAACTTCTAAAGGATCCTTA
AACCAATCGTCGTAGTTACCTTGTGCATTCTTACCAATAGGGTGAACCACCTCAATTTTA
AATTCATCATACTGACCAGCAAATGCATCATCCGCTAACCAAACACGAATTAAGTTAGGT
TCATTACCTGTAACGATAAGTGAAAATTCAATATATTCTGGTAAATATAAACGTGTATTC
ATATTACCAATAGGACCAGAACGCACCGTACTTAGCTTACCATTAAACTCAGTCATGAGC
ATTTGGTTAACTTGAGTTGGGGTGGTGTTCTTTCCAATAGTGCCTGAATTTCCTTGCTTC
AGTAGGAACTCACCAATCTTTAAAACCTGTAACTGATACTCAGCTGTAATGTCAACAGGA
ATTTCGTCCCTTACGCTATGAAAAGCAATAAAAGCCGTTGATGGTGTAGACTCACTGGTC
AGGATTTTCTTGTCTTTTGCATAGGTTGCACTGTTATCCGAGATCTCACCAAATTTTGCT
ACTTTATCGGTAGCATTATCAATGAGACTAGGATACTCGTAAAAACCTTTCAAGTTGTAC
ATGAATTAATCCTCATAATTAGAGCGCGATGGGTTTCCATCTATAAAATCAGTCTGTTCT
AGTTGTGTTAAAATAAAAAGTCTGGTATTATGAGCTTTACGTAATACCCTTGTAACAGTC
TATTGATAGAAATGCCAATACTGGCTTTTATGGGTAGGCATAGTACTAACAGAGGTCATC
ATGCTCGGTTTGACTATTAAAGCCTTGCTCTTCGTTTGGCCATTCCTTAAGAGGGCTATC
TTTGGTGATAGAACAATTAAGGAAGTGTTGCTGGAAAACAAACATGTCACGGCAATGTTA
ATCCTAGTTGTAATATTACTAGGTACCTTATTCATAGTGACTAGTGAGTTGAAGTCAGTT
AAAGCAAGCAACTGGGCCGTTAAAGCCGAAATGGATCGACTCAAGAAAATGACGCCTGAG
AAGGCTGAAATGCTTGAGCGCCGCCGTCGTTTAAATGACTTGCTAAAGTAAGTACCAAAT
TGGTGGATCACATGTCAAGAAAGTTCTTTCTAATACTCCTACCACTTATCAGTGGCTGTG
TTTATACGCCACATGAGTACCACACGCACAACACGACTGTGGTCCAATATGAGCACTCCT
CTTCTACAGATGATCATACATCTGTTGTTACAACTAAAGAAGAGGTAATACAAAAAGTTC
TGCCTACACCTAAAAAATATAGTAAGGATACTAGTAAGAAGTGTATGGTTTTCGAACTAC
CAAGAAAGAAACCGGTACCGCCAACACCGATTATTACAGAGTTTATAGAAACTCCGGAAC
AAATCGATATCTTGTTGACTGACTATATAAAAGAATTAAAGTCACATATTGTATCTGAGC
GCGCTAAAATTGAGCAAGCATATGAAGAATGGCGTGCAAAGTGTGATGAGTAATTTACTT
GATAGAATTATTATCTAGTTTAGTAATCGATCACATGAGGAAACAATAATGTCAGACGGT
ATGGTTTTATACACTGACGGATCATTCCGACAGGGTAAAGCTGGTTGGGGTATTCATGGT
TATACCTATGAAAATGTTGCAATGAAATCTAAAGCAGCCACCAAACAGCAACCAACAGCT
AAGGGATACTTAGATGTAGGTGCAGATGAGACATGCACTGTTTTAAATTATATTGATGCA
TTTGGTAGTGTAACTAATAACCCTACTAATAATACAGGTGAGCTAACCGCTGCGATTGAG
GCTTTCAAAATAGCCCATGAAGCAGATGCTCCTAGACTAACGATGCTCATGGATAGTGAA
TACGTTAGAAAAGGTATGACCGCATATTTACCCAAATGGATTAAGTCTAATTGGATTAAA
TCAGACGGCACGCCGGTAGCAAACCAGGACCTATGGAAACAGATGGTCGAACTAAAAGCT
AAATGGGAAGAAACTAATAAACCATTAAGCATCCAATGGGTCCGTGGACATAACGGAGAC
ATTGGTAATGAAAAAGCTGATGCTAACGCTAAGCTTGGTTCGGGACAGAATAATGATAAG
CCAGTGATGGTTTCGGTTAAAGGCGAGGAAATTAACAAACTTAAAAAACAAGTTGTTAAT
CCACTTATCCTCGAAAGTAGGTTACTCTTCGCCATTAACTCTGGAGAAGAACCAGATGGG
TTCTATTACACCTATAACTTAGGTCGTATGCATAACTATGGTCATAAACCAAAAGACACT
GCTAAAGATAAATTAGCTAAAGCTGATTTAATTTTAGGGCGTCGTATCTCTGAAGCAACC
TTCAGTGTATATAAGGCAAATGAACCAGATGAGTATCTCCAGTTACTAATTAATATGCAT
ACAGAAGCACTGGGTACTGAAAATCCAGAACTGGGTATCATCAATTTGGCAAACGCATAT
CGTGCAACCATTCGACAGAAAATTGAATCCATGGGGCTACCTGCTCTAGTCGTATGGAAA
GATATCAATGTTTTGTCGACGCCAACAGATGAACTCATTAGTCGGACTCTTAATCCACCA
CGTATGGCAAATGATGCTGTAGCTACATTTAATGTTATGCGCAGTCGTCTTGAAGATTAC
TTGGCTGGTAAACTTGGAGAGTCGGTTGGTATTATTGATATTACCGAGCACTTCTTCGAG
GAAGTCGCAAAGGGTAAGAAAGTTGGCTATCAACTACTTAAGACGATTACATCTAATACA
GGCTTTGTAGAAGTTCCGATCACATTTAAAGATCGTAAGATAAAATTAAAGCTTGTATTA
AATATCGATATTCCAAGTAGAAACCAATTAGCTCGTATTGGAGCTAATAAAGTTAAAATG
GAAATTCTTGTAGTAGCTGAAGGCCCATATTCTTATTCATATTCAATTGTGTTCGTGACG
GATGATGGTTCAGCTATCTATCAATCACCCTATACACAATTTATTCTCCCAAAATAGTGG
GTATTCCATGAACCTTATTAGCAGATTCAAAAAGTCGGTTAAGAATGGTTTCAGGGCAAT
TTGGATTAAGCTCTGGGACTATGCTGATCCCGAACTAAAGCGGATGTGCGTCATGGCGTC
ACTGTACTCCGTTATAGTACAGTGTAAGACAAATGAGTGTGAAAAGATCTCTCATTTGAA
TTCTAACATGAAACTAGTACGCGATGAAGCTGCCTTACGACTCCCAATTCATTATGGGCC
GTACGTATGGAAAGGCGTGATAGCAATCGATAAGATTGATAAAGCAGATCTAACCACTGA
TCAATTTTTCATGAGGCTTATTCGTAAGACTCCGTGTTGGATGAAATATGCTGATGATGC
AACTTTTTTAAAGGATTTGAAAACTCTCTTTAAATTAAGTTTACATGAGAAGTGTATTCC
AAATTGATTGGTACGACATAATGCCCTCTCCTTTTGGGAGAGGGCTTATGCTGTTATCCA
ATGATTTCACGAAGAATATCTTCAGTGGCTTTCATTGTGTTCGCAGTCTCAACAATCTTA
GTAAAGAGTGTTGAATAACGTTCAACATGGTCTGCTGCCCATGTAACCCCTTCAATTAAT
GTCTGTAATAGCTCTGGAGAGGTGTCAGAGTTACTATCCATAACATCCTCCATAAAGCTA
TCAATTAATTGACTAAGCGCTTCTGAAGCACGTTTTACATCATTTGGACGAACCCGTGAT
AAAATGCTACGAATATCGTTCATTTTCTTTGTTGCGTCAACAAATGAATTTAATGATGGG
TAAAGCTTACCAAACTCAGCTGTACTTGACCGGTTGTCACTGTCATAGAAAGAAGCATCT
TTAGCAAGATCATTGATCGATGCCATTGCAAATGAATTAGCAAAGCCACGCTTATCCATT
CGATCAGCACGCTGTTGTAGATAATATCCAAGTTGTGCTTTAACCGGGTCTAATACCGCT
GGAATAATAGTGGCCATTTCCTTAGCTTCTGTTAATAGATAATCAACATAGTCTGGAATC
TCACCATTAAAACCAACTGGTTGTGGCACGATTGTATTTGCTACTTCTAAATAATCAATG
TGTGAAACTAAATGGCGCATCTGCGCTGGATGGAACTCAGGAATAATTTGATTACTCCAG
TTAGTCATCGACGTAAATGCATTACGAGCAGCGATAGCAAAATTAGCACCGCGTTTATTG
ATAATGTTAATAGCGTTTGTTGCGAAATTAGCTTCTTGAGAAATAGTCTCAGTAATATCT
ACAAGCTGTTGTTTTGGATCAACTTGTACTAAACTAATATCATCATTAACAATATTGTCA
GATTCAATTAGATCCTGACAATCATTTTCTAGTGAAATACTTTTAGCGTATTTATGGATG
TTAAACATGTCTTAATTTCCTTGCGCAAGGATTGTTGAATATGTAGACATAAAATTACTC
TCCAAATCAATTAATTGACTGTTTAACTTAAAAAATGGAGTCAACATGTTTGGTAAACAT
TTCGAACGTCCAGCTTTCCGACCGGCTCTTAACATCGGATGCCTTATGGACATTTCAACT
GGTAAGTATGAACAAGGTAAGCATGGTGAAATGATTCTAAATGGTGGTATGGGATCACTA
ACTGGTATTGCTTCACGACCTAACAATTTTAAAACTGCATTAGGTATCTACCTCATGGCA
ATGATGCGCCGTGCTTTCCCCGGTGCACATGCAATGACTTATGATACAGAAGGTACATTA
AACCCAGGTGCTCGATTTACATCTTTAGCACAAGCTTATCCTGAGCTTGCTGCCATCGAT
TGGGAAAATGATGAGCAATACATGTTTACTGACTTATCTCGTTATACTGGGGATGAGTGG
TTCAAAATCTTCCGAGATGCATTATCTGAAAAAGAGAAAGCTGAAAAAGATTATCTACGC
ACTACCCCATTTCTTGATGTGAATGGTAATAATAAGAAAGCACTGTACCCAACTGGTGGG
TTCATTGATAGTTTCTCAAAGTTCATTGTCTCAGCTGTGTCTGAAATGTATGCTAAAAAT
GCTATCGGTGATTCTAAAGTAAACACTGATGCAATGACTAATGGTAAAGCTAAGAATCAG
TTATTTAACCAACTGCCACAGATCTGTGCTAAAACCAGTACATACATGATTCTCACTGCA
CACGTTGGAGATATCATTCAAATTGAGATGTACCCTACTGATAAACGTAATCTATCGCAT
ATGAAGAAGGATACGGTTCTTAAAGGGGTATCAGGTGGTTTCTACTCTTTACCGAATAAT
GTGTTTTCTATTGAATCTAATAAACCGTTAGTCAATAAAGAAAAAATGCCTTTATATCCA
ATTGACAATTCAACTGCTATTGAAGGCGATACAGATCTACGCATTCTAGAAGTTATTAAC
CTACGTGGTAAAGGTGGAATTACTGGTCTACCATTCCATCTCATTGTTTCACAGACTGAA
GGTATTCTTCCATCACTATCGGAATTCCATTATTGCCGTGAAAATGATTGGGGGATTGGT
GGTAATAACATTAACTACTTCGTTGAGCTATGTCCTGATATCAAACTAAGTCGAACCACT
GTTCGTAAGAAATTGATGGATAACCCTGCTCTACAACGAGCTGTTGAAATCCAATCTGAA
ATGCTACAATTAATTCAATTCCAACGTTGGAATCTTGGAGATTATGTAGTAACTCCAGCT
GAACTATATGCTGATCTTAAAGTAATGGGTTATGATTGGGATATTATTCTTAATAATACT
CGTGGCTATTGGATGTTCGAAGAAGACGAACAATTTAGTGATAAAAAATTCCTATCCACG
TATGACCTACTACGCATGCGTAAAAGTGAATATAAACCATACTGGATGACTGACGAAGAA
AAAGCTAAAATTGTACCTCTTGAACTAGCTAAAGCAAAAGCTTAATGTTAGTATAGATGT
TATCGCCAGTTTTAAAATAACTAGGGGTCAATAAGATCCCTAGTTATGTCAGGTTTGGTA
TATGAATGTTTACACTTATCAGATAGCTAAATATAAGTTAGTTATAGAGAAAGGAATAAA
ACCGCTAGACATAACTGTTAAATCAGGTGCATATCAACTCGCACCTACGTGGTTAATGGT
TATGGGACATAAGAAAGGAATTATATCAAGTGATGAATACACTGAAGCATATCTCAGTAT
GTTAGAGCAATCATTGATTGATAATCCAGAATTCTTTAAATGGTTCTTCCAATTAGAGGA
AGTAGCATTAGGTTGTTATTGTCGCGCTGGTAATTTCTGTCACCGGCATTTATTAGTAGA
ATGGCTTGAAACAAAAACAGAGGTCATTTACTGTGGTGAGATATCAAAGTAAAATAAAGA
CCCTAAGGAACTATAATGAAAACTACAGAAGATTATCGTTTAACACTTTGTCAACGTCTA
CGAATGTTTGATGTTGAACTATCAGAAGATCTATTACGTCGATTACCAGTGTGTACAGAC
GTACCCACTTTATCAGCTTGCTTTCAGCAACTATTAGCTCAATATCCTAGTCAGACATTG
ACAGCTAGAACTACCATTGATGATTCAGTCACCTTTGAAGTATGGTATGCTAATTTTCTA
GCCAACATATTACCAATTCTTAAGAGACATAGGTTACCTCCATGTACTGACCAGAATTCA
ATACCTGTTTATCAAGGGGTATCTCGCTCAAGCTAATGGTATGTTAAACAACCTTAAAGG
AAATTACCATGACTAAACGAGAATTGGTAGAAAAAGAATGCCTATGGATTATTGACATGT
TTCTACCTGGTAGTAGTAATGTTGATATCTATAAAGAAATGTTTGCGCGAATGAATGATG
AGGAATTTGAGGAGTGGATTAATAAGTTAGATTCTGGTGAAGAGATGTTGGCGTTATATG
CTCCTAACTTATGCACTAAGCCTAAATTAACCATTAAGCGAAATTATAAAGTTGCTAAAG
CGATTGGTCATAATTTATTCCAACACATCATTTTAACTGATCCAGGTACTGGCCAGGTAT
ATCGAACTGCTAATAAACATTTAGTTGGTTTAATACCAATCCGTCGTCAAGTACAGATGC
TTGAGAAAAAGAAAAGTATTCCGGGTTCTAGTCATGTGATTGACCAGAGGTCAGGGCAAG
TAACTGGTGATTCTAAAGGATCACGTATGTCTGCACCAGAGATTCAAGTTAACGCTTCAA
AAGGTCTCCGTTATTCCATGATCGAATTCATGAAATTACGTGGTGGTGACCAGAAGGCAT
ATAATGCAATGAACCGCTCTATTATCGAAACTGGTAGTGCTTCTGTTGATTCCATCATGT
CCACTTATGATGCTACTGTGCAATCTAATAAAACATTTGCATGTTATCTAAAAGGCATGA
TGCTACAAAATAACTTGGTGTAACTATGAATAATCGTCAGATTTATGAAGATATGTGCGA
AGCTTTAATTGTATCTAATACTGAGTTAGTAAATGGATACAGTGCTGAAATCATTGCGGA
TATTTTGGATTTACTAAATAACTGGAGTACCAATACTCATTGGTATCACATTGCTGATAA
AACAGTTATTAGGGATATCTGGAATTTATTCCGTAATAAAGGTAATCGTCTTCAACCTAT
CTTAAGTTTAGTTAGCCGATTTAAGATGGCTGTTAATGATTGGGAAGATGTGGTGGAATT
ACTAGCTAATTCTATTTATCCTTATCAGCCTAATTCAACTATTGTTGACCAAGAAATGTT
AGCGCGATTAATTCCACGAAAAGAATTAACTGACATTTTATACCAAAATGATTGGTTAGT
TTGGATTATTTGCCAATGTTTAAATATCCGTTATATTACTAATATGGTTGAATCTATCCC
AGTTCAAGCTAAGCCATCTAAAAAGAAGGCGGTAAATAATAATGTTTCGTAAAATCTTAA
TTGATCTTGACTCACTATTAGATACACGGTTAGGAACTATTAGGTTACTAAATAAAGATG
CAGCTAATAAGCTTGTTACTAATGGTCAAATTTATTGGCATAGGGAAATGGATGATTGGA
CTAAACTAACAGATGGTTTAGTAACTAATGAACAATTTGTCGAAGCTTATTCTAAACGTG
GTGGTGAAAATACTGCTGATACTATCAATAGTTCTATATTCACTGGTATCATTCCATTTA
TTATTCAATTAATAGCCCAATCAGATTTGAATAGATTAGATGGTATAGTTAATGCTAATT
TTGAAACATGTCTTGAAGTTAATATCTGGCCATATGAATTAACACCAGATGCTCAAGATG
AATTACTATACTGCTTACATAAGTACATAGGTGATCATATTCAGATCACCCTGATTAATA
CTCCATTAACAGATCTTACTTGTTCTAGATTAAACTCTATCTATTCAATGGCGATTATGT
ATAATTTTGGAGAATGGTGTAAAACCCATGTTCTTGAATTAGGACAAGTGTTGATGCCTG
ACTTTACGATTATTGGTCCAAAGCTATTTGAGAAAGATGTAAGTGAATTAGCTGTTGAAG
ATAAACAGTTTATTATCATGGATTTCCAGTTAAAGCATAAACTTAATATCGACTTTGATT
TCATCGATGCTGAATACTTTTCCATGTTTAAGCCATGATACCCAATAGAAAGCTCTAATA
GGGCTTTCTATGCTTTTTTTAGATATAACTGGCATGATGGTATAGTTAATAATAAATCAA
CCTTAAAAGACAAAATAAAGCCCTCCCCGAAGGGAGGGCAATATGTCGTTTTAAATAACA
GCACCTTTGGAAACTACCCAATTAGTACCGTCCCATAGGAGAGTAAGAATTGTTTTAGTA
TCGCCTAGGTCATCTACTATTAATGGAGTACCATTGTTCCACTGTAGCACTGCACTAGAT
AGTGTTGGCATAGCTACCTTACCAAGTAGTACAAGAACAGCCGTTACCATACGATCAACA
GGTCCATTCTCTAGTGTAATGGTTTGGTTAGCAGCAGTTTGAACCCTATAGCACTGTTGG
TTAGCTGGTGTTAGAGTTAAAGCTGTACCAGTGAATGTACTTGATTTTAGACTATATGCA
TCGAATGATTTATCTAGCTTCTTCCAAGTAATATTAGTACCAGTACGGCTACGTACCCAA
TCACCATCAGCGGTTACATCATTATTCGGACCTTGGAATAGAGTCCATGATTTAGCCGCA
GCATTACGTAGGAATAGTTGTCCACTAGTAGCATCAGCTTGATCAACTATAATAGTTACA
GGTGTCCATTTAGAACCACTAGCTGTTTTCTCACGTACATAGTTAGTGCCAGTAGCACCT
TCACTAGGTACTTCACCAATAACTGCGGCTGGTACAGCTACCCATTCACCATTTTGCATA
CCCATCAGAGTATCATCGGTTTGCAGAGGTGCTACATCAACCCAGTTACCAGCTACACGA
CCTTGAGGCTTAGTAGCTTGTGCAGTATCGCGTACTACATCTGAAGGAATTTCTGGGAAT
GTAATGGTAGCCCATTCAGTTTCACCACCTGCAATACCTTTACGAACGTATTGTGCATTG
ACAGTTGGATTAGGTACAGCATCAATGGCAGGTGTTGGTAATTCAATAGCAGTCCATTCA
ACAGCCCCATCAGCGGTTGCTTTACGGCGACCATAGAAAACACCAACCTCGGCATTGGGT
ACTTCATCAACAGGTAGTTCAGTCCAGCCGAGTTTGTACCGAACCATTTTCTTATCGACA
TCTTCTGGATCGACTTCACTAACTGGAACGGACATTAGTTTGTAGAATACAACCCAGTTA
GCATCTTTATACCAGACAGTGCCAGTTTTGTCGATACACCAGTCACCACGGTTACCATCG
ATAGATGTAGGCGCAGTTTGACCTTCAGGTAGAATTACCCAAGAGGATCCACGTTCACCT
TTCTGACCGGTTTTACCAGGCATACCTGGAACACCTTGCTTGCCCTCAGGACCTTCAGGA
CCCTGCGGACCCATAGCTAGGACACCTAGGCTTTCCCAAGTAAATGTACCTTCAGTATCG
ATACTTACAAATACTTCTACTTGTCCTTCAGTATTGGTGTGAATGGCAATACCTTTACCT
ACGTTATCAGCAGATGCTACTGGTTTACCAGCATCATCACCAACGTAGATAATTAATAGA
CCACCACCTTGTTTACCTTCAGGACCTTGTGGACCTTCGACACCCTGGATACCCTGCTCA
CCATTTAGATTAATTGGGCCGATATAGCCATCAATTTCCTGACCTTGGTAAGTATAGAGC
ATTGTACCTTCATTAGTTTCAACCCAGTATGAATCACCAGTTACTAAGTCAGGATCAGTG
TCTTTCTTTGGTAGTTGTGAAGCATCAGTTAAAACACCTTTGATGTTTAAACCTTCACCC
GGTTTACCTTGCGGACCTGCCATAATACCAACGCTAGTCCAGCGACTACCGTCCATGTTA
ACAAATACTTCGCCCGTGGACTTAACAGTATATGCTTTCCATTGGTTATCAGCAAGTGCC
TCTGGTGGGGTATCTTCAGGAGTGTCAATCGCTGCGATGATCTGGATAGGTTCACCAGCG
GGACCTTGTGGGCCTTCTGGGCCCTCGGGACCTTCTGGACCCTGATCACCGTCTTTACCA
GGTGCGCCATCTTCACCTTTAGGACCTCGATGTGTACCACTATTTACCCAATTACCATCT
ATCTTAACAAATAAGGTAGATGTGTCTTGTGTGAAGTACGCTGCCTGATCAGGAGCATCT
GCCGGTAGGGCTGCCTCATTGGCAACAGCACCAGTAATAACTACGTTCTTACCATGTAGA
CTGATTAACCATTCACCCTCAGTACCAGTGAACCCATTGTCCAATGCTACTTGGAAAGCC
GATTTACCTTGTGCCCCTGGTTCACCAGGTATACCTTGATCACCATCTTTACCTTGTGGG
CCTTCTGGGCCCTGCGGACCACGGAATGAACCCATGGCTGTCCATGAGATATCAACAGTC
GGATCTTGGCCAGTCAGTACATAAACCGTATTGGTGGAACGTACTGAAACACCTTGGTAT
TGTTCTACACCAGTAGTGGTTAATAGATCATCAGCAGTTTCAACTGCTTTAACTACTTCT
AAGTTACGACCTTGTGGACCAGGTTCACCTTGTTTACCATCGGGACCCGGATCACCTGTA
TTACCTGGTTTACCTTGTGGGCCCTCAGGACCTTGGAAAGTACCTAGGTCTGACCACGCT
CCTTTTACAAAGATGAATAGATGTTCTGGTTTGCCAGCTTCCATAGTAACTAAGTATGCT
TCTGATTCTTTAGCTACAGATGGATCAGGTAAATCAGCTGGTGATGGTAGTGAATCCTTA
ATGGTGAATGGCATTGCTGGTTCACCCTGAGGACCTTCAGGACCAATTTCACCGTCTTTA
CCTTGAGGACCCTCGGGGCCCTCAGGTCCACGTTCACCCTGTGGTGTAACTGGGAACCAA
TCATAGTCATCAATAGTTGGATTCTCTGGCGGATTATTACCTGAGATAAGCATCCACGCC
CAGAGTTGATTATTCCATGAATAAGCATCTCCAGGTTTATTACTTTCAGTCTTAGGTAAT
TCTAAGTTATTAGGCCAACGACCACGGATAACTAGACCAGTACCATCTGGACCACGAAGT
GAACCTGTTTCAACCCAACGACCTTTTACAGGGGGATCTTCGTTACCTAGCGGTGATTCC
CATACCCATAGCCGATCTTCAACGAACCAAGCATCACCGACATTATGCGTATCTAATGGT
TTAATTTCTTGTTCGAATGTGGCTAGATCAACATTAGCGATAATATTGATAGCTGGACCA
ACCGGGCCAGGAGGGCCTTGGTCGCCATCTTTACCCGGCTGACCGTCTTCACCCTTTAAT
CCAGGTATAGTAACAGGATCAACGAAAGTGGTATTAAGACCCACCCCGGTAGAAACCGGG
ATGTGTCCATTAACTACAGAAGTGGGTTCATCAATTGATGATACCCGTTTGGGGAGTTCC
CCGTTTACATAATCTTCAAATGCAGAAGCCATTATACTACTTCCTCAAGTTCGATTTTCA
TCAGTCCAGTGGTGTTGGATACAGCGTTTGCTGAGTCACAGTTATACCACTTATTGCCAT
CCTTGATGGTGTAGGTGTCAACTTGATTTGCATCATCCGCCTTATAAGTGAAGTTTAAGC
TACCAGTAGAACCTTTAGATAGGTTACTGCAACGTAGTTTACCAGTATTGGTTACTTCAG
TACCAATATCAGTTTCACGGTTAGGCCAAGCAGCTACACTTAGAGTGCGGAATACAAATC
CACCTAGTACGTAAGTACCACCATTTACACTATTAGCTTCAACACCAGCTAAACCTTTTA
GAACCACGCTGTTAAAATCGTAGGTTCCTTTAGGATCATCGTCATGTACTAGTAACGCAC
GTGTCCATACCTTACCAGTGGCATCAGATTTCCAATCCTCAGTAGCCCACTTACCGCCAG
GCGCATTCATGGCCGGAGCTGCACTTAGTTTCTGAGTAGAGGTTAAAGTAATGACATGAC
TTTGTACTTGGGTTCCAAAGTTACCGCCTGAACGAAGGCGAGCAGCAGGGTAGGTAACCG
TCGCAGTAGGTGCCGCATTTGCAATAGCTACAACAGCAGTAGCCGTAGCTACACTACCAT
TAGCTGCACGTTTAGCAGTAATTAATAGGTTATTAGTGCTGTCGTTATAAGTACCTGACT
TATAAGTAACTACCTTAGCAATTTCTGCTTCATTTGCACTGGTTATAGTGAGCTGATCAT
TTGGTGAGGAATAAACCACACTATCAGCATTAGATACTGTATTGGCAACAGTAGCAGTTT
CACCTACTTTAATAGCACTTTGACCAGACGGATAAGTTACTTGACCAATATTAACAACTG
GGCGAAGATCATTTAACTGCATGGTGTTAATTTTATCTTCGGAACCAGCATCACTGGAAG
TAAACCATTCTGACCATGACCCAGTTGATTTCTGAACACGTACACGGAAACCATATGCCT
TAGTAGTATTACCACGATCAGCTACGTAAAGACCAGTAACCTCTAGTTCTTTAGTAGGTG
CAACAGTACCACTACTTTCTTTCAGTGCACCAAAGTCAGCAATTTCGTACGCTACTATAT
TTTCATCAGTAACAACTTTAATTGCAACAAGGTCATCTTCTTTAAGTTCTGTTTGACCTA
ACGGATAACCGCCAGTAAATACAGCACTAGTAATATTAGCGGGAGTATCGGCTAATACCT
TAGTAGTAAATTTAGCCCCATCGGCGTGTTCTACAACAATATCAGCATAACCTTCAGTAG
TAGGTGCACCAAGGTCAATATTGGCAGTAGCAATCCACATAGGTGGATTAACGCCAGGAG
TTACAACTGCATCTACATTATTGATTTTAACGCTAGGTACATAACTAGAATGTCCAGTTA
TTGCATCAACGATAACCCGAACATTACTAGTAGTTGATAGACATGACTGTACGCTGTGTC
CATCAGGGGTACGCACAATACTACCTACGTTCTGACTGGGATCAGTTGCTTGTACATCTT
TGACGAATACACCGCCACTAATACCTTCATTTTTAGGAAGGTTCTTAAGGTCAACGGTTG
TTTCATCAACGCCTTCAACAATACGGATATTGCCGTCATTCTTGAATGCAATGTAATCAG
TTAAACTACCAATCTGGAATTCACCATTGTCATAAATACGAATTTCAGACTCAGGTAATT
CGGGTAATGCGCCTTGCGTAGTGGGTGCAGAAGCGTTCTTTAGATAAGAATAACCTTCTG
CTTCCATACGACCTTGTTCCATCATACGCTGAGGTACTTTATCACCAGCAGTTAAGTCGT
CTTGATTTAGACGCTTATCAAACAGGAAAGCAAAGTTATGGAAAGCAGCGTTGGATGATA
ATCCACCATTCTTACCAGTTACACGAAGTACATCTTTAACTGTATAACCTTGTTGATTTA
AGAGTGTCTGGAGTAGTTCAGCAGTCATGGTTGCATGCAGTGATGTTAACCATTCCTGTT
CAGTACCTTGGAAACCATTTTCCACAGCTACTTCATATGCACTCTTACCAGCATCACCTT
TAAGGGATGCTATAAACTCTTCTTCAGTACCAACGAAACCTAGATCGACTGCGATTTGAT
AAGAAGATTTACCTTTGAGCGAATCAAGCCATTCGGTTTCAGTTCCCTGGAAACCATTTT
TAACGGCAATCTCGTACGCACTAAGACCGGGTGCCCCAGTCTGTAGTTTTGACAGCAGAA
ACTTATAGTTATCGACTTGACCAGCTGCATCGGTATGAATTAATTCAATATACTCGCTAT
CGTTAAGAGTAGCTAGATCCGGCAGTTGACTGATCTTGCCTTTGTCTGTAGCATTTGCCA
TTTTTATTTCCTTGCTGTATAAGAAACACTAACATGTTAGTCTTTCGAAGAAGACTCATA
CAGTAATGTACTATTGCTAATGAGTAATATTTTAACAACATAAGAGAGTCCCGAAGGACT
CTCAAAAAGTTACATTGACACAAGATGTGGTTTATCATGAGGGGAAGTTTCACATGATAC
CATAGACTCCATTCTATTGCTACATCTTATTTTCTATGTGCTGCAACTTTACCATCCATT
AGGTTATAAACTTCTTGAATGGTTTTAGGTGACCCATCTTTGTTATAAAAAATAGATGGG
TTTGCCTGAGCTTCTTTTGGGAAATGGGTAGCCGCTAATTCATTCTGACCAGTGGTCAGG
AAACGACGGGCTGCACCAGGTCCAAAGAAGTGAGCTAAATAAAGATCAGTATCAGTTGGT
TCACGTTTAAGGACAGGACGAAGAATATTCATATTCTCTTTAATTAGTTCGGCACCCATT
AAAGCACTTATACGTGGATCTTTACGTAATGCACCTGTTGGATCAGTAATAACGCCATAC
TTCATGCCATAATTTTCAATCATTGTTTTCCATGTTCCAGTAAGGAATTGGAACCAACCA
GTAGCTGATGAAGTCTTAGCTTTTATTTCGTAATCGAATGCTGATTCAATAGAAGCAAAT
GTTAATAGCAACTGGCTACGAACACCAGTAGCATTTTCTACTGCATTCATAACTGGAGTT
GCAGCTGCACGTGATTTATTTGCAGTTGGCATAGGGATAGTTTTATAAGGAATAGGTGGG
GAATATTTACTGAATAATTCAGCCCAAGTATTCTTACCTACAATACCATCACTATCTAGA
CAATTATCTTTTTGAAATTTAACCACCTGATTAAAGGTGTTATTTCCAAAAATACCATCT
GGCTTTCCAACATCATAGCCACATAAATTTAAAAGTGTCTGGAGTTGACATACCTCATCA
CCCCTATCGCCTTTGCGTAATACTTTCATGATATAACCTCTACATATTAACCCAGTATGA
ACCCTGGGTTAGGTTCATTGAGGGTATTACTTAACTTTCTAGATAACGGAGTTGACCATT
TTCTAGATAACGTGCTGCACCATTCTCTAATAGTCGGATAGTATCTGACGTATCATTAAT
ACGTTGAATTAGTATATTACATTCACCATAGTAAGCATAACTACTCGACATAGCTACTAT
CGTGTATGGAACAATATCCGTAGTTGCATTGATTGGTGTTGTATCAAATGAAATATCATC
TGGTCCAAGCTTCCAACCTCGTGAACGGTTAATTTCTTCAGCAATTGCTTTAGGTGTTAA
AGTACCAACTATCTTAAGGATAGATCCTTCACCAATAGCACGTGGATCAGCAAAATCTAA
CCGACGGTAAGTTAACATGTACTTAATGCCAGTAGTAATGTCGATCATTTCAATAAATGT
ACGTCCAGGCTCAATCGTGGTTGGACTAAAAAACATATCTTCAAATGTAACTGTTTCTGG
TTTGAAGTTTATTTTTAAATCATCCCGCGCAAGTTTTACTAGCGCGTCCCTCGATGCCAT
GTCATACGGAAAGATATCCTGCATGTCAAACCTCTATAGTGGTAAAATGTTTAATCCACA
TAGCATTATAAAGCCTTCCTCTTGAAGAGGAAGGCTATTATAGTTTTTATTGCATAAGCA
TCTTTATTAATTCAAAGGTACCTTGCACAATAGTCTTTAACACATTGGCACTTTCTTCTG
ACATAGGTGCACCAGATAAAACTACCATAGTAGATACTGATGCCCCAATAAGAGTAACGC
CACCAGCTAATACCAATACCGCATTACGGTAAGAATCTTTAGCCTTCACTTCAGCAATTT
CCCGGCTGAGAATTTTATATTGAAGATCTGAATCGGTAATAGCATAAATTAGACTAAGTA
CTTCCTCACCAGTTATACTTAGATTTATACGTTGTTCCTTTTCCAATACACTATTCAAAT
AGGTACGTATCTTCTTTCCATAGTCTTTAGAAGAAGATAAAGGATTACCATCGATCTCAA
TCAGAACGTCCTCTAGGGTCATGACTATTCTCCAAATTACGTTGACGTTCGTTCCATTCA
CGCAATTTGTCTACTTGGATATTACATAGTCCAAGTGCATCAGTTTGTAAAAGCCAATGT
TCGGTCATAAGTAAGAAACGTGCTTCATTCTCATCAGTAACCCCAACAGCTTTATATCTA
TCTAATGCATTGATGATCTCATTAGCTGTAGGTGGGGCTTCCACATCACAAGGGAGAAGC
AAACTACTTGGGATTGCAACTGGTATTTTCACGGGAGGCGGCACAGTAGTGCTCGTACAT
CCGTTTAGCAATAGCATTAATAGACTTATTAATGCTATCTTTTTTTGTGTCAGTTTCATG
TTCAATCTCAGTAGTGGTGCTTTCCCCATTAGTTGTTTTAGCTTTAACTTCAGGCCATAC
AGGTGGAGTATATCCACGACCTGATAAACTAATGTACTCATCAATCACCTCAGTGCGTGA
TTGCGCCTGCTCTTTTTGTATCTCTTTCTTTTTAGTAATTAGTTCAGCTTGAATTTTATC
GGAGATACGGTCTGATTCAATCCTAACCTTTTCTGCCGCTTCATAAGATTTAATTTTTCC
AATTAAATCTGTAGAGCGAACAAGTTCCGTCTCATAACTATTTTTGTAATATATGATACC
AATTAAGGCACCTATCAGAATAACTAATAGTAACCATATATGCAATGGTACACTACCAAT
TATTTTTCGTATACCTGCTAATAGGAACATTGTTACCTCGAATTGTTAAACAATCCTAGT
AAGGTAGTAGTAAGCTATCGCACAAGCATCCATAGAGTGATCATCTAGACTATCTATGTC
GATGTTCCATGTGATGTCAGTACGAGAACGCATTGCTTCTTTAACATCGTCTTTAGTAGT
GCCCTTTACTTTTTTCATACCCGCATTGATTTTAACTGTGGTAGGATCAATCATGTACAA
GGGTATAAATCTATCATACTCGTATAATGCTCTATGTACATAGGTCACACATTCTACAAG
TACAGCGAAGCTTTGGGCAAACTTACCAAGATAGTTAGACTCTACAATAACTGCATGTGG
TTTTTCAGTATGTAGTATATTTAGCACCACATCGCTCATTTGCTGCATTCTAGTAAATCT
ACTACCATGAACCTCGGAGATGGCAGCATATGCCGGATTTGTATCTTTAAGGTGGCAAGT
AAATGCATTACGTACCACCTTATTACTTCCATCCAACTTATCTTCCAGAATAGCTATGCC
GAGGTTTTGTGAACCAGGGTCTAATGCTAGTACCCTAAATGGCTCATCACTCGCTGGAAG
CTTAAGCATATTTAATCCTTAGGTACAAATTTTGCTACGTTAATAGCTTTGCTACCTAAC
ATGGGTTCAACACCACCAATATCAAAGGTTAACTTCAGACCATCGCTATTATAACCAACA
GCATGGTTAGTAGCAATGAAGACGTTAATCTGACATGCAATGACTTCGGTATAAATAAAG
TTACCAGATGCACCAGATTGCCCTTGTACGTCTTTATCTACACCTGAACATAGTCCGATT
TCAGAAATGATAGGTGACCGAACAGAACCAGTCCTGATCCTGTGTGCTGTGGTAATCTCT
AAGATCTCTTCAGCTGTTAAATTAACAGTCACAATTGCAGATGCAGAAATTGATTCATTT
GAACCAACTACAGTGCCTTGGTTAGAAATCGTCGGAGGAGTTGGATTAAGATCATCGCGG
TTAGGCACGTATGGTGTTACAACTGGTTCACCATCAACGATAGTGATCTTTAATAGTTTA
GGCACAACACCAGTGACATCGATCTTACGTGCATAGTAGGCAAAATATTGTTTACCATTA
TGTTCCTCTAATCGACGTAACCGATACATATTACGACGTTGGGCTGGTAAGTCATCAGCT
ACTTCACGTAATACGAAAGGAATGTGATTATAGAGTGCAGCATCATTCGCTCGATGGATA
TTATTTTCTACTTCATCAGAGCCATCTGGTCCTTTAACAAAATAATGACCACGGTTGCCA
ATTACCATATACTGAACATTAGGAATCTGGCCAGCAGATGGTGCGACATTTTGTTGAATA
GAAAACTTTTCATTAAGAGTGGTATTCGGAATTAGTTTGAATGGAATACCTAGATATTTA
CACGTTTGCAGGTATGACCCATATGCCGTACGTGTAACGTTAATATACTGCTGATCAATT
GCAGACATTTTAGAATCCTTGCAGTAGATGGTTAAAATTTAGTACACTGTACTATTGAGT
AAATTTGTAAGAGTTCCCCTCCACATGGAGGGGATTTATGCTGTTAAGCAAATTTTTCAG
GAGCACCACGTACCATTACACAGATCCATGATTGTCCATTATGGGAGCGTTTTACTTCAT
GTAATTGGGATAGATGGAATACTAATCCTTCACCTTTTCCAATTAATAGTTCCTCACCAT
CTAAAATGAACTTAGCATCAGGCCCAATATTCCAAGCAAGAATAGTACCGGCCTCGGGTT
TATCTACCCAATAATTCATCTCATCTAGAAATCCATCTATTTTGGGGAAATCTAAAAACC
ATACTTGCAGTGCTTTGTTAAATAGTTCTTCGCCTAAAATTGGTTTAATTTCTTTACGCT
GTTTAGCAGTCCAATTAAACCATTTTGAAGTATTATAAACACTACATGCTTTAAGGCCAT
TGGTGCCAACTCGCATACGGTGGCCATATGAGTCTCTAAATGAAACTTCGCCTTTAAGCT
TTGTTAATGTTTTTAGTTCTGTCTTAGATAGAGTCTTAAGTTTAATTACCATGTTGTACC
CTACTCGTAGAGATATATAAGAACGTATCTTTTATTTTTAACTGGAGGGACTTCATGTGG
CTCTGAACGGATTGGAAAAATAGTAGCCCTACCTGGCACATCCTGATAAAACTTACCATT
GATCGTTATACCATCACCATTGTCATTTAATGCAATAACCATGTTGTAACGATAAACAGC
TTGGTCGATGTGTTCAGGCATACCTGTACCAATTTCATATCGGTTGATTAGAACTTCGCC
TAACCAAGCACCTTCTACCTTAGGTGCAATATGAAATAGTAAGTCCCGTAATTCCACTGG
CATTTGATTATGACCTAAAAACCAATAATCACATTCAGTAATACCTTTGGTTGGGATACT
ATTAATTTTTTTCCGATTAAACCACCAGGAATCTCCCAGTGTATCCAGATAAGATACAAG
GTCAGCTGCAAATTCAGCTGAAAACACGTCCTTGGTCGATCTTTCGTGGGCCGATAAGCT
CATGCAGGCCACCTGCATATCGATGTGCTTTCTCAGCGTCGAGATCTTCCCTGGATTTAT
AGATAACGTCTGGGCTCTCAATTAGGGCCTCCTTATGCGCGCGATTAGTTCGTTTAACAA
GATCAATATAATCAAGCATTTCTTCTAGTTCATCTAACTCTTGACCATATTTTTCAGCTA
GCTGTTTAATTGCACGTGCAAGGATATTAATTTGCTCAGTCACTGGATAGCGTTCAGTAA
TTTTGTAGGCCACTTTACTATTTAAGTGATCTTCAGTAATTACTTGTGGCGCTTCTTCTT
TAGGAACAATCTTCCAATCAGAAAGTGTAGGTTGTTTACCAGGTGTATTACTTACGACTA
CATCATAAGTACCCATTTCGGCTTCAACAAAAATGGTGTGCTCACGTGACTTAGCATCGA
ATGCATCTAAAGGTAGATAGCCTACGCTTTGTAGGAATACCTCAGAAGTACGGTTAAACA
TTAATAGTACTTTTACTTTATCTTCAGTAGGCGCAGTAGCTAAAGATAGTTCTTGGAGTG
ATAACGGATTATTCATTATACAAGTGCTCCAGCTCGAATCATCCAACGCCATGTACCATT
ATTTCTAACTGCTACATATTGCTGGTAATAATAGGCTTCAAAGGGGGTATTAGTTCTAAC
ACCTACAACAGCGTAAGTGCCTTCAGGATATTTGGTATTATCTGTAAACATCGTATTTAA
CGTGTTTAATGCTTCTGCTTCACTATTTACCTGACCTAAGGTAATGGCTTTAATCTTATC
TTTGTTCCACTCTTTAAAAGCTTCAACCCAGTCTTGCCAAGTACCATCGCTTGCTAGATA
ATATCTCTCAGGGTCATTTAATATTGATGCATTACCTTTACCTAATGCATTCCATTTAAA
TACGCCACTAGTTACTTCTTCAGCTGGAATATCTTTTCGAACATCATTCCAGAAATTCTG
ATATACCTTACCTGTTCCAGTAACTGGATAACCCTGACTATTAGTAGTAGCACCAATAGT
GGTCGCATTAGCAGCTTGTTCATTAATACCTAATAATGGAGTTATTTTAGAATCCATCAC
TGGTTTGGTATATGATCCAACTTGGTCAGCTGTGACAGCATGTGGGTTATTAAAGTTTTT
AATATGTGCTGCAAGTTTAGCCAACGTATCAATATTAAGAATACGATAAATACCACCAAT
TGGCATGTATTTATTATTTACGTTTCTATTAACTGACTCAGCTTCAGTAGCAAAACCCCA
GTTGGATATCTTATCAAGCGGTGGAATTAACTTGAATCGATCATCAGCATGCGGATTATT
ATAATCAGTTAAGTGTGCTGTAACTCGATCTCTATAATCGTCCACAGCGGTTTTTGCATC
AGTGAGATAAACTTTATAATAATCATCGGCAGCATTATCCATGGCACTTCTACCGACCCG
ATAAGCATGTGCTATTCGGTTTAATTCAGTTACCATTGTATCTGTGCCATAAATCTGCCA
ATATTCATGGCCATGAGGGGCAGGCGGATATGCATCGGGTTTACCAACAATATCATCCCA
AGTGAAACTTAATTCATCTAATTCAAGTTTATCAAAAACAGCTTTAAGTTCTAATGCTGA
AATACTAAAGAAACCACCAACTGCTCTATATGTAACTTGGACATTAGGACTAACATTAGG
ATCAGTTACTACAACAATGCCCATTACTTCTAAGCCAGTCATTTCAGATAACTGTGAATA
AAGATAGGTTGTTTTATATTGATCTTTGTTTAAAGATAAACCAGTCTTCTTATCACGTAG
ATTAAAGTCCTTAGTATAAAAACCACCATGTGTACACATAAGTACGCGATGTGTTTTATT
ATTGACTTGAATAAGTGTGTGATCCTCATCTACAATGTAATTAGATGCTAATTTAGCTTT
TAGATCTAATGGTAAAAAAGTAATCATTATGCCGGTTCCCCTATATTAGTCCACGTTGAT
CCAACTTTACGTAGGAATAGAGTATTCCTATAGGTAGTAGCTGTTGTACCATTGCCATGT
CCAATAACGAATTCTTGATCGTAGTGGCAAATAGCTAATGAACCAGGCCACCATTGTTCA
GGATCTGAGAAGTATGTGTTATGGAAAGCAATTGCTTCTTGAATAGATTTAAAGTTGGTG
TTATTCCAGTGGACCATCGTTCCTGTTTTTTGGAAGCGATTAAATATAAAACCGAAATGA
GTCCATTGACCATTAGGCATCAATGTCCAATCACGACCTGGCCAGGTTGCTGAATTACCA
ATCCTACCAGGTGCTAATCTACCAGTAGTTAATACACTTAGAGGCATCTTAGCACGTACT
GTTTCACCCATGCTATAAACATCTTGTCCAAATAATAGCTTAGATGTATTAGCTGTTTTA
CCTTTATCTAATTTTTGATTTAGTAAAATATTAGCTTGAGTAACAGTATACGTATTTAAT
TGTTCAGCCGTTACCCTGTGTGGGTTAGTGGTAACATCGTTAACGTGTGCCAGATATTGA
ACTGTATAATTGGTATCAACTGATAACTTCATTGACCATGGCGTAGCATAGACATTCATG
ATAGCGCCATTTGGCTGTTTGGCTTGTGTTTCAGTTGCAATACCAGCATTATAAACATTA
CCTAATGCCACTTGCCCTTTACGTGTCTGGTGTGGGTTAGTGGTGGTATCATTGATGTGT
GTAGTAAGTCGTGCTTCAATTGTATTAAGATCAGCTTCTATTAGACTTAACTGATATTTA
AACTCATCTAAAATGGAGTCATATGAGTCTGATGAGCTTTTCTTTAATAAGTCAGTTATT
TCTTTTAATTTAACAACTCTAGGCGTAAAACCATAAAGTTCCCAATAGGCATGCATATGT
CCATTAGGTTTAAATTGGTCAGGAATATCTAAAATATTAGACCAATGTGGTTTACGGGTA
TTATTTAAAAGAGCGTTAGCATGCTCAGATATGGAAGGGGCAAGGTTACAGTATATACCA
CCGCACATCTGAGCATCAATGTAAATATCCTCGTGGACATCTTGTTTTGTAATAACAATT
ACTGAACAAGCTTCAAGTCCAGTCTTCTCAATTACTTCTGGATTAATACCAGTACACTGA
TAATCCATTTCTGGATTTAACTCATTTTGCCTACCATCTCTGATAACCATTCCTTTAGTG
TAAAAGTAACCCTTATCCATCACGATGATGCGATAGGGGAATCCTTTCTGTTTTGCTAGT
GAATGGTATTCACCCTTTGTTCGGTTACTATAACTCTCTCCAGTTTCATCAAATGGAAGA
GGTAAAAGTAATGGATTCATCTAAACTATCCTTATGGAATTACCCAGCCACCTTGTGAAC
GGAAACACACGTAGTTAGGAGTATAATCAACGAAAATCAATCCGTTACCAGCTGCCTGGA
TTTTCTGTTCTTTAATAGTGAAGAATACAGTAGATCCGATAGGCCATGCATCTGGATTAG
TGAAGTTAGTTCTACAGAAATCTAATGCTGCTTGCACGGATGGTTGTAATCCTAGTGCAT
AAAACTTTAACTTAACCGGATATGAATACTCTGTGGCTAATTGATCAAAGTGTGTAAAGA
TACCATTCCCACGGAGTGGTGCTTTCCATTGTCCCATTGTCCCGGAACCAATCCGATTTA
TATTGATGACATTACTCTGGCCATCGCCAGCTGTAAAGTTCACGTCTGTGTCAAAGTTCT
TACGCATCCACCAAATAAGATCGCTATAACCCATTAAAGTAGCAGTTGGTTGCCCTTTAG
GTTTATAATAAACCATATTAGTATTAGCTACTGTATCAGTCTTTAAATATTTACCAGTAA
TTCGTGAATCAAAATCACTTTTCAAATATGACTGTACATGTGTATTTTTGACTTTATGTG
GATTATCACGGCGAGCTATGTGGGCATTAAGTGGTTTTATAGCTATTTCATCTAATACGC
CATATGCTAACTGCGGTGTTAGATAATGCGCATTAGATTGACCTAGTTGAGCAATGGCTG
GAGTAGCCAATGGAAAGTTATTAACTAAACCTAGTTCAACATTGGTTGGGGTAATCTTGT
GTGGATTAGCTTTATCTTGAATATGCTTTTCTAGGCGGTCATTAAATTTCTTTAAGAACT
CATCATAAATCTCTTTAACTTTACTACGGTAGTCATCTTCACCACTTGTGTCACCAGCCA
TGAGTGCCTGTGTTATCCACTCCATCTCGTTGTTATAAGGCTGATACGTATCAAGATGCC
ATCGTTCGCCAACTAACTCACCGTCTTTCCAATATGGTTCGTTACCAGTGTAGTCGAGAT
CTTTTGGCTTTGGCTTACCATTTGTTTTCCACCAGTTAATATAATCGTCGATAACTGTGA
AACTAAACGCTAGATCACCGCCTACCATGTGAGCTGAAGTATACACTATTGGTGTACTAG
GTGTTTTTAAGAAAACAATTGCTGAACATATTTCTTGACCGACATACGCACTAGCATCTT
TGTGATAATAAGTAACAATATAATCAATATCTTTAACTAAACGATTATATTTACCATCAT
AAACTTCTAACCCTTTTGTATAGAATCCACCATGATATAACTTGATGATTCTATAGTCGA
ATCCCTGATACTGAACTAGAGTATGTGGTTCGCTACCAATGAAACAATCTGGATTTGTAC
CTAATGGATCAAATGGTAATTGTAAAATAGGATTATACATAAGAAATACCTTTTAACTGA
AACAGCAAAAAGAGACACAGCTTTTGGCTGTGTCTCTTATGCCGGGTCAGATGTTTATAG
ACGGTCTGCTGCGTCATTAAATAATTTCGCAAGTGGACCGTATATGTGCACTCGATTATA
ATCATCTGTCCGTTTAGGAGTCATGTACGTAGTGTTATTGAAACCTTCTTGTGCACGCTT
CTTAGTAGCTGGACGATAGTTAGCCACATTACCAAGACCAATATCCGATGGTTGCAGATT
ATGTGGGTTACCTCTAGCTGCAATATGCCCATTGATCCTATTAATAACGGCTATGAATTT
ATTAAGGACTGCCTTAGTAAATAAGCCTTGATTACTAATAGAAGCATTTATTTGAGCATC
CATCTCTTGACGTGTAACTTCTGCCATTTTTAAATCCTCTTATGGACCAGTGGGTGGAGT
TGGTTCAATATGTTTCACACGTGTACCCCTGCCATTCCATAATAAGGAGTTATCAGGTGA
ATCTCCCCAGAACATGACTTGATTCAAAGTATTTACTGTCACAGTGAAATTATGCCCTGC
TGCCAATTGAATATATGGTCCAGCATGGTCATCTACGTCACATTGTCCATTATCGTTATT
TCCGAAGAAAGCGATTTGGCCATCACCATACATCACTGTGTAATGTGTGTACAATCCTGA
TACACCACCAATTGGGTTACTATTTACATTAGCAGTTACATCGTTACCACGTCCATCAAA
CCATAATGGCGAGATAACCATAAAGGATGTATCATTACCATTGCGGATGATTTCCATGAC
ATGTACTTTACTAGATTCAGATGTATAATCTTCAGGAGCAACTAATGGATCTATTGAATG
CATGATGATGTGGGTGCAACCAATTGACATTGAATCAATAACATGATTCAATGGTTTAAT
TGTGTTGTTAACAAAATCATTAAAAGCACTAATGAAGCTTGGGATACCATAAGCTGTATA
TACATAGTCAGCACTGCTAGCTGGACCTATGTTTACAACAACTGTCATTTCACCAGGATA
GGTGTCTTCAGTATTGGTAAATATAGCCCATGGTTTATTAGCAGCAGGTACTAATAGTTC
AGATGTACCACCTTTAACACAACGATAAAGATCTTGGTGCTCAAAGATTGCTGATTCACC
TGTTGAACTAAAGATGAACTTACCTGTTAACATATACAGAGATGTTTTATTCGCCCAGAT
ACTTGAAGGAATATTTCCATCTATAGGTGCAGTCCATTCTACTGGAATTGGTATCATCTC
ATCGACTTTAGTTTCATCGATACATGCTGACTTGGCTACACCATTCTCTACCCAATACTG
ACCATATCGGTGAGATACCCAGGATTCCTGAGCATATCCTAAACGCTCTGGTATAACAGC
ATAAGGGTTAGCTGGCGATTTAGGATGAACTACACAGTCATCTCTGACAATTGTACAATC
CCACCAACTATTAAATCCAGCATAAGCATGGAAACCTGCCGTGACACCTTGAATTAATTC
CATTCGGTCATATTCACTAGTATCATCCACAATAACTGGTAATGTATCTATCTTTAATTG
TACATCATCCCAGTTAGCGTTATAGCCGGCTGCCATCCTTTCAATATCACCGAATGATGG
GAATTCATCTTTCCATTGCTCAGGTGTTAATCCACCAAAGGTAGAAGCATCACCACCACC
TAGTCCTGCCAGTAGTTGATCAACTTGTGTTTTAGTATATGCATTAACCTGGTCGGCAGT
TACAACGTGTGGGTTATTTTCATTACTAATATGTTGATTAAGTTTCTCTTCTAGTTCATT
AATTCTAGAAGCATCACCAATCTGACTATAGAGAATAGATGCAGTATAAGGTGTTAATAA
TACCGAATCATTAGTTACGTCTACCGCAGTAGTTGGTGTTGCAGCTGGGTAGTTAGGAAC
ATTACCTAAATTAATATCAGCTGCTGTTAGACCGTGTACGTTACCCCTAGCCGCTATGTG
GGCATTAAGCGGATTTACGGCAAACTTATTAACTAATGCTAATGTACCACGTGGGTTCGT
AAATAGATCATTACGATTAGCATCTAAATGCTGTTGATCACTTGCCATTGCATAGTTTGG
AACTAGTGACAAGCCAACTTGTGCTTTAGTTACCCTGTGTGGGTTATTATAATCATGAAT
ATGTTGGTCAGTTGTACCGGCAGCCGCAGCACGGATAGCTTCTATAATCCCTTCGATACC
TTCAAGAATCTCTTTACTACCTACTAATGAATCAATAGGTTGATTGTGTTCTAAAGGTGG
GAAAGAAGCAGGTAATGGACCAATTGCACCCCATGACCGAATCAAGGGGTTATACTGTTT
GCGTGCAAGCTCAGCCAGGATCTGCTGATTACTAAATCCCCATTGCCCACCTATTGTACG
ATAATCCATACCAATCATAGCGTTTATCGAACGCTTCATGATACGTATAGATCCAGCGAT
AGGTCTACCTATCGATTCCATAGCTTCAATAAACCAATGCCCAATAAGGTAATCAACACC
TTCTACATAAGTCTGATTGGTCAGTGGGTTAAATAGTCGTAATGAATCTACAAAGAAAGG
TGCAGCAAATGGTATAATGAAATAATAATCATCACCATCTGGTACCTGGAGAGTTTGGCG
CTCACCTTTAATAAAGTTCTGGGGATTTGTTCCATTGGGGTCGAATGGATATAACCCAGT
TTCACCGTGGGCCATGGTTGCCCTCCTTTAATAAAACGCTATTGCGCAATTTGTTAGCGT
AATGATGTGAAATTCACATAGGATTGTCCAATCATTCCATGGAGACTAATAGATGTACAC
ACTAGTACGTTCTCGCCACAGAATAGATCGTAAGTCGGGGCGCTGGACTGATGTTGATCT
AGCTAATGAAAAGATATCTACCTTATCTGTAAAGTTTGGAGATATTTATCTATATATCGA
ATATCCTGGGCCAACTGCCCCTATATTAAATGCTTTACATTGGATAAATGTTACTAATGA
GATTAGTTCAGCTAATCCAGATCTAACCGTACAAGAATGGTTAACATCTCTTGGAGATAA
ATCACTACCATTTGATGATGAACTACCCAATGAAAAAGTACGTTTAGTAAAATATGCACA
AGCATGGCATGCGGGTTATATTGCGCAGCCTGTTGCTAGAAACGGACATGTCACGGATGG
TGGTTCTAAGTTTAAGAAAGAAGATATTCTTTTAACCCATCCTAAACATAAACCTGAAGA
TGTTTGTCGCAAGTGCCTTATAACTGTAAATACAATGTTTCATCTAGCCGATTACACTAG
TGCTGGTGTAAGAATCATTGATGGAAACAAAACAGTTAGAACAGCTAATGACAATCAAAT
TGGATTATATTCATTTGAAACAATAGGTGATATTAAATATGTCCCTATTAAAACTGATAT
GATTTATCCGCAGCAGGTTGGAGCACCGCTATTTGATGCTACCTATATTGATATGCCTGA
AGATATAGACCTAACTAATAAGACTATCTTATTATCGCTAGGTGGTTATCTATGCGTATT
AGGTAAAGGTTTCAATAGGGTAGGTGTACGTACTTGGAGGGTAGACTTTGGTAGTCTATC
TATGTTCGACCGATACATGCAGTCACGTGAACTAATTGACCTAAGTTCATTAGGTTTAGA
AATTGATGACAAAAATAAAACTCTATTAAGTGTAGAACAAATTAAGAAAGATTCTGTTAT
CAAAGCTTACATGACTTTAAGTCAAACATTTTTCATCGTATTAGATAGCCCCTCTTTATT
CCAAGAATTTGTACCACTTGAACCATTAAAACTTCCTGGCAGATATCAGGCAACTAATAC
ACGTACTGAAGTTTATCCAAAATATACAAAACCTGATCAACTACCAGTAGTTGGCGCACA
TGGTAAGATGTTAGATTATCACTTCATACACGAAGATAAACATTCTGTTTATTGCTGCAC
ATTAAATATTAGAAATAATTTCGATGCGCACACACATGATTGGAAGACTGAGAAAGTAGT
TGATGGTGGAAGATATCCGGCTTGGCCTTTTGTACATGACACCGCATATCTTAGAATATT
AGGTGTAGATGGTTAACGTCATAAGCCCTCCCGTAATGGGAGGGCATTATGTTGTTTAGA
AATTATCCAATCTCATCTGATTCAGTTGACTCGTCTTCTAGCTCCTCAGCCTCAGCAGCG
GCTGCCGGGTCAGATAGTCCTTCCATATCAACTTCATCCTCATCTGTTGGTGTTAATTCA
GATTCAGATAAATCATCATAGCCAGCTTGTGTATCGAAGCCAGCTTCCATTTTATTACCA
CCACTACCTAAATCATCGGATGAGTCATCCATATCACTACCGAAGTCACCATAACCACCG
CTGCCACCGCCAGTTAATTCATCCATATCACTCCGATATTTCTTATATTCAGCATCTAGT
CTTTTCTTAATCTCGGCTTCACCTTTAATGAATTCCAAGAATGCTGAACCTTGAGTTTTC
TGAATGTTATTCAGCCAATCAAGTAAGCTAAAGGCTGGCTTATCATCGCCGTCTAATTCT
TCTAGAACTTTAGTTTCAGGAAGAATATTCTGTTCAGCGATAAACTGACGTAGGAAGTAT
GATTTAGCAGCAGCTAGATATTTCTCGGCTGCGCCAGATACACCTAACATTTCATCAGGG
AATAGTTCTGGAGTAATCTTAGCTGAAAGAACGAGATCTAGTAACCTAGAGTATTCCTCC
AAGGCATCAATCTGACGAGTATGTTGGGTATTATCAGGAGCAGGAAGTGTAACGTAAATT
GATTCAATAAATTCATCAATCACTTCATCTACTGAAAGATCTTTAAATACTGGTGTATCA
AGCATGCCAACATTCGCTGAAATAATTTCAACCATTTCTTTACGGATGATAGAACTATTG
GCTGAGAATATTTTCACTAGCTTAGTGATTTTATTACAAAACTCACGCTGATACTCACGA
ACCCTGCGGGAGAATACTAGGTCATTTTGCACAAGTCCTGTAGCAAAATCAGGAGATGTC
ATTGGGTCAACCTTCTCAGGTGGTACACCCATAGATGAAATGTGCATTCTCCTTAAACGA
TCTTGGAGTTCGGGGTTACCTGCTTGGACATTAGTGTTGTAATCATCGAAATCAACAGCT
GTTGAAGCATACCCTGGATTATCACCTGGATCAATTTTAAAGTCATAGCCAGATCGCATC
AATGAATCCATTGCTTGGGATGGATCAGGTGAAGCAAGTGGGAAACCACGATGTGCCATT
TCCATAATACTAGACTGAACATGTTGTACAGTGTCTTCTGGATCTGGGTCATCTGGATCA
AGATGGATAGTAACGCGTTTACGTCCGACTGCGTTACGCATGCCACCCATTACATCGGCC
ATGAGTAGAGTTGAACGCATAGTAGCCAGTAGCTTAGACCGTTCTAATTGAGTTTCACCA
ATACCATGTCGATTATAATTGAATGCAACATAGACCATCATCTCAGCTGGAATGAATACT
AATTGAGTCTGCTTACCTTTCCAAGAACGATAAAGCATGATACGCTTAATTTCTTCATCT
AGTCCAACTTCTAGCTCTTCATCATACATTCCATTGCGTAAACGGTTCTGTAATTCGTTT
ACGATGATACCTGCATAAGCATCATTGATTTGATGTTGTTCTAATTCAGTATAGTTAGAT
TTATTAATACCTAGTGCATCACGTGTTAGACGTAGTATTTCAGAACTATTGTCTTGTGAA
CGACCATTCTGCCATCCTGACTGTAGTTCACCATAGAAATCACGTGTAGCTTCTTTACAT
ACGGGGTATCCATTTAAATCCACTAGTAAGAAATATCCAACATGTTCATAAGGCCTGCCA
GGTACATATACTGGAATAACTGCTTCAGATGGCAATGGTAGAATTAGCGGATGACCAACT
GAAGAACGACCCATGAATTTTGGAGATGAAATAACTTGCGTATATTCAACACCACCACGT
GATTTTTGATAAAGTTCATTTATCTGATCATTTGTGAAATGGTGTGTTTCAGTTGCAATC
GATACTAGTGATGTATTGTATTTGCGTAATTTATTAGTAATAAGTTTTCGCCTAATACGG
TTAGATAAATGTGGTGCTTTCAATACATCGATGTTATCAGTCACTGATAATAATTTATCG
CCGCAGATATAATTAGAATTATCATTGTTTAGATTATGTCCTTCCATTGATATTCTTGAA
TTAGTAGGATGTCCAAGAATACCTAATGGCCTACCCTTATTAAGGTTATTGCGAACCATA
GCATAACTTTCCATGCTAACTTCACGTCGCCCATTAACAAGTGCATCTAAAACGTTTTCC
GGTAGAACAGCTAATACAGATGATCCTTTATGATACAGGATATCTCGTAACATGAGATCT
AGCCGTTCGTTAATCTTATAGTCTTGTTTGAAATATCGCTCAACTGGCTCGATTAGTAAT
CGACCAATCTCACTATCAAAAATATCTTGGTCACAGTAAAAAGTTAGATCAGCTTCAGCT
AGATCTTTAGGTGATAAAATACTACCAACTAACACTGTCTCAGTTAATTCTAGATCAGGT
AGCACCTGCATAATAGAATCTGAGTCAATAATATTCTGTGAAGTTTCACGAGATAATTTT
TGTAATTGATGTTGATCCACAACAATACGTGGGTTATTGGTCGAAGCCCCAGCTTCTTTT
GGATCATGACGGAGTTTGGCAATCGTAGCTGCCAGTGGTGTTGGGTATTGCCCACCTACT
TGCAAATTAGCGAGAGGTTCGTAACGCCCCTCATTAACCCCTGGTATAGCCATTTGAGGC
TCCTAAATTTTAAAGTGAGTAAATACCAATGAATAACAGCAACAGTGTGTATTTCAAGGT
ATACCTTGATGACGTTATCCGATTGGCTCGTTCAATAGTCATAAAATTTGATGATATTGC
CGATCAAATAAATACAGAGCTTTATCGAGATTATTTATTTAAAGCAGATCCTGATAAACC
ATGGACCTGGAAATACTATCTGAATCTTGCTGGTGAGTACCATGAAACTGATACGATGAT
GTATGTCACATCTGCTGACACATTAGAACGCATCGAGTTCACCAAGGAAAACCTCAGGCT
ACATCGTGCAACTGCACGGGAATTTACACCAGGTAGTCAGTCTTATAATAACTTAGTATT
AAAATATCCAACGCAAGCTGGACTAATCAATGGGATACTATATCCAATTGATATCAATTT
TGCAATAGATTCAGATAATGGGGATATTTTGTATTTTGATAACAAGTATGTTGAAGGGAA
TGAAGATAACTTTATTCCTGAACTACAAAGTTGGATCAAAGCATTTTATAACTCTAACTA
TAATAGCCAGTACCTTATTACAGATGATCTTTATTTAACTGCTTTCCTAGGGGAACTAAC
AGTATTACTTCCTCTTGAGATCATGAACATCAGACTAGGTAATGCAAGGTCTAGACGAGT
ACATAGTTTCCATATTCGTGAATATCTAGCATCAGCTAATCGATTAGATGAGTTCATGCC
ATATCTGAATAAATCTCAACAATTATGGTTATACAGGAATATACAGTTCTTACGTAGAAA
CTCAGGTAAGCAAGCAATATTTGACCAGTTGGTTGAAAAGATATTAACTGAACGTGGAAT
ACCAGTTATTAGTTATACTCTTGAACAAAATACTGCAAACATGCCGCCTAATCTGAAACC
AGATGTAGAGATGGTTAAGCATGACATGAATATACCTGTTGTGCAACCTGGTCAAGATAA
AAACACAGTATTAGAAATATTAACTAGGGAAGACCCAATTGCACGTGATAACCCACTAGT
TAAATATGACGCCGAAAAAGAAATAACTGAACAAGTATCTACTAGTGCTTTTAGCAATCT
ACCTACGCGTGTACTAGATTCAGAGGTTATCGATAGATCTAATAGCTCTGTAAGAAATCT
AATGAATGTCCTACTTAATAACTGGTTACATTTATCAACCAGTGGTCGTTATCGTGCATA
TGTATCCATTCCTAATCCAAGGACTGGTGAATACATGTTAATGACGGTTAAGGATGCATT
CATTGTAATGCTTTATTCTTACGGTAGAACAAAGGATTTTAAATTCGATAAAATACCTAG
TGTACCTGCTTATGAAGTATTACGTAATCCATTCCCGACATATGAAGAACTTCAGGTACA
AGTTGATAAGAAACTGGTAGGTCCTAATCTACTAGGTGCAGTCAGAGATAACTTTACCCC
AATGGGCGATTATATCTCAACTGAACTCTTCTATACTGATAGCTCTAGATTTCACAAAGA
ATATTTGAAAGGTTGGGAATTATATTCATTTAATGATCATAAAGATATTCGTTGTTATCT
AGAACAATCTGTTAAGACTTTCTATATTAACCGAATGTGTAAACTCGTTAATGAAGATAT
TTCTTTTGAACAGTACTTCAAAGATTCTGCTTTTGCTATTGCTGATTTAACAACTTCTGA
ATATGAGCAATTGGTAGTTGATTGTATTAATATTGCGACAGGCTCTGACCTTAATCGTGT
TATTACATTAGGTGAAATTCAAAGAGAGCTGTTAAGATTAGTTTCTAAACTATCATCTTA
TCCATTACAGTTTCTACGTAATGTTAGTTTTACGGATTTCCATGTACTTGGTATTGTAAT
GCCTAGACTTGGTGATTATGGAGCTGCTGGTAATGCCAACCATATTGTACCAATTAATAA
TATCAATGTCCAAACATATCGTACATCAGCTGAAATGACGTACTACATTAATGACGTAGA
TATTATTCCATTTAATGATTGGTCTTATTGGGCTGAAGACAGATGGTGGATTAATCCATT
TGTTGGTATTAAAGAATTAAGCCTATCTGAATACACCTATCAGATTCCAAGTATGGTTAA
CGTATGGCAATATACTGAAGAAGTATCTGAACACACACCACCTGATGGCGGTCTTGGACA
GTATAATAATTCAACAGATCCTAATTGGCCTAACTTACCTTAAGGAGTGATAGATGTTTA
TAACTAGGGATTACTGTAAGGTTGATCCTTGGACGGCTATTGTTGAAATGATTAATAATA
ATTACATGTACCAGTTAACTCCTGGTACATGTAAGCTATTAGAATTTGAAGCTATTGATC
ATAAACGAACACGTATCAAGATAGATCCATGCAGAGATAATAAGCCAGGTGAATTACTAC
CTGTAGTTGAACGTACTGAATTCTTTTATCAACGCTTAGACTTTAATGAGTTTTTTAAAG
TTCCGCAAGTAGTAGAAGTAAAAGATGTATATCTACCTTTTACAACACTAGATCTAGCAA
AACTAATCTGTGAAAAGAATGATATAAAATTTGATTTAGATGATTTCTATCATCAAGAAA
TAAATTCTTATAATCAGGATGTGACTATCACATGTAATCCAGATTCATTAAGGTTTGTGG
GTGAATTTAAAATAAAGCTTATAAATACAGTTAGGCAAGATATCTCTTTATTAACTAAAG
TAAATTCATTCCCAACTATTGTTAAATGGCCAGCCGGAAATGGTAATAAACCAACTGCTG
AATTCATTACCATGTCTTTAGACTTTACAGATTATCGTAGCTTTCTATTACCGATTAAAG
CATTCAAAGAAAATCCATATTCTTTAGAAATGGCAGCCATCTTAAAGAAAGTAACTGGTT
TAGATTTTGTTGCTAAAAGTAGTGCTACTAATTACAACATTACTAACATCGTTAGAAATG
GGGTAAATAACTTCATAGTGGATTATAATGGACCAGTGGTACCAGCATATAGCCTTAGGA
ACGATATCACTAATGTGATGGTTTTAAGGCTGTCTAAAACCATGTGTCCTAATATCAATG
GCCGTTTATTAATTCACTATAACTGAGGTGTGTAATGGCTGATACAAGAGCTGAATTGGT
AGCTGCTTGGAATGTGGCTAATAAACCTAAAGATAATAATGGTAGGCCTAGGGATTTAAC
TGTTGATGATGTTGAATTCATAGGAACTGATACATTCTTAGCAACTGGTACAAATGCCAA
AACAACAATGAGAGCGAAGACCAGTTCACTTTATTTTAAAGGTGAGGCAGTTATTTACTT
TAATAGACGCTCTTTACCAGAGTACTGTCTTGGCATAAAGGTACCAGGTAAACCAACTGA
CTATACTGATAATTTAGAAGTAGCTGAAAAATTAAGGGATGTTTACGGTATTCCATTTAT
TATAGAAGAGATACAACCGCAGCCTATTACTGGGAATACGGTTACGATACATCCATACTT
TAATAACTTGTCATGGATACCAACTATACCAGTAACTCTTGAATTTGAAAGCAGTTAAAT
AAAAAAATAAAGACATAGCCCCTCTCCATGCGGAGAGGGGTTTATGCCATTACTTAATTA
TCACCATTCAACCTTAAATTCACCGCATTTAAATGACAGTTTATTAGATCGATGATCTCG
CCCAAACCAACATCCTTCCTTGGTGACTGCATCTGCAATTTGTGGTTTAACCATGTTGTT
TTTGTATGATTCACGAAGTGCAGTATATAGGGCTTTATGACATGTTTCGAAGAATACCTT
ATTAATAGGATTCTTATCGTTAACTCTTGCTAGTGAATGTTTATCAAGCAGAGTGTGCAT
TCCAATTGAATACTTCTGGATAGTTTCTAAATCTTTCTTAAGTGCCCAGATACCATAGGT
TACTTTTAGAGAGGTATTGGCTTTGGTTGATGGAATAAATGCTGATGGGTCATCAATCAT
TGGTGCTAATTGCTCAGTAGAATATGGATTATAAGAAAGATATTGTTGACCATCCCAAAT
ATACATATCCATTGTATCTTGAACGACATATAGAACTAGGACTTTACCATTTGCCGGTAG
ATCACATTTTGTATTTACTTCTACAGTGTCATTGAAATCTGGTTTATAGTTATTATAACT
ATTCATCAATACCACATCATCGAATAGCCCTGCCATATTCACCGTGTTTTTGTTTAGTAA
TTCTTTGAAGAATTTATTCATTTTAGCTAGCATTGTATTACTCCTTTTTTACAATATTTG
ATTAAACAACACATCATTCATAAATAAGCCCCTCCGAAGAGGGGCTTTTATGCTTATTTG
ATAAGCTTAAGTAGAACAGCATTATCAACAAGAGCACCACGAATAACTTGTAGATAAGAT
CCATCAGCAGTGATAATGTACATTTTGTGTGTACGTGTATCATCTGAATCTTTAGAGCTA
TTTAGACGTTTTGCCATTCCCATGATTACTTGAGTAATCTTAGGTTCGGTAAGTTTACTG
ATAAGTACTGCTTTCTCAGTGTAAATATTTAAGCAGGATAGTTCTTCAAGACGCCAGCCA
GTTTGGAAACGCACTGATAGATCTAGAATAGAATTACCTTCTTCTGGATCAATATTAACA
CACATACTCCGCCCAACAATAAACGGAATACTAGCAATAAATTTATCAGCTACTGACTTA
CCCTTCTTACCGATCAGATATGCGATAAGATCACCGATATCCTCACAGAAGTCATCAATA
GTTACCTTCTGACTCATTGAATCAGCCAGGAACTCATTAACTGCACTGGTTAGCCTTTCA
ACTAGGAACCGATAGTAGCGTTGAGTCAGCTTACCATCTAGCATTAGTTGCTTAAGGCGC
TTTGCAATTAGATGCGGATCGGGTTCTTTTCGAATATCCTCGATCTCATACATAACTTCA
GTTGAAGCATCAAATGGATGGGACGACGCTGCACGATACTCATGTGCCGGAACTACATCA
TCTTCACTTAGCTCAAGTGCTTCACGAACTGCATTGAGTGCGCCAGCTTCTGCTTCAAGA
TTATTTGCACAGGCAATATAACCTTCTAGGATAACTGGATCATGTTCACGATTATCAGTT
AACCCGGCATCATTTGGTGAAAACTCTTCGGCTACTTCTTTAACCGGTTTGGCATCACCC
ATAATGGTAGATAGCTTATAACTGGTTGCAGTACGTGCGCCACCACCACGATGTGCTTGA
CGACGGAGATCATCTTGAAGCTCATGCTTTAGATAATCCATTTCCATGTGATTCTCCCAC
TTACGATATACTTCATGTACAGTGTTATCAGGCCATTTAGCAAGGAAGCGACAATATACT
GCCGGGTCCATTAGGATGCTGTATGGATTAGCTGAACTAGCCGTACGTACCCAATCAGGT
TTATCTGCAACTAGATGAGCAGGTCGGATTTCAATACCGCCCGGATTATAGATAACATCC
ATCGGACGATCTTTATTAATTACAAATCCGTTGGGTACATAATAGTTCGGATCGAATACG
AGTTCTTTCACATCTTGAGGGATGGGTAGATCCGTATTATCATTAGTTACAGTATTTGCA
TTTTGTTGTAGTTCAGGTAGAATCATTACATCACCTCCACCAGGGATTGTATCATAACTG
CTATTTGGAGATACTTCAACAGTTGCACCCCAAGAGTCTTTAGGTTGCATGACTGGTTTA
TTTTCCAGGAAAGGAGAAGAACCAGGTACGTCATATGCAGCATTTGCAATTGATGAACCA
GTGTCATGATTAGTTGTTGGTGTATATGCCCCTGGAATGTTCAGCTGTGGATTAGCCATG
GTAGCCGGTTGACCATAGGTCTGTTGGATACCTGCATTAATTGGAGGTAGTTGTGAACTC
ATGCCAGGACGACCCATTGCTGCACCCATCCCAGGGAAACCTCCAGGCTGTACACCAGGT
TGTTGATATCCACCCTGCATCATGGTGTTGCCACCCATACGCATCTTTTGGATATCTGAT
TCAATCTGTCCGATTACACCAAGTGCCTGTTGGATATTCGGCATTAGATGTTGAACTAGA
CTTTGTAACTGCGGGAAGGTTTGAGCACATTTACCAACAAAACCAGACCATACTAGAGAT
GCAGCTTGCTGCATTGCCTGCTGTGGGTTGTTCACCATTTGACGATGAATAAATAGAAAT
TCTAGAAAGTCAATAACTTTCTGAGCCCACTGGTGATAATAGTTATTCTGGAAACCATTA
CTAGATAGCAGATTATACGCAAATGCATGAAGCTGAGTGGTGGTAGCCGCATTTTGAGCA
TTCAGCCGGAACAGTCCAATTACACCATTGAAATATGGTTGTAGTTGAGGATGTTGTTGA
TGTGGTGATAACTGTAGCGGTAAGCTAAACAGATAATTCCCATTAGGTAGGTTAGGATCG
AAAGTACTGGTATCTACACTCTCAAAATCGACAGGTAGATTGTACTGTGCATAGTTCATG
TGAATAATACCTATTAAGTAGTTAAAGATTTAATTTATTTTGCACGGAACATTAATTGAG
CATTATCAATTATTTCCCGTACTTCTTCACGACGTTCAACTAGTCCAGTTGGACCCACTT
TGGTATACATATTAAGCCTACCTCGACCATCCGGGTTGTTCTTAGGTTGGTTTTTATATT
GACCTACCTCAGCAATAGATGCGTGAATAATCCTAGATGAGTCATTGATTAGAGACTTAT
TATGTGCCTTAGCTGTTTTAGCTCGATCCTGTGTAACTAGGATAGATGTCCCTTTAATCA
ACATACTGGAGTTTGGATTACTCATTGTATCGAGTTCACCATGATCCACTGTTAATCGTT
TAATAGCTGTTTGTAGTTTAAAGGAACGTTTTAAACCTTCATTTAACTCTTGCACAGTCC
ATTCACGATCACGCCTAGACTGGAACATATAACCAAACATACTTACAGCATAGTTAAACT
CCGACATCAAGTAATGTAGCACTGTTAACCTTTTACCATACATACTAGTTTCATCAATAT
CGGTAGCATAAAGATGATGAGCCAAACTAGTCATGATCTCGTAAAGAAGTTCCCAAATAG
TACTTACATTGACACCAACTGTTTTAAGTTCTTCAATAGTCATTTCGTCTAGTGAATTAC
AGAAACTGTGTAGGTGTGAATCAATGTTTTCCTCTACTTTACCTTGGTGCTCAAAATCAC
CAAACACCATGTGACCTAGGATAACACGCCATAAGTTGGTACTATCTACATACTCAGGTC
GAGTAAACCGCATTGGAAACGCATCGACCACATACCAGAAACCAGCGATAAGTCGTGTGG
CAAAAATAGATTCTTGATGACGAGGCATAACAAGAACCATTTCACCGGTGGGATGTTTGC
CTTTTAACGTTGCACTGGAATAAATATTCCACTTTTCACGTGGATATTCTTCTTCAGGAA
AATCAGACAGTAGCCCACACTTAATATCTACATTAGCCCATTGTTTGAAAGTTTGAGTCA
CTCCAAACTGACAGAAGAAATAATGAGCTAAACATGACTCAATGTGTGGTCGATTATCCA
GATCTCGTTTAGTACGCTTAGCCATTTCATTGTGAATCTGTGACCAGATCACATACATGA
TTTTACGCTGACCATTGCACATGTAATGGTGGTCAGTTTGTTTAAAGGTTAGCTTAGTAC
GACGAAACGGGATGAAGATACTATCATTAAGTACAGAGAACCCAACATCAGTTAATACTG
GTGAACCAATATATTTCGCACCATTGATAGTTACCATATTGCCTCTCTTAAAAGCTGGTA
ACAGCATTGGGCGAGGATAAAGCATTTCCCCTTTATAACTAAACATTAGGTCAATCATGT
ACATATCAGTTGGAGCAATATTGGCAATACGCTTAGCATTATATTCCCGAGTAATCTCTT
CAAAATGCTTAAGCGGCGTACATGCACGATTGCCTTCATATTTGAAGCCATCGGGAAATA
GAACTGAACTGATATCAAATAAAGAATCAATATAACGCCTAGTCATATTAACACCAGTAT
TTGGATCACGAGTCATGGTGTGTTCGACTGTGATACCATTTGCTAGTGTTGGATTCATGC
AAGGCGTATTTTCACGAATCTTTTCAATTAGAAATGGATCCGGCATTATAAACTCCTAAA
CTTTTGGCAAAATTAAATCCATCAGTGAACCTACAATTTTAATGGATGATACTAGATCAG
AGGCAATGGAGTTTAGATCACCCCATTTTAGACCATGAATCAATACAACATCTTTTGGTT
TGAATTCTTTATCAAACGTACCAGCTGCTTTTTCCTGGGCTTCCCTTTCCTTAATATCAG
CTGCTGTTAAGAGCGCAGTCTTAAGACGTTCAATAACTTTCTTATCTTTAATTCCAACCA
TTGCAGCAGCTTCTTCATGTGTTCTAAAGAAACCATTTTCATGGAACTGTTCAGGAGGTA
TTACATATCTCTTTTCGCCATTATGACTGATACACCCATGCTTACCACGGATATTAACAA
TAAGACCAGGATCTAATGATGGATTATAGATTGACTCAATGGCCATAATTCTGCCAGCCA
TTACATAAAACAATTTATCTGGTTTATTGATGTCAGTATTATACGTTAAAGAATATGTTT
CATTCCATACTTGATTAGAAAGTGCTTCTTCTTCTGGACTAAGTCCGCTGTAACCAGGAG
GACTAATATTTCTATTTGGATAAAATTCAAAATACTGACTATACTCAGTTTTAAATACTT
GGATACCTAAACTCTGAATCCAACCGCCATGATACTGATCTACTAGTTTTGATAAGTCAA
TTGAATACCAAATAGTAATCTCAGATAGCTGATTATTAAACTGATCGAATGTCTGTCGAC
TAAATGACTGAATATATTCTAACATTTCCTCAGGTGTAAAACCTGGAATAGATTTAGCCA
TAACTTCATAGTTAAAACTATCATCACCACTCCATCGGTAAATGACCTTAACTACTAGTC
GATTAGACATTACATACTTACGGGATGTCCCAATATTGATAGCGTGACCAGATGAATCGA
CTACAGTAATACGATGAAATGATTCATTCCGATACTCAACAAAACGTGAGACAGGGAGAT
TCCAATTAGCGTATGGATCACCCTTAGTGTATGCAGTTCCCGATTTCTTATCATACGGGT
GATCGATAGTGGGCTTAACTGATACTTGAGTAAGCCCCGCAATTTTTAATGTTACCATTG
AAATCTACCTTAATCACAACGGCCTCCAAATCTACAATGTTGGGGAGCCTCTTTTTAGTT
TGATGTACGGACCTTCCCTTGAAGGATTCACTCTTTTCCTTATTACTTGATTTCTGCCAT
TTATGCGGGTCACTCGAACAATATAACTTTTCGGTGGCCCGCTTAAACTGTTTTTCTTGA
GGGATCTCCTCAATGTTTTTCTTGGCATAATCTGTAATAAAGTCCTCTAGCCCTTTGGGC
ATAAAGGCATCCTGAACAGGATGGAATTCTTCAAAGAAAGTATTAATGTATTTATCATCA
TCTACGGTAGACATCTTATTATCTACCATGGTATTTTTTTCTATAAGAGATACCCTTAGG
GCATCTTGCCATCTTTCAATGACTTCTGGAAATAATTGAACGTTCATTTGGATTAACCTA
TTTTTAAATTAGAAGATCATGATCATTACTGTAATATAGATCTTAAACTTTTTTTAATGT
AATACAACATAAAGCCCTCCCCGAAGGGAGGGCCTATGTCTGTTACTCTTCTAACTTCCG
GGCATTACCGTCTTCCAAATAACGGATAGTCCCATTTTCTAGATAACGGTAACCCTTTCC
AGCTCACGGCTTAAGATCAGCAAGCTTACCGTTGAACTGAGTTTCGCCCATGACTTTCTG
GAAGCCAGTGATCTTGAACTCTAGTGCGAACGGAATGTTGTTGACGTGTAGGTTGAACGG
AATGGCCGCGATTTCGCGAGTAACCTGGTGACCACCACGAGTGATCGGTAGGTCAGCGAT
AACAGTAGATACGTAGAAGAACTGACCCCAGGAGAGGATGTCGTTTTCTTGTTGTACTGC
GCGGGTCGGAATTACAACTAGCTTACCATCGAATAGCTGGTTGTTGGTGGAAACGATATC
GTACTTGAGATAAGCACCTAGAGTACGGTCGTCACCTTTAGTCATTAGATAGTTAGCAAT
CTCTTTGTCGGAGCAGAAGAGATACATCGGAGTTTCATCCTGGTTACCGGAGATAACACG
GAAGGCAGCTTCAATGTTGGAATCACGGTGAGCCGGGAATAGCTCAGCTTTAACACAGTT
TAGGATCGCAGCGCAAACGTCGTCCCAACGATCTTTAGACTTGATGGTGTCGATGACTTT
CTCAAGATCTAGTTCTTTGTAACGATAGGTCGGACGCATTACAGCGGATAGTGCGCCTTC
GATGATACCAAACTTCGGACGGTTGTAACCATTGTGTACAACTTCACGTAGTTGAGCAAG
GTAGTTAAGCATGCGCTTAACAGCGTTGTTGCTGTTACGGATGTTGGTGTTAACAGTTAG
AGCTTTAACAACCTCACCCGGACCTTCATCGGTCATGGTGTCCATCGGTAGAGTTACAGG
AGCGTGCATCGGGATCGGATGACGGAACTGTAGTGCACGGGTCTGTAGTAGGTGACCACG
CTGACGACGGTTAGTGTTGGTGAAGCGAGTGTCTAGTTCGAAACCGATAACAGCTAGGTC
AGTTAGCTGATCTAGAATAGCTTTAACAGCCGGGTCAGCATTATCCATTACCTGACCATC
TTCGTTTAGAACTTTATCGACGTAAGTGTCGGTAGCACCAAACTTAGAATCGCCTTTGGA
TAGGCTGATAGTACCACCAAAACCAACGCTTAGACGTAGGCTTAGTTTAGCGGTCTTAAG
ATCATTGATAACACCGTCAGCTGAACCATCGATGAAAGTGGTATCGCCACTAACAACTAG
ATCATCGCTATCGAAACGGATAACAGCGTTCCGGGTATCACCAACTAGATCGGGCTGGAA
CACAGCGCGAGGTAGACGGTCAACCTTGAACTTAACAACTTTACCGCCGAGTAGAACGAA
TAGGTTCTTTAGACGACCAGCCGGATCAATGGTGTCAGAAACTTCAAGCATGCCACGCTG
GATGAGTAGGTTAGCATTGGAGTTACCCATTAGATCAAGACGTACGTTCGCTTTTAGCGG
AGCAGTAGTGATAGTTAGGTTCTGCTCGTTCTTGATGGTGTACGGAGGAACAAGAGCCGG
GTCTACGAAGAAGTCAGCATTGGAACCAGCCGGATCTAGGGCAGGAATTAGCGCAATGCT
TTCATCGTCGAGGATGGAAGGATCACGATAGGCTTCTACCATGTTCACTTCTTCATTATC
CATCTTAACGCCGGATACTTCGTGGTAAACGTCTTTCATTACAGCGATGTAAGGAAGAAC
CTGAACAACACCACCTTCAATCGGGTTGATAACGGTGGTCGGATAAATACGCTCAGCGAA
TTCATCTTGACGGCTAGCAGCTAGGTTATAACCAATAGTTACAACACGGAAATCACGCTG
TGACTTCTCGTTATAGTTCTCTAGGCCAACACCATTTTCGAATACTTGAATGCCACCAGC
AGGGCCATTGAACTGATGCTGTACAACCTTAACATGATCTTCATTAGAAGCTTTAGCTTT
GGTAATACCACGTAGTGCACGGATATATTTAGTTTCATCAGCACAGGCAATAGCAGCCAT
GGTAGCAGCGGTGATCTGGTTCTCACGGACACGTTCTTCACGAGCACGTACTTGAGGATC
ACTGGAACTTACTCGTTCGAAACCATAATCGTTAACGAGCATTTGCATTTTGTTATAAAT
TGCAGCAGCATCTTGAACGTCGGTAGCTTGTACGGTACCGAAGTTTTCATGTGAAATGGT
GCTAACAAGGGAACGACCTTGACTAACAACGCTGTCATTTAGACCAATTTCACTTTCTAG
GCGGCCAATGAAATCTTCCATTGAGAAGACTTCGTATTTCTTTTCGCCTTTGTGTTTAAA
CAGTTCTCTTAGGGCATGTACGCTCATTTTTTATTCCTACGTAGGATGAGTTTTTGGTTT
AAAAATTTGGGTCTACTAAGCATCTTTTCCGGAATCAACCTAGCAGCTCTCCAAATAATA
GGTAAAAATTTGTGTTGACGCCACGGATTCACGTGGGCGGGTGTTCAACATTTCATTTAT
CATACTATCAAAGAAAGTATGGTTAAGTTGAATTGAGACACGTCTAGGATCGCTACTTGC
AATGTGCGCACTCTGCTGCACCGCAACCCACAGATTCTCATCTACAGGATATAGGTAATA
ATCGTACACTAAATTACGGTTACCTGCATCCCTAAGTTCATTAGTCGCTAGGCGGCTCTC
TAAACGATTGTGTAAATCCTTCATCTTAAATTGTTCAGGACCGTCTATTTCACCTAACTC
AGCAACTTTGATTATCGGGCTTACTGCTAACTTAATATCTAGTTTTTCTGGTAATAGAAA
GGGGAAAGCAGTTAAAGCCTGATGTATCTCCGCAAGATCATTTACGGAGGTTTCGGAAAC
TATATAGTTGGTGTCTAACAATTTGTTAAATTGTACACCTGCTGTTTTATATGATTCAAA
AACAGCTTTTGGCATAACCAGAACTTGGGTCATTGTGAAAGTACCTATATTGTAACTTTA
GGCTTTTGGGAACTGTCTACATAGCAATATAGCAAATACATTCACTAAAATTACTAGCTA
TCTAAATGATACACTGTACATCTCTTAATTTCACAATTGGAAATCTATAAAAATGTCAAG
TCCAAAACAATTACTCGTTTCATGTATCACTCTATTATGTTTAGAAAATCGAGAAGATTC
TCCAGTGGAACCATCCAATGAATTGGTTACTGAGATTCTTGATACTCTAAATGATAAGGG
TGGTACATTAGATGTAGATCATGGTCGACAAACATTTTTAGATCTTCGTAATCTACTAGT
GGATCTAAATAAGAAACAGAAAGCATATTTCCCAGCTACCCAACAGGTATTACAATCACT
ACAAGTATGTTGTCGTGAAGAAAGTTATCTATACGATGCTGTTAAAAATGCAGTAGAAGA
AGAATTTCCAAATGGCATGGCATTAGCCATGCGTGTAACTTCATATCGTCGTGATCTAAA
TAGCTACTTAGCTGATGAAAAGGTAAAAGCTATTGTAAAAGAATGTTCATCAAAAATTCT
TTTCAATAGAGGCTCTGCTGATATTCCGGCAATCATTAATGAAATGGCAACCAGAGCTGA
CCCATATATTCGCGCGCGTGCTGAAGAGAAACACCCAGCTGAAATGGGTGCACTTGATTT
TGGTAATTTAGATTCTATTGAAGGCTTCTTTGAGGAAGCTAAAACTATTCTTTCCCCAAA
TGGTGCTTTCCGTACTGGATGGAAAGGTTTTAACAGGATGCTTGGTGATCTGGGTGCATT
AAAACGTGGTGAATTTATTATCGGTGGTGGCCTACAACATCAATATAAATCTGGCGTTTC
TATGAGTCTATTTTGCCATGTGTGTCTATTTAATAAACCATACATGCGTGATATCAATAA
GAAACCATTAGTAATGTTTATTACTCTTGAGAATGAGATTCCGGATAACCTTATTTTCAT
TTATGAGTATATTTACGAAAATGAAACAGGTATCAAGGTAGATCGTAGTTCTATTAGTAA
AGCTGAAGCAGCTGAATATGTATCAGCTCGTCTCCGTGAAAATGGTTTCGAACCAGTAAT
GTATCGTTTTGACCCAACTGAATTTACGATTGCTGGTTTAGTTAACTACCTAGATACATA
TCAAGCACGTGGTTATGAACTACAATATCTCTGTGTAGATTATCTAAACATGTTGCCTAA
AACTGGATTAGTGACCAGTGTAGCAGGTGATGACGTTCGTCTCCTATTTAGGCGAATGCG
TAACTATACTGCACCACGTGGTATTACATTCTTTAGTCCGCATCAGTTAAGTTCTCAGGC
ATTAGAACTAATCAGAGATAATATCCCACCAGAAGACTTTGTTAAACAAGTTGCTAACAA
AGGTTACTATGACGGTTGTCGCCGACTTGGACAAGAACCTGATCTGGAATTCTTCTTCCA
CATTGTTAAAGTAAGTGGTAAGTATTATCTAACCGTACAACGTGGTAAACACCGTAACGT
TGTAAGTGATAGTAAGCATCACTATTTTGTTATGCCGTTTGATCCAGACCGTATTGGTGG
TATTAGATGGGATATCGATAAAGAAGAAAACAATTACATGGACTTTGTACCAAGTCTTAG
CAATATGCAAGCCACTGGTGGAGATGACTGGGGATATTAACAACATAAAGCTCTCCCTTC
GGGGAGAGCACTATAATTTTAATAGGTAATCTAAATGAGTGCAATTGATAATTTAGTAAA
TACTTTAAGAAAGAATATTAGTGAATGTAGAAAGTTTAATCGACCCCTATTTGCACGTGT
ATATGCCGCATCACAAAATTACGATAAAATCCGTTATGCTGTAGCAGAAGAAGCCCATTA
TTTTAAATATGGTAAATATGCAGAAGGTAATAACCTAAATATCGATGAACTTATCAGTGA
CCTATATCTGTACTACACTATCTATGTCGATGTGATCCGTAAACCATTACCCGATCCTAA
TGGGAATTTTATCAGCATCGTAAACCAGGATCACTATACACACATCTATTGGGATTTAGA
TCGGTGTGAATCTATTCCAGATGATGTAAAGGAATTAATGTAATATATTTAATTCTGATT
AATCCATTCGTCTAATAATCAATAAAGCATTTTAGCCCTCTTAGGAGGGCTTTTATGTCG
TATGGCTAATATGCTAGTGGATAACGAATAAAATCGATTATAGAGCAAATTAGAAGGTAT
TAAAGGCATAAAGAAAGTCTATCTCTAGACTTATTATTTTTAATTAAAAAAAATATAATC
TATACTGTGTCTCCTTTTAGGGAGACAGTATGTATTAGCTAACGCTATTAGAATAATGCT
AATATTGTTTATTATTAGAATAAGGATATACCTTCGGTATAGTTTATTATGAAATAAAAG
CCCCTACGGGGCGATCCGATTCCTCAGTTCCACATTAGGTAAGATTCATGAGTAATATTT
GATTACCAGTATTACTCAATGATACTGGTAATAATATACTAGATTATTAACAATATGTAT
TGATCATTCTGATTAAGTCAAATTAGTTAATAAACAAATCAATTATCAACGAGTGATAAC
GGGTATTGATTACTAGCTAAAGAGATTAATTAGGATATCTACATGAGGAGTCGCTACCCC
ATGTATTCTGGAGTTTCTCTTTAGCGGGAGACTTAACTCCACTTGGGAGCCGCTTTAGCG
GGCGGCTCTCACTTAAACAAAAAAAAGAATTCAGATAAGTCCCTCTCCTTTAGGAGAGGG
GTTGTTTATCATAGGCTTCTCCTTTCGGTTACATAGAACTTCTTCTGATCCATGTCAGTG
TATGTTACTATGAAATTGTCGAAGGGGTTGATGGATACGGCTAAACCTGCGTTGTTGACG
TATCCTATTGTAGGGCCAGCCCAATAACCAATGAAGTTACCTCTACGATCTCGACATTGG
ATAACATTATCGGCTTGCGTTTTCGCAACCGACATGCTATGGGTTGATCCATCGGGTCTC
TTGAAAAAGAAACCTACTTCCTGCATTCTGTGCAGGTCAGGGCTAACATTGTTAGCGGTA
ACTGGAATTAACATGATTGTTCCTCTTGTTAATCCAAGCCCACTTGGGCGAAAATGTTGA
GTATTTTTTACTCAACGGCATATAGCCCTACTGCTGTAACAGTAGGGCTAATTCTTTTAT
TCTTAAAAGTTTAACTGAATAAATGCCCTCTCCCGAAGGAGAGGGCTTATGTCGTTAATT
TATTTAACCAGCGATGTTTCCCTAACACGAGAGATGCATAAATAATTACTGTAATCGCTG
GGGTCGTACTCATCATACCCTAGACAACTTGTATGAATATATTCAGTACTGATATTAATC
ATATCAAGAGTAATACCATCACCCCATTTCTTAGTTGCCATCTCGATAATATCGGCGATA
GTATTGGCTACATAACAATCACCCAAGATATAAAAGGTATCTTCGGTATCATCCGGACGA
AAATGACGAATACCATTCTGTGTATATTCACCCATGTTAATTATCCTCTTTTCCTTCTTG
AGTATGATGAGTGGGCTCTACCCAGTAAAAATCAATAAACAGATCAACTGGTTTACAGCC
AACCATCTCGCTGTCATCGGCCCATTTACTTTCATCTACGATAATTTCTTCATTAGTCAT
TTGTATTTCTCCTTATTTACTATAGTAAATATTGTTTAGTTACATAGTCCAATTAGTGGC
TTCATCAACCATATCAGCTGCTTCTTTATCAGAAGCGTTCCAGAGTTTATCAGCCCATTC
TTTATCCAGTTCATTTTGGATGTTTTCAAGACGCATGTAATTATGCCATGCCTGACCCAG
CCGAAGATTCTTGTTATTTTTGTAATAAATACCAAACTCACCGCGAACTGATGCTGGAAT
TGAAATAGTCATTTCATAGTCTCCTTAGTAACTATTTGACGTGCTTCTTTATAAGAAATA
TTCGGATTATCGTTGATGTATTTAAGAACTTTCTGATGTATAATGTTCTCTCGCTCAGTT
AGTTCTTTTACTACTCTTTTAAAATAACCTGGTGATCGTTTCATAGTCATGGTTCTTCGA
TTAACAGGTTATTTGCCTCGAAAAAGAATGGGGCTGACCAGCTATAATCTGGTGCATCTA
CCAGCCTGACACTGTTCTTTATTTTGATAATCTTACGATCATCCCGCCAGTTTTGTGGTC
CATGTTTAGGAACAGTGTAGTATTCACCATCGGGTAGATTAGCGGCTTTCTCCCATCCGA
GTTCTTTAACGCTAAACTTTTTATCAATAGTCATTTTCTTTATTTCCTCGCTGTCATGAA
ACCACTCGGTGACCGTATCAGGCTGCGTCCTCATGATTTATGCTGCACGTGGGATTACTG
ATATCTTAAGAGTCAGATCAGCTGCGTCCAGTAGGTTTACCAGGGCATCCAGAGAGAACT
TGTCAATCTTGCCTTTGAGTAGATCATTCAATCTTGGCTGCGTAACATGTAGGCGAGCAG
CAGCATCTTTTTGTGGAAGATCCCAGCCCTTGATAGTACGGGTGAGAGCCCGCATGAGTT
GGGAACGGATACGCAGGTTTTCGGTTTCTTCTGTCGAGTCAACTAGTTTATCCCAAACAC
CGGTAGTACGTTCGTTTGTCATCTGTTTGTTACCTCTTTAGGTAAATGTTCGGATAATAA
ACTACATTATATTTAAAGAAATCACTTACCTTGAATTTTATGTTCGGTGCAGTGATTAGA
TAACAATAATCACCGTCAACCATAACGCGTCGATCATGGCTATACACCCTAGGGCCATGT
AACGGAGAAGTTACATAAATCCCATTGGGAAGATTCTGTAAATCTTCTTTTTTCAGAAAC
TTACCATTAGGATTTATAGTTGATGGATAACACCCCTCATTAAGTTTATACATAAACTAT
CTCTCTTTATAAAACCACCTATTGTAAGGTGGTTTTATATCGTGTATAATGTTCTTTAAT
CTTACTGACCGATATAGGTGCTGGTATACAGGTCAATGGTTGGTTTGTGAATAGTCAGAT
TGTATTTTTTAGCTAGCTCATCAATATCCTTGGAGCAGTCAATAAACTTACCAGTCTCAC
GATATCGCATTACCCATGAACCCCGAAATGGTGTATCATCTAGTGGATTATAACCATATT
CACGACATACCACAATTGCTTCATTTCGCGGGGTGGCTCCAGTAGTGACAAAGTAATTTT
CATAAACTGGAATCATCGATACATCTTTATTGCTCATAATAACCTCTCTAAAATTACCTG
AAGGGATATGCATGATATTTATTTTTGTTTTTGACTGATCATGGAGGCATTGGTGAAGTA
ATATAACGCATGTTTCCAATCTTGAGGGTCATATGTGCACTTATGAGCAACCACATAATC
ACCATCAATTTTTTTGAACAAGTTTACCATGATCACCTCATCCATATCAGTCCCGTTATG
CACAGTTTGATAATTCAGTCTCACCAACATGTCATCTACATTGGTTTTCAACTGGAGACC
ATCTTTGAAGAAATCACGAACACCATCCATGATTTGTTCATTGCGAGACAGGATGTTTTC
AGAGATCTGTTCGAACATACCCCTTGCACCGATCAAACGTAATTGATCGTAATTGGGTTC
ACCCATGCAGATGGCCTCATCATCACGATTACACATCTTCTCCAGCAGAACGATAGGGTT
ATAATCCCAAGCAACCCCACCAGTTACAACAGAGGTCAAATAGCCATAGAGACTGAGTTC
ACTGTCACGCTCATTTGCAGGAATCATGCGGTTCATAATTAACGATCCTCGTATTGGTGT
TGCAGCATAGCTCAGCAAGTCTCTTGAGCTTTCTCAAAACTAGCCATCGAGCGGGTGCGC
GCACGCTGTAGAATAGACAAGCCGTATTTTTTGAACTTCTTCTTGTGGATGAAACCAAGG
CGTTCGTAGATGAAGTCTTTACGGTCGGCGCGAGGTTTACCATCAGCTACGATACCACGG
TCGAAAAGAGCCCAGAACAGAGCGCTTTCATCATGCAGGTAGTTGGCCATTTCCTGAGGC
CACTGAACTGCGCATAGAGCAACGATTTGTTCAAGTAAACCACTATCTGAGATGGCATAG
TACTCACGACCCTGAACATAGTTCATTTTGTCGAAGTTGCACATAGCCAGTCTGCCAGTA
CCCTGGTTGATTTTCTTTTGAATGTGTTCGTTCATGGTTTGACCTATTTTCAGATTTGGA
TTAATTATAGCTAGACGAAGGTATTGCGTTCGAATTGGATGGAATTACGTTCAACAATAT
CGTTGAGGTATTTATCATTGTCGATAAATTCCCCAGTGAGCATGTTACGCAGAACCCAGT
TCCCCCGAAGTGGTATACCGCTGTTAGGGTTGATCCCGTATTCACGCATCAAAATCCGAC
GATTGTGGTCAACACCTGGCTCCATGTAAGATTCACTGATAAAACATTCCACCATGTTGA
TAACTTCTTTAGATTCGCTCATTGACTTATTCCTTCTTTTGCAGGTATTATGTAATACGA
TAATGGATTATGGCTTTAACCATCAGATCCTTTTCACGCAGTTGGTTTGAATGGATTTGC
ACTACGACTACGTTTTTGATATGAAATTAGTGCACCCCATACATTATCGGCTGATACATA
TTCAGGCATAGCTTTTTCATCATTGTAACTGACACGGTATGCCTTAGCCACACCTGTGCT
ATCTACAATGTGAACTTTTTCAATGACAAATGCTTTTCCAGAAGGCCCAGGGATATGTAA
TCCTCTTTTAAAAAGTTCTTCAAGAATGCGTTCTAATGCAATTTTAGCATTAGGGTAATC
ATTATCAAGTGACTTAATACCACCTTTAATTTTATTATCTAGGTCACTGAGTGCCTTTTT
AAAAACACTAACATCATGATCAAAACATTCGAGAGTGTGATCGAAGTTTTGCATGAGCGC
TATTAGTAGACCATTAGGAAATACTACTTTTGACATATATCACCTATTAGTAAACAGTTG
GGAACGTTTGTAGGAACCAATCATTAATACGTGTATTAACACTAGCCCCGTGTTCAGGCG
CTACTTTAAAACCAGCGACGATGTCCTGTAACTCTTCAGTGAGTTTGTTGTGTACTTTAC
CTTCACAATCGATAAAGTCTTCTGCGGTTGGCATAACCTCAGCGCGAATAACAGAGGCAC
GCTTAGAAAGCATTGTAAGAATTTCATTAGACACTGAAGCAGCATTACGCAACTTATTGA
TTTTTACATCAATAACAGTTTTATGATAGATTTTACCAACTGCACACATTGTAACTGAAC
CAACAAAAATACCAAGACAGAGTGATACTTTATCAATATTCATTTTGTATACCTATTTAC
GTTTATTGAAGTGATTAAAAAATAATACGATGTAGAAAATAAAAGGGAGTCCGAAGACTC
CCATTATCAGTTACACATCTGACACATCATCGAACAGATCAAGTTGTTTCCGATTACGTC
GTTCTTCTTCTTCGATACGACGATTCTCTTCTTCAATCTCTTTCTGCCGTTTGACAAGCC
GCCTGTGCAGACTCATTTGCCATGCAGTATCATAACGGCATCGCACTGACTCAATATATT
TAAGCCCTACTTCATTAATGCTCTCAAGTAGATCCAGTGACACAAGTGTCTCCTTGGAAG
CATTAATACTAGCTTTAAGATAATGAATCATTGCAGTTGCAGGGTGAAAAGGTAGCTTAT
CTACATCGATCGTTTTCTGATATGCTTTCAATCTATGTATGATAATTCGTCCATAATAGA
ATTCATAGAGTTTTTCTCTAGAATCCCAAGCAAGCTTACCGAGTACGGCTCCACTTACCA
TCCCTAATGTAAGAGATAGTTTAGAGTTCATTGTTAATTGCATCCTTAATCCAGTTACGG
ATTTTTGATTTAATTCGATGTTTATCACTGACGGTATTAAACATATCCAATCCATCATTA
ATGACGTACATAAGCTCTACTTCAATAAAGTCCGTCATTACTTCCACGGTGGTATTATCT
GAATTAGATTTGATATAATCGGAATAGTCCTTTACTTTTTCACGGATATTCTTTTCTAAT
TTAATCTCATTATAAACAGTCACACCGACTTCGAACACATAGATGGTACCAGCCAGCATG
AGACCAGTTTTTACAACACTACCGATAATGGAAAGCATAATAATATCCTATTAGTTAATG
AATGTAGATTTATTTTGATTATATTAAAACTTGATATTTAGAACACGTTTAGCTATTACA
ATACCAACATATACTCCTAGTGCTATCTCCGCATATTTGGTGATGACGTTTTTAATCTTC
TTGTGTTTAGGTGCCTCAGGAACATCCGCGATAAGTTTTTGAAGTTTAACTTTATCAATA
TTCATTTGTATTTTCCTTTTTACGATTAATTGAAGGTTTAACAAACTCATTCAAATATAA
TTTTATTATTGTAATTATATTTGAATGGGGCCTCACTGAGGCCCTATCCATTTTTACATC
TTACGAACTGTATCGAATACTTGATTCGTATAGTCATCGCCATAAATGATCGACAGCTTA
TCACGAATTACATCCAGTCGATGTTTTTCAATATTGCTCTCAGCAACAGCACTGTCAGTT
GTCTCAGTCATTGCAGTATTGACGAACATCATGAACTCATCTGATTCGCCATACTCTTTT
GAAATACTTTTAAACTGATCCCTGAAACCCATGAGCTTGTCAAAGTTGGCTTTAGTTTCC
TTAGCCTTCTTGTAGATAACATACCCAGTTCCAGCTAGTGATGCAGTGGCCAGAAGAAAA
GATACACCTTTTGCAATCGTATTGAATTTCATAATAAAAGCCCCTTTTTACATTAAGTGG
ATGATAATGTTTACAGTATTGTCACAAATGTAATATACTGTTTAAATATGTTTGAATATA
CGACATAAAGCCTTCCCCTGAGGGAAGGCCAATGTTAAACCGATGAATCCATCCACGGTG
GATAAACAACCACAATCTGGTTAGGCATGTGATTAGACCAGTCTTCAATGATAGTTCTAA
CATCAGAGAAATCTAATCCACCATTAGCACACCCTAGAGGTGGTATGATAATTTTCCAAT
CTGGATGAATACAGTCTTCTTCATTTTCCGCAGAATCCGATACGTTCTCCATCATCCACT
CTAGCCCACGTTCAATGAAACTAATTTGAGATGGGTTCTGCCAGTTATCCTTAGTAGGGA
ACATCATGAAACGTTTACCATCGGATGCTTTGTAAATAACCGGATTACCAATAGTAATAA
TTCTCTTTTTGCAATCGTGTTTGTATCTTTCAAAAAGTTCAGGATACTTTTCTTTAAACG
ATTTGGCTAAACCAGCGCCCATGACGCCAACAACATTAACAGTGATTAGATAAAGATCAC
CAGGTACATTGAATATATCTTTACCTATAATAAATTCAGCCATGATAATGGCTCCTTCTA
CAAGAGTACTAATGAGAAGATCAAAACATAGACCTTCTCATTAGATTGGGTGCATTTCCA
GGCTTATTGGATTTCTGGATTAGCGTTGTAGAAGCCAATATAAGCCTTATTAAATTTCAA
GTAATAATTATACTCTGAAGGCTCACCAGTTATTTCCCTAAATACCTTAGCAGTTATAAC
TTCGAACTTAGAACGCCGTAGCATTGGGAATAATTTCTTACTGCGCGATAGCTCACATAA
TCTAATCGAGATAGCTTGATCTTTAAATAAACCTGATTTGGTAAAAAAAGCGCCTTCATG
AAGCCATTGAATTACTTCATTAAAGTCTGCGCGCCATTTCCTATGCTCATTTAAAGTTTT
ACCATTTATAAGATTCCATAAAGCTCTAACTTTAGATCCAATAGTAAAAATACCTATTAC
CATTACTGCTAGACATATAGCAATTATAAATGACATATGTCCTCCTAAATACCATTGAAG
ATTAAAGTTCCTATTAGTGAGAGAATGAATAATACGACCACATGATGAAGTTTTATCCAT
GTTTCAGGTACTACCGGTTGTTTAGGTTTATTTAAAGGGATGTTTTCCATGTATATGCTC
CACATTAGTTCATATGTGTAATATACTGTTTAAGATCTTTCAAATACACCTTTCCAATTA
GTAGGTCTTGGATAGGACCTAGGTAGTGATTCAGAATGTATAATGAATCCCTCGATATCC
CCTTCTTTTGTTTTAACAGCAACTATATCTTTGATAATACCTTTTATTTGTAATAAGCTA
TTCATAATCTCACGATAGAGTTGATCAAATCTATTTGCAATGATATTAGGATTTATTGGA
TAACCACAAATTGATTTATAGAAACTACACATTACATCATTGTATCTATCTGGAACACAT
GTCCAAAAGAAATTATGTCGTTCTTTAATATAAAGAATGATCAAGTAGTTAAGATCATCT
TCATCTTTTGCGGTATAATTAAAGTATTGTTTTAATTCAGAAAAGAATTGTTGTGACCAC
CTCACATCAACTCGTATAAATAGTTGTTCCATAATACACCTAAATAAACCCTCCACTTAA
GTGGAGGGCTCTATTTCATTTTGGTCAGATCTATTTAAAAATATAGCTAATGTAACAACA
CATACATATCGATGCGGATTAGGATTATTATCACCAGCTGCAAATTGTTCATCTACACCT
AATAATACACCGTAGTAGGTTTTAACAACATTGTTGTCAACTGTTTGAAACTTAACAGGC
ATACCTGGTGTTAAGATATCAGCATCGCCATGGTTCCATTGTATTTTAAGAAACTGGCCT
TGACGCTTTGCTAACTCTGTATAATGTTTAAATGGATTTGATGTGGACCTTTGTTTAGTC
CATTGGATATTTTGGAATCCAGTTTTTAATCCATCGCCTCTAACCTCATACAAGTTACTA
GCTGCATCTACAAGCATTTTATTATCTTTACTAATAGTAAAGTCATCTAATAGCTTATTT
GCATCTGCGAATCTATAACCACTTCCATTATCAACCATCTCATAAAGAGCTTTATCTAGC
GAACTAGCATCACCTGTTGCCAGAATGGTTGTATAAGTATCACCATTCACATACGTTTTC
TCAACTCCGTAAAGGCGATCATTTGGAACGTTAATTATATTTAATGTCTTAGCCCCTTTT
TGATATTTCTTAGTATCATAAAGAGAATAAACATATAAATAAGATCCCTGAATATATCTA
CCAAGACCAGTGGCATAAACACCACCTTCCCTGTTCTGAAGTATATTCGGTAAATCTTTT
AATGGTGTACCATCAGGAATAGGTATTACTGGACGAACTTCTGTATTCCACCCAGGTTCC
ATATTGATGTCAATTACTCGGTTATCGTCAGCTTCGGTCAACTGGGATATTGATTGTTTT
AAGAATGCTCTTAAAACATCTGCTGTTGTTACATTTGTGAAGTTTTTACCAATGGTTATC
ATCAGTGATTGATATACACTTTCTTCAACAAGCTGAAATCTATAAGGCTTATAACTTATT
TGGTTCATAGCCTCTTTACTAGTCAGTTGTGATTGTTTATTAGTTAGTGTAATATCGTCT
TCAGGTGATAATACAACGAAGCACCTATAGCGTTTTACAGAGGCTTTACGAGACGTATCT
AAAAGAGATGAGTTTGGTAATAATGGAATAAATTTAACATCGCACCTAAGTTCATCTCGA
CGAGGTAGTATATCGAATTGAAAATCACCAGTACCAATAAGTAACTCTGTTAAGATAAGG
TCACCATAAGAACCATCAGCATAGTTTCTAAATGTATCGAAATAATCTACTCGTAATGGC
ACTACCCAATCGAAATCACCTACTAGAATTTTAGCTTCGATTTTATAAGCACTGTAATTA
TTAGTAGAGTTAATAATAGTATCAACTTCACGCATTAATGAAGATGCATCAACTGCCATA
TCAATCCTCCATCAATACGTATTTTTCAATTTCATCAACTAGTGACTTATATGGTTTAAT
ATTTTGTTTTTGGTCTTGAACACGCTTGTCTAGGAATTTCCTAGTGGCCATGGAGTTACG
ACGCATGTTCATTGTAATGATTGAATCAAAAACACTACTACGTCTTTCAACTTGTGGCTC
TAATTTCATGGCTGTGAAATATACTTCCATTAAAAGATCTTCTAAACCACGCAAATCTTC
AATAGGTGGAAATGTATTTGGATCAGCACCCATTAATGTCAGATCATACCAATCTTGAAA
ATGTCGTTGGATATCATGATAAATCTGAGCACAATCGGAATGTTTATAAAAACCAATAGG
GTGTCCTTCAGCTAGTATTAAAGCTAAACCAGCGGCTGTCTGACGAACAGTTTCTAACTG
GTTAGTACGTAGCCTATCTACTCTTTTATCGCCAGTTGTGTTAAATGGATTCTTACGAAG
ATACTCAGCGCTATATCCAGCGATCATAGGAACCTGCACCATGTATTGCAGGTTCCATAT
GCGCCATGCAGCTGAGTTACGAGTAACCAGCTTATAATCCATGGTATTACCTCAATGAGT
ACTTAATAAGGGATAATAAGACGATATGGTAATAATATCGTTCTAGGTTATCCCAACTAC
GTGAGCATTTTGCAACTTCTCTTAACTGGTCAGCATTTACTGCCTCACCATTAATCATCG
CCCAAACACATAACTCTAATTTAGACATAAGTTTCTTATCACCACGATAGAAAGCTTCTG
TAAAAACATAGTAGTTATCGCGAACTATTGGATATATATCAGCAGGTATTTGCCATGGTT
TAACTCTATCCTCATATTGTGGATCGATTCGTTTAAACCATGGTAAGTTCCTTTCAGCCT
GGGTCCTATATGGACCTGGCGCTTCACGCATGGGTCTGCCTTCACGGAATGGTTGTCCAT
CTGGCCGACACATGGTTTCACCATCATAACGAGATTCAACATCAATAGGGGCATCTATTG
GGAATACCATCCTAGCTATACCTGTAAAACCAATAGCCTGGAATACTGGTTTCCAACGTG
AAATCTTAGTAGTAACTAAATGTGCTTTTTCTGTTGCATAACACATTCTAGCTACATCTT
GTCTAACAATAGCATCCCATACTGTAGGTTGTGACATCACTGGTTCAGAGAACACATTTA
GTAGCTTTATTTTGTACATACGTGGATCAGCTGAGGCATCTACCATTTGTAGGAAAGCCT
TAACTGCGAAATGGTCGTATGTCTTTGTAAGTTGGTCAGGTACTAAGAATGTTTGATGTT
GAGGCGAATAAAACTCAGTGATATAGTTCCTAATTATTTCCTTATATAACTTAGTCAGAT
TAGTATTATCTTCTTGTTCTTGCTCAGTAACAAATGGACCACATCCATTCATCAAAGAGG
TTGAAGAGTAATAATAACTCATCTGTGATTTAGTTATTAAATCATCATATTCCTGCTGAG
TTACATAATGGATCATCTTCCATGTTACAGCATAGGTTGAATCACGCAAAATGGTCTGTC
GTCTAACAGACGTGATGGTGAATAATCCTGATCGTCCATCACCAACATCCGCTATAAACA
TATCGTTTTTTTGCGGAACTAAGAATGGATATGTAAAGCCTGTACCATCCACTTTAAATT
TAGTGGTGTTTTCAGCTTGGTTATACTGAAGAGCTTGTGTTACTTTTAGATCCATTCCTT
TAATAGCAATATACTGCTGTTTATCTGGACGACGATGAATATCCAATGCAGTTGGTTCTT
GATCTTCGCGTAGTATTTGTGAAAAGTAATCTACACGCCAGTTTGAGCCAGTTATCCATG
CCATCAAATCTGAACGTGGTACATACTTGGTATCAACAGCAATACCACGGAAAACATCTG
GACATTCTTTAGGGTTAACTGGTTTAACTTCAGGATTTACTGGAAGTTCTTCATCTTCAA
TTGTTAATAATGCCATTATTCTTTTCTCTCAGTAATAATGTTTCCATATAGAACTGTCAA
TGGTCCCATTAAGTAAGTTGGATCCCAATCTGGTCCAATACGTGTATTCATTTCTTCTCT
GGCATCGACAATATCTTTCCAGTTAATTACACCTTCAGTTGTCGGATTAAGGCACTGTGT
ATGACAGGTAGTACCTTCCCCTGGACATTCCTCAGATGGTAACCTATCCCTACCTTTACC
TAATAGCTTAACTTCTTCAAATGGTTTGCGTCCAATACCGACACCAAATAAATTAAATAT
AGTCCAACATACACGTGGATAACGTTGTAAACAACGCCATCTATCATCAAATACTAACAA
TAGATTTTTATGTATTGATATCTGTACATGATAAACTTTACATGGATCTAGCTTCCATTT
CGTTTTAAGCATCAATCCATCTAAATAACATTCAGCTCTGGTATAGTTATCATTTTCATA
TAACCTAACTTGGAAGATACCATTTTGGTCTATTGCCTTTGTACCTACCCCTTCAAAATA
TTCTAAGAAGAATGGGCTAAATGAATATCTACCTAATTGGTCAAATGACATTAGTGTACC
GGATTCAATTTCATCAGGGCACAGTGTTAATAGACCACTAAAGAAAGTCAACTGATTGAT
TGGAATATTATCAGTATCCCATGTATCAATATCTGGATGCTGAATATAAGGTATCTTCTT
ATCTCTAATTAATAGGAACTTATGATAAAGAGATCCTCTAAACTGGCTAACTTTACGATC
TACTTGCTGATAGTTCTCATAGATGTATTTAGGTCTAATTACAGATGGAACTAAACACTG
ATGCACTGTTAAAGGATATTCAATCCACACATGTGTTGGTCTAGCATATGTTAGAAAATA
GCTAAATCTAACATTATAGGAACCATCGCTTTCACTGTCATATTCAGGAGTAGGTGGTGT
ACTGGTATAATCATACCAACCAATAACATCGACCTGTCTTTCGTATATAACCAGTGATTT
ATTTTTTTGACTAAGATCAGCTAATTCTGTAGTTGGGAACGTAAAATATTTATTCAAATA
TTCTGGGAATGTTTCTTCCATTGGCCAATGTGAATTTTGAGCAGTATTATAGATAGCTGC
TAATATTCCTTGAACGGGCATTGGTACATCAACATGATAGGTTAATGTGTGTACTAATTC
CTGACCATTGTTAGAAAACCATAAACGCTGTTCATCTAACCATCGTTGCGCTAATGTAAT
ATTTTTAGATTTATATTCAATGTCAAATCTAACGTCCACAAATCTACGAACGGGTGTGAT
ACGTACACCACGTGTTTCATCTACGAACCATGGGAAATTCTGATGATTCTTAACATCAGT
TGATAATGTATATCGTTCATCAGCTACTTCATCATAAGTGATAATAATGTGGTCTTCTGG
ATCGAATTTAACCACATTGGCACTATCACAGCAATTACCAAACATACCGCCATTCATTGG
CACTGTTTGAACATTACCTGGAAATTGGACAAGAGTGTCTTCGGGTAAACCCATCATCTT
GGCCAATTGCCCGATGATATCAGCTGCTACCCGACGGGTTACAGATTCGTATACATCAGG
TAGTACTAGTGTTGTATTAGGCATGGGTTTAACTCCATGTGTTTAAGATCATAAGATCAT
GGTCTAACAGCATAAAAGGGAGCCATGAAGGCTCCCCGTTATGTTTGTTACTTAATGGCA
CGATTCACAGCAGTGTTAATTGCATTGGTAAGAGCTACAATGTAATCAACTAGAACGGTG
TGGTTTTCAGCCGATTGGCCAACAACTTCCCATACTGCACTAGCTAGTTGCCGGACTTTC
TTTTTACCGGCTTTACTATCCATGCTAGCCACTTTAGAGATATCACGGTTAGCTTGGTCA
AGACGACGTACACCGCGGTTACCGCTAACTTTTAGAGAGGCATTACCAAGACCAATTAGA
ACTTTAGAAAGTTTCATTAGTTCAGTAACGTCCTTACGGCTAACTTTAGCAGTACCAGTA
CCAGTAGCACCCCATTCACCAGTTGGAAGTGCAATAGCAGCTAATCGTTCAATATCTTTA
CTAGTGCGACCAGTTACATCACGTCCAGACTTCTCGAAGGTAAAACTACCATCTAGTTTT
CCACTAATGAATGCGCTTTCAGGATATTTCTTAACAGGTACTTCTAATTTAGTTGCTTCT
TCTAGAGCCTTATCAATAGCTTCTTCACTATCAGCTTCAATAGCCGTTGCTAGATGACCA
ACTAAACGTTCGATGTATTCACCATCGATTTTAAAGCATTTGTTAATAATATCACTAATA
CGACGAACCTCTCCAGCAACACCACGTACTAGATTATCATCACCTTTTAGAATACCATTA
ATTTTGATTTCTTTATTTTCAAAATTATCGGTGTCCTTAAGCTTAACTAGAAGTTGGTCA
GCTTTAGTATTAGCTGCGGCGAGTTCTTTTTGGTTAGCTTTAACATGGATGGATGCATTT
GCACCTTCAGCAATATTGTCGATAATATTTCGAACAAACTTACCAATAGTGCTATTAAAT
GATTCTAGTGAAGTAACCATCGCCTTATAGTAATCTTCTAGATTACCATAACCATAATCT
TCCATTGCTGGAATACCAGGTGAATAGACATCAAAGGCATTGTGTAGACGTTCTAAGCAG
CTATTAGCATGTACAAGGAACTGAGGACTATATTGCTTATGCTCTAGTCCATAACGCAGA
ATCTCGATCATAGCTTCATTTGATGCCTGCTCTTCAAGTAATTGACCAATGGTCTTCTTA
CTGTCCTCAACTTCATCTTCAAGATCATCAGCTTCAGCAACTGCCTCATCAGCAGCTTCA
TCTGCTTCTTCAACATCATCTTCAGTTACTTCTACATCGACATCTGGAATATCAATTTCA
CCTTCAGCTAGTTTCTCTTCGATGTCATCTTCAGAGACATCATCATCAGCTTCAGCGACA
ATTGTTTCACTATCATCTTCAACTGCACCTTCTTCAATTGTTGGTTCAGCAATAGTAGAT
GCTGTTTCAGTTTCAGCAACTGTTTCTTCAGTTTCAGCTTCATTAATTAATACATCAGTA
GAATCACTATCATCATTAGTTAATTCTTCTTCAGCTTCATCCCGAACTTCTTCCAATTCG
CTTAAGCCGTCTTCAGCTACTTCTGCTGTTTCGGCAGCTTCTTCTACAATTGGATCAGTT
ACAGCTACTTCTTCATCAACTGCTACGATTTCATCCGGTTCAGCTTCAGCAGGGATACTT
TCAGATTCCGTCTCTACTACTTCAGCTACTTCACTATCAGTTGTATCCGGCGTGTCTTCC
ACGGTTTCAACAACTTCTGTTTCAGCATCAGCTACAGCTGGTTCAGTAACATCGACTTCT
TCAGTTTCAGTAATCTCTGCATCAGGTTCATCATTGGAACTTTCATCAGCAGTTGTCTGT
TCAGCACCGGCTTCTTCCGGTGTCACATCATCATCGATACCAGGAACTGCTTCGCTTACA
ACTTCACCAGCATCTAATACTTCATCCGGTAGTGTATCCATAGTGGATGACACGGGTTCA
TCACCAGCTGGAAGTTCTTCAGACAGTGGCGCAGGAGGCGGAGTTTCGTCACCAAGTGGG
GTTTCTTCAGTGGGAGTTAATTCCACTGCTGTTTCACCAGGTGCTTCTGCAACAGGTACT
AGTTCAGTATCATCAGCCGCATCTTGTGCAGCTTCAATAATTTCAGTGGTTGAATCTAAA
ACCTCTTTACCACCTTCAGAAATTGTACCGATTTCTTCAGCGATTTCAGCTTCAGCAACT
TTAACTGCTTCTTCGCCTTCTTCGACACTAGTGGTAGCTAGCGGTTCAGGAATACTTTCC
TCAACAACAGTTTCTTCTGGTACAACTTCTTCAACAATTACTGCTGACTTATCAGCAGCA
TGTGCTGTTTCTTCATGTTCTTCAGCAGAGATAATATCAGTATCTGTTTTAACAGTTTCA
TTCTCAATAGTTGCAGATGCATCATTATCTTTCTTTAAATCTTGAACTAGTTCATGATCA
TCTTTAACAGATGTCTCGACTTTGGATACATCCTGTTCCACAGCCGTACCATCTTGGTTC
TCAAGGCTGGCTACATATTTGTGAATATTTACCATCATGTTAATATACCTTCTGTACAGA
GTTTATGAGTTATGCTATTCGTCTTAGTCATAACTCCAAGCGACGAACGTTAACATTCAA
AATATTGCGCTGGAATCTTACTTTAGATTTTCATCGCATACATTGAGTATGGCAGTCAAA
TTACGACATGTTAATTTAAATAGGTCGTGATAAGGAATAGCCAACCAATCAACATATGTT
TCTACCAATGAAACAAGTTCTTGTATTTCTCTATCAGGTCGCCCTTCATTACGAGCACGT
GTTAGTTCATCTCTAAACCTGATTAATGCGCCTTTAAGAGTCCTTAACCGTTCATTTCGA
CGAGTACGCATTGACGCAGCATTTGCACGATTGATCTTATCAACTACCTTAACAACTCGA
TCAATAATACTTTCAGTAACTTGATGGTTGAAATGTTCAAATTCTATTTCGACTGGTAGT
GGTCTAGGGGTTTCTTCAGATGGAACTAACCGTGAAGAAATATCCCTACACTGATCATAA
GCACTTGCATTCTTATCGGGATTATAGTTAATTACAATTTGATGATTACCTAGCAAATGC
AATGATACAAATCGATTACCTTGATCGCGATAAACAGATGGTGTGGTTATTTTAGTTGGA
GCACTATTTAATAGTAGTTCTGCTAATGCATCTGGACTAGCATTTGGATTCATATACGAA
GGTATGATATTAGCTGGCCTTAGAATCACATTGTCTAATCCATTAATATATCCATCAACT
ACTGTCTCCAATACGCGTAAGTGAGATAATAAATTAGCACTATTGGTAATAGGTTTATAT
CTAACACTTAAGTTCTGAATACGAGTTGTAATTAGGAATGTAGGATTCTTATTTTTACGA
GTTCTAGCACGACTATTAACTCGTAAGTTTTCTGCTCGAATTGCAACATATTCAGCAGTA
GCTGCTAATACTACTCCACTATCCATCAGTTTCTCAATAGTGGTAACAAATAGTTTTATA
ACTCGATCAATAACATGTTTAATAGTATCACTAATATCTTCAGTAGATACAACATCCTCT
AATTCTTTGATAACCCCTTGGATCTGATTATAATCTTCCATGCCGCCTAATAGATCCATC
ACTCGCCTAGCTAACGCTTCATCGCCTGATAATAAATCTGCAAGTCTTTTAGGTTCATCA
AGATCAATAATCATTTCATCTGGGGTATCTTTATAAATATCAATTAATTCCATTGCTAAC
TCCTAACATAAGACGGGACTCTTCCGAGCCCCGTCGATATGTCGTCACTTATCATTATTC
TGCTTGGAATTTAGTGTTAATTACACTATTATAAAGTCCAGTTGCAGTATTTGCGTAACG
CATCGCTTCACGAATAATGGAGTCATGTTTAGGTGCACTATCAGTAATAATAGACGCTAC
CTTACGTGATACTTCTTCGATCTGTTCTTTAGAAACATCGTCGATTTTATCACTCTCTAG
TTTCCGTGAAAGTTGATCAACATCATCTTCAAGTTGCTTAATGGCTTTAACAATATTCCG
ACCGCCAGTGATAACACCAGCTGCATCATCAACCAGATTACGTAGAGCTACCGCTTCTTT
CTTAGCTTGACTCTTATCAAAGTTCTTTAAAGTCACTTCGGTGCCAGGTTCTGCGGCTGT
CTCATCATCCGTTAGATATACTTGAGTAGCAGTCGTAGTTACAAGCTTATTACCCGGTAA
AGTGTTAGATGTACTGGCGTAGTGTTTGAGAGGCCCATCTTGAAGTTTGTCCATCTTCTC
AACTAGTTCACTAGCATCATTACGCTCTGGATCCCAAGCTTTAAGCACAGTGCCAATATT
CGTTAGGTAGGTGGCATAGTCTTTTGCATAAACAGATGCCATCCATTTAACGATCGGACC
ATATCCAACATTAGCTGAAGGCTGAATGAATTTACCATTAGCAAATATGGGTCCACCATT
TTTAACAGGAACCGTTAATTCACTGGGTATATTTTCAAACTTAGCATTTTGGATAGCTAA
AATGAGTTCATCAACTTTTACACTCACACGCGGTACACTATTCTTAAGACTATTCCATAC
GTGACTAATAATTTCACGTAGTTTAGCAATAGCTTTCTTGATATAAGCAAGCGCCTTACG
GCTTAACTCTTTAATATCCTCAGTTGAAATCTTAACTGGATATAAATGACTTTTACCACC
AGTTGTATAGTTTTCTAATGAGCTAGTTAAAGTATTATCACCAAGTACATGACGATGTGG
TAAGAGTGCAGAATGAATAAATGCAGCTGTACTTTGACTGATACCATTAATACCAGCTTG
TCGAACAAGAGCTTTAATTGACTCTAGTGCATATGCGGTATTTAGACCTTGATTGATATC
TTGCACTGCTGTAGTAACTACTTGTGCATTACCAATGTCCATGAAATCAGTAGGTTTATC
CATATCCACTGCAACAGCAATCTGCGGTACCACGCCATTATGCGCTAGTGGAATAGAACT
ATCTTTGGCAGCCTGATCAGCGATTTGCTGAGTTACTGTTTCACCACCTTGTGGATCTTC
TCCTTCAGCACCTGCTGGAATAACTGTTTCAACAGCAACATTAGGTTGTTCAGGAATAGG
AGGTACTTCTGTTACTACATCTGTTTCAACTACGGTAACCGGTACCGCAGGTTGTTCAAC
TAGAGTAGCAGCTGGAGTCTCAACAATAACGCCGTTATTAGGAGTATTAACAATAGTGGT
ACCTGCATCCACTGGTGCAGTTGGTGTTACACCAACATTATTGTCAGCTACATCTTGAAT
AGTATTTTCAGGTACAGCATCTTCAGAAGTGCAATCGCCACTAGTCATGGCTGCTACTTT
ATCAACTGCTGTTTCAGGAATAGGTACCTCAGTATAGTCTTCTAGACTATCTAGATACTC
ATTGAGTTTAAATGTCATGTTATTTCCTCAAGGAATTTCTTTGCGCGCGTTTAACAATAA
ACCATAGAATTAGGTACTTAGATAAAAATGAACACTTAGATATATTTATTGGCCATATCT
TTCTAATTCCATATTACAAACAGCATTTCGTTGCTTTGCAATACGTAATAGGTAACTAAT
TAGTGTTGCGTATTCTGGTGACATATCGGTAATAAAGCCATTAACTAAAGATATAATCTC
ATTTGCATCATCACGAGCACCTTTCCAAATAGCTTTAGACCTACGTAGCTCCATGTCCTC
AATGCCCTGTGCAACCTTCTTCAGTTGTTCAAGGACATCTTTTTCAGCTTTAAATAGATC
ACCTAAACGACGAATAGCTTCTTTATTAACTTCTAATGTTTTACGCACTTCAACAGGCGG
CCTTGGCTCGATCGTGATTGTATCTGGACCATCACCATGTTTATCTTCACCAAGTCGTGG
AGCATATTTATCTTTCTGGAATATAAGTTTACTATTACCAGGTAGAGAAGTATCTTTTAC
TTTATCTAACTGATTAGCTTCACCAATAAATTCAAAAGCCTCTTTAAACTTATCTAGTTC
ATTATCTTCTAAGTCGTAGTCTTTAATTAATTTAACTACTTTATCAATGTTTGATCTAGC
TATATTTGGCCATTCTTTAGCTAGAAATTGACTAACTTTTGTTTCATTAGTTAAATCGTC
TAAAACAAATTCATCACCAATGAATAACATTTTAGGATTGTCAATTTTAATTGACATATC
AAAATCAGGTGTTACCCTTTCATTTGATACAGTTGGCTTATTGATTAAACTTTTCGCTTT
TTCAATTAACTCATCAGTTTTATCTTCAACTGATTTGATTCCAGTTAGTACACGCTGTGC
CGCTACTTTAGCTTGTTCAATAACATGGACTATTAAAGCAAGTATCTTTTTACCTATACT
TTCAATACGTTCTTTTATTTCTTCTTGAGAAATATTTACAAAACGCATAGCGCTGCTAGG
GGTTGCATTAAAATCTTCAATACTAATCTTTTCAAAGCCGATAAGCTTATCAATTGATTC
TAATGTAACGTGCATAAAAGCAGCTGATTGTTTAGTAATACCTCTATCACCAGCGGTATT
TAATAAATCTATAAAACATTCTAAACTAGTACGCGCATGCAGTAATTGATTTAGCTGATA
TGTCATGTTTTGAGATGGAGGTGTATCATACGCAAAGATATTTAAATGATCATCATCACT
ATCTAAATCTTTACCATCCACTGGTGTAGGTCTATTATCAGGACTTTCTCGGGTATCATG
GGGTGATGCTGGATATTCTTCTGATGCGACGTATGTTTTACCAAATGAATCAACTTCAGT
AACTAAACCACGATCTGATTTCCAATGGATATTAGGTTTATGTGCTTCTTCAACATCTAA
CCCATTATTAGTTGCTTTTACATCATTTGGTAATTCATCAATTAATTTGGCAGCTTCTTC
TGGTTCTTTAGATATTTGCTTGTCGTCTGTAGCAGCGTGCTTTAGTTTGGCTTTCGCGAC
TTTTTCTTTTACTTCGACAACACCATAACCTTCTAAACTATCAAGTAACTTATTTAAGTT
CATTTACAATTCCTCAAGAATACTTAATTACATAGCATAAGAGGAACCCCGAAGGGTTCC
TCATTATGTTTGTTACTTCTCATCATTCTCAGGTGCTTTAGAAGTTTCTTTGCCGTACGC
AGCTAATTCATGTTTAACAATAAATGTATACTGCGCAGCGATGCATTTAGCAATATAGTT
AACTAGTGCACTATTATCAATACCACCAATATTCAGTGCATCACGCGCTGTTTCTTTTGA
CATGCCTGCTTCGTCAGGATTCCAATCAGCTAGGGCCTTTTCAAGATTCTCAGCAATCTT
GTAATCAATCTTATTAAAGTCCTGTAGTTTAATAACAAGACCTTTAAGAATATTAAGATG
TGCTAAGATTTTACTCGGTGCACGGACATCAACTTCAACTTCATGTAGATCCGTTTCCCC
ATCACCCTCAACAACTTCCCACTTATTCACACCTGACTTAGAAGAAGTAACTTCTAACTT
AACATTACCAGGAGCTTTCTCAACGGCTTTATTAATATCTTCAGCCATCTTAGCTTGTAA
ATCACTGGTGACTTGATCAATATCAATAGACTTGTCACCTTTGAGATAACGTACTCCAAG
TTCGCCATATTTCCTAAGAGCAGATACATACTGAGTTGAGAATACAGTCATGAAGTCTGC
AATAGTCTTCGGATTATTTGCAATAAAGCCACTACTAGATACCATATACTCAGAAGGAGT
GAACTTAATCTCTTCTTTCTTTAGATCACCGGCTTTGAGTGATTTAATAGCATCAATAGT
TTTAGTAATACGCATATCGAGTGCAATCAGCTTAGGATTAAAATCTTTAATCTTCTGCTT
TATCATTGCAACAATTTTCTTGATAATCTCTAAAGCTTTCTTACCTGCTTCTTTTAGTTT
CTCTTTGAGATCCTCAAGAGAGATAACAGCTGCTTTCTGAATAGCGCTGCGTGGAGAAGC
ATCGTAATTCTCAAGCGCGGCAGTGAGTCCAGATTTTTCAATACCTAGGATACGATCGAT
TGATTCCATGCCAACATGCATGAAGGCAGCTGCTTGTCGAGAGATACCATCTTCACCAGC
TTGAAGTAAAAGACCTTGGAACTTTTCAAGTGCTTCTTTAGCATCTTCAATTAGCCCTAA
TTCATCTTCAGCTTGAACAATAGTTACTTCAGTATCTAATGCAGTTGGTTGAATAGCATC
ATCTGCATCAAGAACTTCTTCTACGGGATTATTTTCAATCTGATCTACTTCTGCTAAAAC
GGATGATACATCAGCAGAAGTTTTATTTTCAACGACTAATTCAACATCACCATGAATCGT
AGTGCCTTGATCTTCAATTGATTCAAGTGATAGTTTGTCTAGCATTTTAAGTAGAGACAT
GTTAATTACCTTACCTGGGAGGGATTATTTACTTGTTCTTGCGTAGGTCTTTGAATTGGA
CGCTGGTAAGCTTTTAATTCTAACTCGGTCACGAATACTAGTCGACCCATTACTCTGACT
AAACCAGCAAGAGCATTACTAAAATCTGTTACAACGCGACTTACATTATTGATCATTAAT
GTAATTGAATTAATGATATTTGAGATAGCAGGGATGCCATCAGGTGCATCAGGATCTTGA
ACTTTTGCTTGACGATTTCGCATATTAGATTGTTGTGCCCGAATCCTACCAGCTTGTTGA
CGATTAGTCTCAGCTAACTGCATTAACCTACCAAATTCAAAATCTAGTTTAGTTGCATAA
TCTTTTCTAGCATCTATACGTTTAGCCATTTCGCTTAATAATACTAACCGTCTTCCAATT
GAACTCGTATCATTAACCTTAAAGGTATTGTTACCTTCAGGTGCATCCTTCATAGTAGGA
ATAGTATAAAACTTAAAGGCAAAATCACGGACAGTGTTTACTAAAAAATCCCAATCCCTG
ATCTCTTCAGTCTGTGTTTCAGTTGGCCCTGCACCAAATAAAGTTTTATTACCTTGAACT
GGCATACTACGATAAACTGTAGAACTTACTCTAAATCTATCATCTTTCTTAATAGGCACT
GCACCCTTCATCCAGTTCTTAACATTAAACTTACTAAAGTCTTGTGCAGCTCTATCGGTC
CATTTTTCATCAAATGATAATTTCCTAAGGATATCTGCCACAGCTTGGATATATAAGAGT
AGGGATTTATCATAGAAAGCTATCAAGTTGTTAACTTGCATGAGTATCGGATCAACTGTA
GTCGGTTCGAATTTACCATCAATACTAAATCGTTTAGTATTTTTAAATTTTAATTCTTGC
TTAAATGGCTCATGCTTAATATTTTCAGCTCTTTCTAAAAGCATGTTTATTCGTTCAAGA
GTACGCTGATTACCTTGTGTAATAACACGTGCATACTCTTTTAATTCATCTCGATGCTTT
GCTTGGGATTTTTTCATTTCATCCCAGGTATTTCGTGCTGTCTTAGATAGATCTTCTAAT
GATACATTCTCAGTTTTTAGAATGTGTTCACTAACAACATCTTTGTTATCTGCATATTTT
TGAAATAAGCCATCGGTATAGGTTTTAACTAAAATGTCTTTTTCGGTGCATTCTAATCTA
CTTTGAATATCTTCAATTGATGGCAATAATTCTTTTAGATATCCATCGCATGTAGCGATC
ATATCGACGGGGCTGTCCCCGTCGATTGATTCAAGTAAGACCGAATGACTAAGTGAATTA
TTAGTCATAGATAGTCCTCAGTCCTTATCTATTACTTCTACAGATCCAAATAGTAGATGT
AGGGTATACATTAGATCATTCATACCGTTTTTGTGTTTAACCCAATTCTGGATCATTGAA
ACGGTATCTAGATCTAATTTTAACTCATTAAAGAGAGTAGCAATTTCGGCGCGCGGTTCA
ATGAGTTGTGCACCAGCATCTGGTTCAGTAGCTAGTAACATTGGCCATTGAGTAATTGAA
ATACGTCGATGACCCGTAGCAATGTATCGAACAGTATCTAATAGGAATTGATAATTATAA
CTATCGATATTACTATTATTGTCCTGTAGAATAAACCAATTATAGTTTCCGCTAAAAAGA
CGAATAGCACAAGCTAGAACTTTCTTATGGAATTCCCAATATGCAGTTTGTGCAGGAAAG
TTGGTAAAGATAAGATATAGTTCTTCAACTTGAGGATCACCGGGACGAGCAGTGAACCGT
GAAATGGCCTGTTGTTGACCACCTGAGTAATTACGACCAAATGGGCGTACAGCATTAGTT
GCTGGCATATCAATGCCCTCCATTAGTGACCAAGAGATAGTAGATCACGATGGTTAGCAA
AGAACTCAGATGCGCGATCTTGGATCATACCTAGGCGATAGTTATAATCAGAGATACGAA
TTTCATACTCTTTAATAAGCTTCTGTAGGCGTGCATCCACTTTACCATTACTTTGCATTT
CCCGCATTTCTTGTAAACGTAGTTGAAGTGCAAGGAATTCTTGCTCAGCTTCTTTAAAAC
GTTCAACCTGATACTCAGCTAAGAACTTGCCAAATAACACGAACGGGTTCTGACGAGGTG
AGAAGCCATCCATGTTAAGTGGATCACGTTGAGCTATAGAGAGAGCACTCACAGCTACAT
CATAAGTACCTTCATTGACTTCAGCACTAGATGCACGGCTTAAGCGTTGTTTCAGTTCAT
TAGTCTTAAGACTCATTGCTGGATACAGAGTAATGAATTGTGCCATATTGGTGTATAGCC
ATTCTTTCTCAGCACGAGATGATTTTAATTCTGTAGCCTTACCTAATTTCATTGCTTCTT
GTGCAATTAGATTTAGTAGTAGTTTACGGCCATAACGAATATAGAAACTAAGACCATCAA
CAAAACGTAGCATATTTGCACGGTCAAAGGTTAGATTAGAGTTAGTAAACTGAATAGCAA
ATAAACGCCGGATTTCGCTTTCGATCATATCAAAGCTACCACGAATATTTGAAAGAGTAT
CCAGTACTAGTTTAATCGGTTCAGTATTAAAACTAATCGCTCGCCGTAGTTCAGTAGATA
ACCGCATACCTAAATCTGATTTAAGTTGCATATTACCAAATACTTCACCTACATCGTCAA
TAATTGGTGCGAGAGTTGCATCATATTCTTCACGTAATGAACGGATTTGATTTAATAGTT
CACGACGTTCAGTAACTGGTGCGAGTTCACGTACATAATCAATAATTCTCATCACTCAGT
CCTTAAATATTGGTAGACATGGTTTTATTCATCATTTTAAAGATCTCAGTGATATCCGGA
CCTTTATTCTTTTCAGCCATTTTAATTTCATCAAGTCGGTGAGATGTAGATAGATCAACC
CCACGATGATAAATAGTTACTCGCTCATAACGGTCATCAATAACAACAAGCATCATTAGA
TAGCTATTGTCAAAGATCTTTTGCCGAGTGGCGAAATCATCAATACGACCATAAAGAGAA
TTAGAAGCAGCTTTAAGAGTTGACGTTGATACAATCGCGATGTTTGATGCATCTGCTAAT
GAAACTGTGCCACTACGAACAGATTGTTTCCAGTTGTTACGGCGACGATCGGTGATTTGT
TTATAAACACCTGACTTATCATTCATTAGAATGCGATAATGTTCATCGATCATATCTTGA
CCTAGAACGAAGTCACGCCAGAATTTAATTTGACCAGTTTTTACTAGAAATAGACGATGT
AGCCAAGTATCTCGTCCACCAGCACTAAAGATGTGCGCAATAATCTGAGGACTAACAGCG
GCTGGAATTAAACGGATCATAACAGGAATTTTAGCTTTCTGCTTTCCTGATTTAACATCA
ACGTTAACCAGCTTACCAACGGCAAGGTTTTCAACTTCATAAATCTTTTGTGTATCACCA
CTAGAAATACTTTGTGCACTTGTACTTTCGTCATTCGCTTCCATTGAAGCTACCCAACGC
TCATGTGAGTGTTCAGCGACGATATTTGGTAAATGCACAGGCTTCTCAAAAGACTCTAAT
GAAGGAAGACCATCAGAATACTCTTCGGCAGAGAATACACTAGTGCGAGTTACACCTGTA
CGGTTAGGATTAATAGTATCGAATACTTTTAAAGTATCAATCTTATCCACACCTAGAAGC
ATATTAACAGCTTGTAGATAATAACCAGTAAAAGACGATGAAACAAATTTCATAACGTCT
TTCATGTAAGGTTGATCAACTAAGGTTTGGTCTACGATGACCAATGGTTCAACACGAGTT
GGACGTGCTAGATCGGTTAGAGAAGAAATCTCTACACCATTTTTAGTGGCTTGTAGGACA
GTCTGCATTAGACCACGTACACCTTGATCAGCAGCAACAGTCATCAGAGCAGAACTTACT
GCTCCGGCGATTACAGGTAATGGCATTTTTCTCTTCCTATATGGGTTTGCAGAGAGTTAT
AAAAAATGGCAGCATCGGAATTTTTAGATCAGATCATACAAAACATTGGTCAGTCGCCAC
GTGATAAAGCCATCTCTGATTCTATCAGGGGGCTTAATATCATTGGCCGTAACTCGACCA
TTGCCCCAAATACAGAGAACCATGGTTTTACATTCTTTACCAGGCCGATACTTAATTTGT
CATACGATAATTGTAAGATCGATAGAAAGCTCACAATGCTATTAAATGATAATCCTTATA
GCTTATCAAGATCAATAAGAGCTATCCTAGATCCATGGTCAAATAGGGATGGAATGAATG
CGGTGGATGTTGATCCACTTAATCCATTTATTCCACTTTTATCAAACAACCTAGTTAGTT
TAACAGGTTGGGAAGATTTCCAATTAAACCTAGCAACAACTAACCCAGGTATATATCGGG
ACGCTATGTCATATGTAGATGATGTCCCGTATCAATTTAACACATTTGATTTGCAAGCAA
GCTTCCGAAATATGGAAGGTGACCCTATCACTAACTTGTTATATATGTGGGAGCGCTATT
CTGCATTAGTGAAAGAAGGTAGGTTATGGCCTTATCCAGAGATGATCTTACTAAAGGAAG
TAGATTACAATACTAGGGTATGGCGAATAGTCACAGATGTAACTCGGACATATATTACCA
GGATATTCTGTTCAGGAGCATCTATTTTCATGAATGCTAATACTGGACGCACTGGTGACT
TTATTGGTGATGGTAGTGAAACACCATTCCAGAATGCGAATGATTTACTATCTGTATCAA
TACGATGCATGGGTATGGATGTTTATGATTATATTCTGTTCTATGAATTCAATGACTTAG
TTGAGGACTTTAACCCCAACATGTCAGATGAACGACGATATACACAGATGCAAAAGATTA
AAATCTATGAACGTGAATATTTTAGTAGATCAAAAGTATATCCATACATCAATACAGATA
ACAGTGAATTAGAGTGGTGGATATCTAAAGAAGACTATAACGCCATGTTACCTGGTCTTT
TACGCAATCCCCCACCACCTCAGAAAGAGGGTTAATTAATGGCAAGTGAATTTAAAAATC
AGTTATTAAACCTGAGACGAAATCCAGTACTGATGCAATCATTAATGTTATCTGAACTAG
ATAAACAACTTAATGGTGAGACTGGGGAACGTTATGATATTCCTGATTCAGCAAACCCTT
TCGTTTCATTGATGGAGATGGGTGTTATCGGAGTATCGGCTGCATTTACTGAAATGGAAG
CTTTAAGTAGGCGTCTTTATCCACGCTTAGCGATTACCAGTGATGAACTTTATCTACACA
TGTCCGATGAAGATTATATTGGTAGATTTGCTATCCCAGCACAGAACTATTTTAACTTCA
TTTTAGATTATGATGAAGTTATTAAGTATGCTGTTCCTTATGGGGATCAAGGTCAACGTA
AATTAGTTATCCCGCGTTTAACTAAATTTACAGGGGCGGGTATATCATACACCATGCAAT
ACCCTCTAGAACTGCGTGTAATGCGCCATGGTGGCGTTGTAGCTGAATATAATACCGATA
GCTTATCTCCTATTGAAACGCTCTCTACGAACATTGCACAGATGACTATGATCAATGATG
GTCGTGGACATCGATTAATGAATCTGATCATACCTGTTAAACAATTTGATATTACTCGAT
ATCAAGAAACACTTAATCCATCTAATCTGTTTGAGAAAGAATATGTTTTCTCCGATCAGT
TTTATTATGCACGTGCATATATTAAACGGACAGTAGATGCACAGGAATGGGAAGAAGTAA
TAACTACACATACTGATCAAGTATACGATCCTCTTAATCTAACCGTAGTTTTAAAAGTTA
TTAATAATAGGTTACAAGTTAGTATACCAGCTATTTATAATACTACTGGACTAGCTACAG
GTGTAATTCGTATTGATATCTATTCTACTCGTGGTAAGATTGAAATCGATTATGGTAGTT
ATCAACCTGACCAATTTACGTATAGTTTAAATGATATCGACGATGATCCAAAGTATACTG
AACCACTTAAGAAACTTGCTCGAATAAGTGCACTTAGTACTTATTATGTATCTGGTGGTT
CTAATTCAATGGACTTTGATACGCTTCGTAACCAGGTTATTGATAATACCACTGGTCCAC
AACAGTTACCAATCACCAATGTACAATTAAGTGCTGACTTGGCTAGACGTGGTTATACCC
TTGTAACTAATATCGATAACATCACAAAGAAACAATATCTTGCTAGTAGGCGACTAGGTG
CTCCTCGTACACTTGACATCATTTCAGGTGCAGGTGTAGCAATGTCTCAGCTACAAGTAT
CGATGAATGAATTAGTTAAATCTAAGCATGTTAAAGATAATGGTGATAGAATCACTATCC
TACCATCAATGCTCTATAGGTTTAGTAATGGTCGTGTATCAGTCGTACCAGATGCACAAT
TAGATTCTATTTTAAGTAGTTCAGCAGAATCTATTGCACGTCAAATAAACGACTCACGTA
CAGTTTATTGTCCATTCCATGGTGTACTTGATGCAACGGAAGATAACTTCGATTATCGCC
CATACTACTTAGATAATCCAGTTATCAATGAGAAGACTTTTGTTGGTGAGAATGATACAG
CTCAGTTACAAGCTAGTATTGATGTATTTGAAATTGATCGCGTCACTGAAGGCTATCGTA
TTAAGATTCGATTAGATGAAGGCGAACAATTTAAGAAATTAGCTGATGAGCAAATTGCTG
TTCAGATTGGATATCAGCCTAAAGGTGAAACAAAGTATGCATCAATTAATGGTAAGTTCT
TAGGCATTGAAGAAGAAAAGCGTGTCTATGAGTTTATCATTGAAACTAATTATGATATTG
ATTCAAGTGGTGCGATTTATACCACTAACATGTCAATGTATGATCAGTTCCAGAAAGTAT
TCTCTACTCCTTTAAATACTGATTTTGATGTATCAATCATTGTAGTAAATACAATCACTC
CAGGTTATATACCAAATGAATTAGACTCATTGGTTCAAAGGCATCTACTGCCATCTGAGT
TCATGGTTATTAATAGGGAACGGTTAATTACAACGCTTGGTTATGACATGACTAAGATAT
GGCACCGTAATAGAACTGTTCTTAGCCAAGAATCATATCAGACCTGGCCAGCAGATGTAC
CTGCTTACTATCAGAAAGATGTATTTGAAACTGATTCAACTGGACACATTGTTATTACAA
TAGGACCAGATGGTAAACCAGTTTACAAAGTTAAACATAAGAAAGGTGATCCAGTTCTAG
ATGCTAATGGTAAACCTGTAATGCAGTATCGAAAGGGTGATACTAAGTTAGATGCTAATG
GTAAACCTATTCTTCTTGAACCACGTAAGATTCTACGTGAAATGATGGTACTAATGGTAG
ATGGTCTATTCTACTTTGCAACTGAACAGGAAGCTGTAGCTTATCGCAAAGAGATACCAA
TGGAGTTCGTTAAATGGATCCAGAATGATATTGATTATATTGATCAACGTCTATTAGAGA
CATGTGAACTCTATCTATATCCGACAACTACATTTGGCGATACAATTGTTTCTGTTAGAG
AGGGTCAGAAATCAACTGTACAAGTTGATCAGAACTTCTTTACAATGTTGTATCTAAAAC
CATCTGCATTTGCTAACTCTACTATCAGACCGTCATTAATTAAGACAGTTAAGACAATTG
TTAATGACATGCTTGGTCGTAAAACAATTGCATTATCTGAAATCATTGCAGCTTTAGAAG
CAGCTATTGGTGAGGATGTGTTACAGATTGATGCTGGTGGTTTAGGTGGTTCTAATAACT
ATTCCATTATTACAGTAGATGACGATGCAGTTAGGTTGACATTACGTAAGAAGCTTACTG
TTATGGCTAACCAGGAACTAACCATTGAAGATGACATGTCTATTACTTTCTTAAGACATG
AGCAAATTCAATAAGGTCATAAGCCCTCCCCTAGGGGAGGGCATTATGTTGTATTTTACA
TTGCATAACCACGTTTAAAGTCATCGATGACTTTATCAAATCGACGCTGCCATTCGCGAA
TAGCATCATTGAAGCCATGGATCTTATAATCTTCACTAACTACTTGTGCACACTTACCAT
AATAGTTAAGTACGCAACTAGCTGCTAGATATTGTGCTTGAGAATATTCAAACATCGTAT
CAGTAATACGACGCATACCTTCAAGGGAAGTGTTGATTAATTGAACAGACTCACCAATAG
CATCAATAGTTTCTTGACTATAATTACGTGATAGTTGCTTTAACTTACGTAGAGTATCAC
TGCTATTGCGATATGCTTTTAACAAATCATCAAGTGGTGCGACAAAACGATCTTTTAACA
GATGTGAGTTTTTCCAGAAATTCTTATCAGGGAAATCTGGAATGCTTGAACGATCAGGAT
ACACTGTAGATAGTTCATTGCACCGGGTAGCTAGTTTACCAATCTCACGGATATTAGCGA
TAGGCATAAGTGCACGATAATCATCACCATTGTAATTAACATATTCAATGATAGTGCCAA
CTAGCTTTTCCATTGTACCTAGTTCAGTACGTGCTTCATTATTAATATTAATGATTTCTT
TCTGGTAGTATACACTACCAAATGCAGCAGCATATACACGACTAGCTAAGATTTTAGGAT
CATCAATGATTGATTGTGCAATTGCATCAAACTTTTCTAGTAACGCATCCTTTCGATTAC
CTAATCGATTTTTAACTAGTAACTCTTGAAAGAGAGTACGTGCTTGATCAACTGCCCGGA
CAATCTTTCCATAACGAGTTGCTACAACAACATCGCGCTTCTTAAAATCACTAATCCAAC
GTATCAGCTTAGCAAATAGTTCCATTAGTTTCTCAAACCAAGTCTTAAGAGTATTAATGA
TGGTAGCCATCACTGCCTCTTGAGAAATAGTCACATTAAGAGTACTACGGGTTGGTGTAA
ACATAGAAGCATATTGCTCAAGTGAAGCTACTGCTTTCTTAGGAGCTTCAAACCCTTCAG
TGCTCATGCGCTTAACTAATGCTCGAATACCATCAACATCTGGTTTTGATATACCTTCAA
GTTTAGTGATGGCATAAATATCAGATAGCTGATGAATCGCTTCTACGGCTACACACATCT
TAGCTAAAACTTCAGGAGCTGAGGCACTTGAAACAGTTTCTTCTTCACCTTCAACCATTT
CTGGTTGGTTCTCATCAAAGAAAAGTTTTTCCTCTTCGACATCTACTTCTTTAACATGAG
ACATGGGTTTAACCTCACTCATCAACGCTACCGATTAATTGATTTAATGCATTACCCATG
TCTGCTTGGATACGGTTATAATCTGGGCCATTAACAACGGCAGAGACAATATTGACATCA
TCAACAGTTAGATAATCATTAGCTGTATCAGATGTTAGTACAGCTTTGACAAGACATGGA
TCAGTAATACCGGTGATAAGACTTTGGCGAATGCGAAGAATATTGTTAAAATAGGTTACG
GCTAGTTTTGTATCAACTGCAATATTCTCATTAACTTTACTTAAGATTTTCTTAAATTTA
GCAACAGCTTTATCCTGTTGTTCATCGAAATCAAGTAGAGTCTCAAATGGAATCTGTAAT
GCCACCGCATTAGCTAGGAGCATTGCGCGGGTTTTACGATCAGAACCACCTAAGTTAGGC
AGTTGCTTTAGAATACGGGAAAGTTCAAAACCTAATTGTTGCATGATTTTTCTCTCTATT
TAGTTAAGCGGTAGGCTCTTACAAATAAGTCATTATTTAATAGACTTTCTAAAGTATCTT
CTAATTCAGTAGCCCGTTTATCTTTACGACGCTGGGGACTAAGGAAATCTAAAATTTTAT
CAAAAATGGTCCACTCATTGGCTAAATCGTTTATCAATGAATCAATTACTTTAATGTCAT
CATCAATTCCTGGTTTTAGTGATGAGTCCTTTACCCATTTAAGTTGTGCTACTAGATCTT
GTTTAATTTTCATTAAACGTTGTCGTTGATTGTCATAGCGTGAACTAATTGGATCATATC
CAACTTGTAAATTACCGGCAATGATACCTAGTGTAACAGGTAAACCAATGATCATAAATA
GACCTTTGAATACCTCAGCAGTAATATGACTAGAAACAGATTTATATTCACGGTCATTAT
AATACCGACCTGATTTAGTTAATGCCGTTGCCAGTGGCCTTCCATAACCTAATCGAGTGG
CGAATAAATCAGCTAATTGTTCATCGCGTTTACGTGATTGAACATCACCAGTTAAATGTG
GACGTTGTGCTTTCTTAAATGATGATAGAATGACTTTACGAATATTTCCTTCAGTCCTAT
CATTAGCAAACTTCTCATAATCAGCTGGATCAACGTTCTTCTTTAACCATGTTTCATCCA
ATAATTGAATCTTATACTTATTAGCTTTCCTACCCTGTAAGATAAGTATGCCTTCAGTAA
GTGCATAGTTAAGATAGACGTAGTCGCCCATTGTAGCTAGTGTTTCCCAACAATGCCCAA
TTTCATGTAATGTAATAGCGGTAGCTTCTGCTATACTAACACGGTTAATAGCCGATAATA
GACCAATAGATAAACCGATCTTGTATTTAAAAGTTGAAACAGCTTCACCTGTAACTTTTA
AATTTGTTAAATCAATATTAATGAATGTATTGACACCTTGCTCAGTTGCTAAAGTAACTC
GATTAATATTGTCAAATTTACTACCAGTATGTCCAACTGTAAAGGATGTGAATGCACCAC
CCATTATACCCTGATCATCTAGGTGTGTAAATTCTATATTCATATTGAGGATCTTAGAAA
CATCATCACTCAGTGACCTAAAATCATTAATATCTATTCTCTGTTGATTATCTAATTTAT
CACGAATCTTGGTTAGATGTTCTTCTATCAATGGACCTAGGTCACGCTTAACATTCACAT
CTAACACTTCATTAGAGATTTCTATCGTATGTAGCATTTTATATCTCTACCAGTATTAAT
TTATAATCATAAAGATAAGGCTGCGTTGTATAGAATTCAATCTTATGCACTACGTATTAT
AAAAGAGGCGCACACAAAATGTTTGAGTTATTGTTGTCTTCTGGACTAACAAATACGCCT
ATATATTCCGATCCTTATCCAGGTCCTAAAACACTGATAGCTGGGACAAGGGAATTAGGT
TTGTATGGTGAAACAACATCTTCAGAATTATTTGGTTATGATGATGCAGCTAAATTAGTT
AATATGACATTTGGAACAGTAATCAATGATGGACAACCATGGTTAAAGTTCTCTAATAAA
AATGTTACTTGTTACATACCAAAGAAACCAGCTCGTAAATCAATACAAAAATCACGGCTT
AATAATGCCGGACTTCGTAATGGTGACTATGAAGTTAGATTTATGGGAAACATTTATAAA
TTTGGTTTATTAACAATGGTTGGTGCCACATCAGAATGGCAAAGGTTACTTTATAATGTT
CACGTATCTAATTTAAATGGTGCTAACTGGCCTTATAAATTTACAGATAATGACTTAGGT
ATTAACCAAGCAGTCGCCGGTGGTATTAGTACTGATGGTACTACTAACTGGGGAAGAGAC
CCAGGTAGTGATCCAGTTAATGACCAGCTCTATCGTGGCTACTATGCAATTGATATAACT
AACTCGTCAAGTAGTGAAACTGGCGCTGCAACCCAAGGTTGGCGTCCAGTGGTTTATGCT
AGTGGTACATATCCATTCGTTAAAGATAATGTTATTAAACTTACTGATTTTGAAACTGAT
AATGAAATGGCAGCCGGTGCCCAAATAGGTAACTTAGTCTATTATTACGGTGGTAAGAAT
AATGCTAATACTGCTCTACGTACACTAGATTTAGTCACGGGTAAGTTAACAACATTACAA
CCAACTGGTACGCCTATAGCAGTTAAACAATGCTCGGCTGTTGCATTTAATGGTAAAGTA
TATTTCTATGGTGGTGAAAGTGCCACAGATGGTGTACTTACTAAAGATATGCAGTGTTAT
GATCCTGCAACTAATACATGGGAAATAAAATCACCAGGTACAATAGCTTGCCGGTATGCA
CGTGGAACTAGTCTTAATGGGTTAATCTACATATTAGGTGCAGCTGATACAACTGCAACA
AATAATCGTGGATTTACATTAATGTACAATCCAACTACAGATACATATACCAGTGGTGCA
GCATTTAATGATACTGGGGTATATACCCAAGATTATTCAGTGAGTGTTTATAATAATAGC
GTATGTGTTATTGGTGGTATGGTTGGTGCCGGTGTTAATACTGGAATCATATCGTACAAT
CAAACCAACAATAATTGGTCTAAACCAATAACTACAGGTATACCTCTTGGTGCAGCTATT
AATATACGCCCATCTGGTGAACTTTATGTAATCGCTGGTGAAAATCAAAATAATGCACCA
ATTAAGTATTATGAACCACGATTAGCACGATGGATAAATTTAGGTAATTTAGAAACTGGT
TTAGTGGATGCAGGTTTTGCCAATACGTTTAATAACGATGGTAAGATTTATGTTCTAAAC
GGTAATCAGAATTTAAAATACCAAATTAGTTAACGAAATAAACCCTCCCGTAATGGGAGG
GTTTTATGATGTGTCGAAGTTTATATTAGCAGTAATGATCAATTGATAATATTTAATTAG
GAATACCTTCCATTTTTAATATCCTTCATTGAGTAGTTCTGCTAAAGCACGTGCCTGTGA
AATATCAGTAGAAGCAAAAACATCAGAAAGATAGTTATCATGTTCTTTTGCATTCTGACG
TAATTCATCCATTAGATGTTTATTAGATACAGCCCATACTTTCCACAGATTTTTATAATC
ATCATATTTAGGATTATATCCGTCTAGTGGTGGTTTTCCTTTACCAGCTTTCCAGTGGTT
GGAGTATTTGCGATATCCTTTACAATCTAACTGCCAAGCTTCCTCAATTGTTCTGCCATC
AGGAAGCCTTGCGTAAAGAGCCGAGAATCTTTTGTCACCAACAGATGAACATTCATATCC
TCCTCGGCGCTTCCACTGATATATTACTTTGGGTTCTTATAGGTATTAATAAACTTCTCT
AGTAGGGTATCCATTTTAGGAGCGCCCATGATCTTCTGTGTGATTTCAATAGCATTAACC
CTACCGCCTGTTAAGTTTACGCCAACTTCGCGGCGATGGTGTTCACTAATTCCTTCCATC
ATCGAGAATTCCATTACACATGTTTCACGTGCAATATTTAGAATCTGACTAACGTTAGGA
TATGTCGACACGATGTCAAGGTCGGCGATATGGCAGAAGATTAAGGTTTTATAATTTGGT
AAATCTTTAACGCACTGTAATCCATTTGGACCTGCCATGTAAGATGGCAATGTAACAATC
CAGTCGTTATGACCAATAACATACTGATCTAACTCATGTACCATCTGATCAGAACTCGAA
CCAATAACACATGGATCTGGTCTATTTAGATACCAGAAATGCATGTCATCACATAGTCGT
TTTGGGTTAGAGCTAAAGTTCTTATAATCGGATGCTTTAGAGAATAGACTTATAGAACGA
CCAAGGTCATTTACTTGTTCATCAAGTTGTTCTAGTCGAATGGAGTCGATGATGTTATAA
AGACCATATTTGATTTTATGTTTAGTCTGCATCTCACGGTGCCAGTCGATACCACCAAGA
TGTGCAGTTTCTTTAAAGGTTAACTTACCAAATTCCATTACATATCTAATAGAATCACCA
TAGGTAAAGTTATTATTTAATATAAAATCATCCACCGGTACCCATTCATTACTACCTACA
TTTTTAATATATTTAGTAATAACTCCGCCTGGCCTGTCAACTAGTTGTTTATTAAAACCT
TCAATAAAATCTTCTAAGTCCTTATCATTTTTAATGGTCGTAGATTTATCGATGTTTAGT
TCTTTTCTAAGAATAGACTCTAATCGATAGTTAGGATCACGTCCTTTAGCTAATCGAGTT
ACTCGATAAGTTGACATAGAATCGATGCATTGAAAACTAGAGGGTGCTGTAATCCAATGC
CATTGATCCTCCGGTCCTTTAGATTTGGTGACCCCAGATGCAGTGGTGGTCATAGGTTCG
TCAATCTTAAAATGGAAATACCTATAATTCTTAGGTACCGATGGATCAGAAAAAACATCA
GCTGGATTAACACCATAATGTTCTAATGTTTTTAAGATTCTACCAATGTCGAAGCTAATA
TTCCAGAATGCGAAGAAATCTGGTTTCCAGGTATGTAGTCGTTTAAAACATTCAATAATA
ATATCTACTGGTGTTTCAACAACCATTACTTCAATATCTAGACCACGTTCTTTAATTAGA
TGCGATAGCACCTCTTCTTTTTGTGCTTGTTCTAATGTCTCTTTCACTGGATCTTCAATA
TCACTAACCCATCGTTTTAAATAGGCTAAGAAAGCTTTGTTCTTATGTGTGACTGACATA
CAGATAATCTGACCATCGTTCTCAGCTTCATAAACGTTGGTTTCGATGTCACCACCAGCA
ACAGTGTTTAGAGAGATTAGACCAGGATAACGTTCTTGATAATCATGCTTCAGATAACAG
GTTGAACTAACATCACTGCCATATAGGTAAGGACTACGCGCTAGTTGACGAAGAGATCTA
GCCGAATAGTCACCTAGGATTTTACTAATCTTACGTTTCATGTCAATTTGAGTTGACATA
TATTTAACTAAGTTACGCTCATATTCGTAATCTTTCTTTTCTTTATGGTTACGCATTCCT
TTTGAGGTAATCCAAAAAGGACGCTGGTAGTTTTCCCACATCCTTAAATTATTTGCAGTT
GTACCATCTTCAAAATGAATTCGTTCTTTAACGAAATGTGCATCTGTAAACTTACCAAAT
TGATCAGTACAATAAGTAATATGTTTGGCTTCAATGCCCTTAATCTTTTTCTTATTTGTA
ACCTGTTGTTCATTAGACATTGCTATAACCTCAGCACATATTGATATTTATCTACGTACT
ATATTAGTACCTAGTAAAAGTAATAATCAGCATAAAGCCTCCCCTAGGGGAGGCAATATG
TTTACATACCAGCTTTCTGCCGGAAGAAGTGTAGAACGAGTTGCCGTTTACCTTCAGGGA
TGAAACGTGCAAGATAGTTGATATCTACTTGATAAAGCGCATCTGATACATCACTAGTAA
ATAGGCAGAATAGAGTAAGAAGATTAATGTGTGCTTCTTGACGGTTATTCTGAGTAGGTA
GAGTAGCAACAAAGCGAAGTGCGTTAGATTCACTAAATAGGGTATTACGATTTTTCTTAA
CGAAATCAAAGATAATATCCATGCCTGATTTAAAGCCTTCAATATCTTCGATTGTCATTA
CGTAGTTGAATACATCATCTAGTTTCTTTTGTGCATCTCCACCACGTTCGATAGTGATAT
AGTCACCAGGTTTAGCACCAGTGGCAAACTGCTCTAGACGAGATTCGATAAATACTTGGT
TCATTTTGGTCATACCTTTACGAAGTACAGGTTCATTAGATGTTGATTCACTATTCAAGA
TTTTAACTTCCCCGGTTGGTTTAATATCATCTTTACCAGAGAATACTTTCCATTGTTCAA
CAATAGTTTCAATATCTTGACTAGTGGTAGGTAAGAATAAACGATCGCGTAACTCAATAG
CAATTTTAAAATCTTTTATCAAATTACTATTTTTAATAAGTCCTTCAGCCCAGTCTTCAA
GCTCTGCTGTCGTCCAATCGGTAGGTGGAGCATTATCACGAATAACACTATTAACCCAAC
TACCACGTAGTGTTTTTGGTGGAGTAATACCTTGTTTAACAAAATCAACCACTTCTTGGG
TAGACCAATCTAGTGGAATATCACTAGTGTGAATACGCAGTTGCTTGACTAATTCTTCAA
GCTTGATACTGTCTTCAGTATTGCGAATATCTTGTTTCAGAGTATCTTCATTAACTACCG
GTACAATTACTTCCTCAGTAGTCTCATTCTCTTTAGCCCGTTTAGTTAAAATATCATCAG
CAATATCGGCAATATCATTAACTACACCAGTTAGACGATGGTTAGCAGCATCGATTAGTT
CATCATCTGACCATTCATCATAAGGACGATATTTACGGGTTGGGTCAAATACAAAGCTAC
CGAGTTCAGTTTTACCTTTAGCAATGCCATCATTGGTAAACCATTCAATGACATTTTCAT
CTGTCCATGTTTCAGGAATATCGAAGTCAGTACGCAGTGCATTTACATTAACTTCAGCTA
ATTCTGAGGTATCGTTATCTGTATTAACTGAAGAATTAATATCATCTGCTGTAGCATATA
CTTCCTCAGGAGATACTAATTCAATATTTGTTAATCCTCGACCAATTTCAGAAGTTGGCT
TATCTTCAGTTGCTTCTGATAAAACTTCGTCTTTGACAATGGGTTTTTCAGGTAAACGAT
TGAGTTGAGGAAACTTTCCAAATCGTTGATTCTTTTTAGACATTACTAGTTCCTTTCGGG
TTATAATCTAAATAATGGAGAAGCTGAGTAACTTCTCCATCTATTTTAACTGATGCGATC
GCGATAAGACCATTTAACAGTCTTAAGAACAGCACTGTGCATTTTAGACATGAAGATGGA
TAGGAATCGACCACCAACACCTGCTGCCGCTGCCGGTATGCCATTAGGGTTCTCTGACAT
TTGTTTACCCATACAGACAGCGCATACGTTCTTACCTCTACCTATTACACCATTAGCTGG
ATCACCACCGGCCTTACATGTCATTGGACCACGTAGTTCAATCTCAGTGCCAACTAGTTC
ATCAATATTAGTTTCTTCAATAAGGATAGATTTCCCATTCTTAACATAAGACAAGCCAAT
GAAATCTTTCTTATTAAATTGATGAACATTGGTTGGAATACCTATCCATGTATTGCAGTC
TTCCATAATAATCCTGACTGTACCAACCATTCGATAAATCGTTTTAGTTGACTCACCGCC
AAGGGCTGTTTGTGCACCACGGTTATATGAACCATAACGTAATGAGTTATTCATTACTGG
CATATGGTCAGTGTCAATGCCTTCTTCCAATGATTTACCGATATATTCAACTGATGTACC
ATCTTGGAATGGCGCTTCCCCACCAAACATACCAAATACTTTCTTACGCACGCCACCAAA
TAATTTACTATGTTTAGTGTCATAGAACTCATAAGAAGGATCGTCTTTTAGATAGTCCTC
ATCTAGCTTGATTAATGCATTACCCATTTCTGCAATAACAGCCGGATCATCTAACCGATC
TTTATATTTCTCTTCTAGTTCTTTACGTAACTTATCTCTGTCTGGTGCAGAGGTCATTGA
TTTCTCAGTAATGGATGTTACCAAGGTACTGGCATATGCTGGCAATGCTAAACAATGATC
TGCAAACATCCGATATTGCCATACATATAACTTACCATCAGTTGCACGCGGTGGATTATC
ATCATCAATTGGATCATCGATCATGCGGTTAAGAATTTCTTTCTCAACTTTACCAATATC
GAAATAACCAGATTGGAATGGGAACAGATCACCAAAAGGTAAACATAATACTAAATGGTT
AACAAAAACGTTACCATAAGTTGTTCTTAATGCACCTGGTCCTTTATAGTTTTCAATTTC
ACCAGGTTGTAAAATGAATTCATCTCGAAATGCTAATGGTTGTTTACCTTCAATATAATC
GTCGATATAAACAACTTCATCATTAGAATCGCCTTCTTTATAGAAGAACATTTTACCATC
TTTGAAATATGGCTTGTATAGATATTCACCACCATCATTTGGGTTATAAACGATATTAAA
TAAAACGTTAACCCATGCTCGTTTCTTATCTAATCCAGCATTGATACCCATTAGAAAATA
ATCACGTAATTTCATTAGTATCACCTATGCTATTTAAAATCTTTTTAGCTTCATTTTCCA
TAATAGATCGTTCAATATTGTTAGATGTGAAATCATCTATAATACCCATTACCGTTCTAC
TAATTTCATTCTGTTCAGTATTTGAAATTAATACCAATCCGACAATTTCTTTAGCAACTT
CAATAGGCGTCATAGCATCTAATGGGCCAAATGAAATTTGTAATAGGTCATCAATATTCC
TTTTACCAACACGTAATCCTGCATTAACTAGTTCCATAGCTAACTTAAATGATGCGCGCG
TATGAATACGAATAAGGCGATTAATTAAATTAATCCGTTCAACATTACTTACATTGCCAT
ATGCTTGACCACGGGTAGTAAGTACTGACTGAATAAATGATGTAATATTACTAATAAGTG
TTGGCGATACACTTTCAATTAAGTCAATGATATTTAAGAAATCTACACTTGTATCAATAA
GTTCTACCAGATGCGCTAATGTCTCTTCGGGTGAATATTCAGCTAACAGAATATCATTCA
CTTCATCTGGAATAATGTAATCTTCTAAACTAAGGAGTGTATTAACAACAGCTTGCCGCT
CAGCCTGAGTTGCTTCATCACTAATTTTAATAAGATGCTCATTTAGAATTTCATCTTGTG
CAATGCGAATGATATCATCAATGCGAGAAAGAAGCATTGCATTATCTGAGATACCTGATT
GAATCTGACATACTGTATTTAGTTCATCTAGAGCTGCAACATAATTAATCTTTTCAAAAG
ATGCTACGCAGTCTAGGATAACTTCTTTACGCTCTTCATGTATAAGAGGCGTAAGATAAC
TATCAATGAAATCTTTCATGACGATATCCTTTTTATACGGAATTATTAACATAGGGTTGG
ACAGATAGTTATTCTTTAATATAGTGTAAAATTACCAAATGTGTTAAATATATGTTGAAC
TAATCATTTTTTTCATTTGTCAATTTATATTGGCAAATATTAAATTAAGCCTCTATCGGA
GTATAACAAGATGTCAAATAAAGCTAAAGAACCAACTCTAACTAAAGAACAGGAAAAGAC
GCTACGTCTATTTGAACGTGCAGTTGGAGCATCAGCTGCCGCAGCTGATCATATTCTTAA
CCGCGATGGTTGGGATGTTGTCAATGTACTAGCAGGTTCTGTAGGTAAGCGTATTCTACA
AACTGAAGTATTCATTAATCCAGTTATTAATAAGATCAATGAAATTATTCCGACGTTATC
TGATCCTACTGGATTCCAAAAGAACCTACAAACAGTTATTGCTGACCTTAATCGACTAAC
TAAAATTATCAGTGTCCTATATGCACAACATCAAGGTAAGGTTGGTCCGGCAAATAATGA
AGATGAGCTAAAACTCATCGGTGAGCTTGTTACTAAATATACTGGTATTGAAGGTGCTAT
TGAACGCGGTATTGATGGTGTAATCCTAGCGATGATCGGCACTCTTCGAGAAGCTGGTTG
GGACGAAAAACTAATTCAACAATAATGGAGTTTTAAATGGCTACTGCTGACTTCGATAAT
GAGTACGATGATACTCCAGAAGAGAATCTACTAGATCAAATTGATGAGATCAATGCGCAA
CACGATCCTGACTCTAGTATTGAAAATAATGACGAGGTGGAAACTCCACCTTTCGTTCCT
GATCAAAAAGAAATTAAACTACGTATTCCACGTAATGCTAAAACTGGAAATATTCGGGAT
GCTTCTGAACCGGCTATTAAAGACAGTGCTAGCATTCTTACTTTGCTACGTGAGAACCCC
CAGACTGTTTATGATTTCCTGGATCACAATAAAGAACTATTTAAAGCATTTGCTGATAAT
AAAGTAGATGACACTAGTGATGGTGTAAAGTGGACAGCTGCTATTCTGGAGGGCTTAGCT
CACTCTATTGTTGAAGATTCGCCAATTGGTGCAACTGCCCGAGAAGGCTCTGAATGGTCT
AGTGAAATTCCTTATGGTGAAAAGATCATTCGACCTGGACGACCTGTATTTAATACCAGT
GGTCGTAAAATGACCGATGATGAAACTCTAGTTTTCCTAACACGTAAAGCTAACATCGGT
ACGCCATATGATACTTTCCTACCTCATTCAGGTATTTGGGTAAAACTACGTGCACCTACT
GGTACTGAAGTAGCTGCCCTACAAGCACGTCTAGCACAATTAAAGATCCGGCTAGGCGCT
GAATCAAAAGGTATGCTGTTCTCAAACATGGCAGCTGTGTTACTTAACATGGTTAGTAGT
TTAGCACTTGCATGTGTTATTCAATCCAACTATAAGTTCAACACCCCAACTGATCTAGAG
CATGTTATCTCAGTAGCTGATGAGCCGTTCTTGCATCACGCACTAGCGGCGACTATGTAT
CCAGATGGATTTAATTATAGTTATCCATGCATTGCAGATGCCAATACATGTAACCATATT
GAAACAGCGAAACTTAATATGTCAACGCTTGTTCAATATGATCTACTGGCATTCTCAGAA
GAACAAAAGAAATATATTGCACGTAAGTTTAATGCATGTACTGAATCTGATCTTAAGACT
TATAAAGAAGGATTCCGTATTGAAACTCAAGTAACTGAAATGTTTGGTGACGTTGGTGTT
GTTCTTGAGATGTGTACAATTGCTGATCGCCGAGAGTCTGGTGATAGTTGGATTAACTCA
ATTATCGATATGACTCAAGGTAGTTTTAATGAACCAGTCGATGGTCCGCAACGTTCTCAG
TATATTGCACGTTTACAAAAGATCTCTATTGCCCGTCAGTTCTCACATTTTGTTAAAGAA
ATTAAAGTACGTGAAGATGACGATGGTGAAAGTTCTGAAGACAATATTCGTACTGCAACC
ACTAATCGTGAAACTATTGAAAAGTTCTTAACTAATATTCTATCCACACCGGAATATAAT
GACCGCTTTATTAATGCGGTGAGTAACTTCATTGATTCACAACTAATTGGAATGATTGCA
ATTACAAGTTGGAATTGTCCAGTATGTGAGTCACCTGCTGCTACTAAATTTAAAGAACGT
TTCCCACACTTAATCCCTATTGACATGCTGTCAACTTTTTTTACTTTGGCGGCCTCGAAG
TCAAACCGGATGGTGTAGTTAATGATCTGAGATATAGTCGTCTTGAGGCCACTTTCACGG
AAGATAGTGGCCACATCCTACATCCAAACTTTGGTTATGATAAGTTAACTGAAGATGATA
CACACTTAGATAGACTATTATCGACAGTAGGGGCAGTAAGACCGTCTACAGCAGCACGTT
TAACAAGAGAAGCATATCTACTTGATTACGATATCGGTTCACCAGAAAACGGACCCATGT
GGTTAAATAAAGTAAATCCTAAAGAGGATTTTATCGAAGGTGGGTTGAGAAGGAGACTGA
CTAGAGATTTCTTCAAGTATAAAGTAGGTAGCTTATCTAATATGTCATTAACTGAATTCT
TTGAATTAGCTTATTCTGAGGTAGAATACATAATTGAATTATGTAGGAATATTACTCATA
ATGAGGCTGTTAATAACAATAACCAGTTAAATGAATTAAACAAGCCGTTAACTAAATAAA
AAAAAATAAAGACAGGCCCCTCTCCACATGGAGAGGGGTTTATGTCGTCTTACTTACGTG
CAAAGCTAGCTACAAGACCTTTGATAGCTAGAACGACCATCCAGGCCGTTAACCCTTTTA
TTGGGTGGATATCAACCCGTTCTTCGATATCCAGATTACCCTCATTATTGATTACCTCAA
TTCGTACTTGCATGGTCTACTCCTTGTCAGGATGGGATATGATATTCAAAAGTCTTTTGA
TATAAAGATGGCATATTACCCCACCAATAAAAGGCGGGGTAATATTTATTAAACCATCAG
ATATCCTAATGGAAATAAAGCAAAGAAGCCATATAAAACAACAAGCAGTGTCTTTTGGCG
AACATACCGGGATTTAATACTATCTTTATCTAAGTCAAACTTGACATAAAGATAAATCTG
ATAACTTTTATATCCCATACTAGCCACAAGGGCTATTACTATAAGTTGACACAAAAAGAC
CATAGTGGGATGCTCTTATTATTAGAGAACAATGATCAATTGTTCTTACATAGCATGTCT
ATTTAATATGCATGATTATCATATTAAATAACCACAACCCTAACATAAGGGTAAACATAC
TGCAAATCAAGCCACTTACAATCATTGCTTTTTGTTTGATTGTTTTAGCAGCAGCAAGAA
ATATAATTGAAGTTATTAATCCACTAAATGCAATTAATAGTGGTACTAAAAATAACAATA
CCCGAGCCATATAGACACCTCATCAAAATAGATAAGTTGTACATGTCAGTGAATAGTTAG
TCCAGCAACTAACAATAGTACTTACCCATATGGTAACTAATACAATGCTTACGGAGAGAA
AAAGCATAGCGTACTGGCATGCACTTTTATTAAAGATATCTTTAAACTCAAGATATGTTT
TAATAATAAATATCAGCATGCATGTTAGAAGAATATCAACTAAGATCAAAGTACTGACTA
GAAGCCATGTTGCACCAAAGATCTGATCAACTGTATACATTATTTCCACTCCCATAGTTT
ATAAGCTATAACTACAATTGTAATCATAATCAATTTTTTCTTCATTGTAAATACCCTATA
GTTTTATCACATTTGTGATATACTGTTTAAAATGCTTTAAATACAAAAAATAAAAAAAAG
CATAATCCCTCCCAACTAAGGGAGGGATCATTTATGCCATTTACTATAAACGCATCATGC
GCATACTTTTAGTTTTACCCATGAAATGATTTTCTTTATTTCTAGCGTATCTGCAATGAT
GAGGTATGTTATTACAAACCATGAATGTTAACCTTGGTATTACATCAGGCCAGTTCTTCA
ATGGTCTTAGTCGTCCAAGAATTTGGATGCTGTCCTTTTTAGAGTCAGTTGCTTGTAATA
GAATAACTTCCCTTAAATTCCTAATATCAACACCAGTACCAGATGATTTAATAGTTGATA
CAGTGATATCATTAGTCATTAATCTATCATACGGACTACCCGAAACATGTCTATTAATCT
GAAGATCTGGATATTGTTTCTTAAGATAAGCTGTCAGTACATCGATAAAGTTTACAGTCG
CGCATAATAGCAAACATTTCTGACCTTCAATACGATCCTTTATATAAACGCCATCTACAA
TACGTTTAACCATCTTTAAATAGAAGTCTAGTCGCCTAGGATTCTTCATCATTACTGTTT
CATAACGAGCATGGTTATATGTATTTTTAAATGGAGTTAAATAGTCCTTAGGTTTAATAG
TTGGTTCACTATACAACAAGCCAATAACATTGATGTATGAGTCATATGCAGGTAACCTAC
ACTTTGTAGTAGCAGGTAGCATGACATCAATCATTTTAGTAACAAACTGATTACCAGTGT
ATGGAGTAGCTGATAAATAGATTTGTTTATTGACATTGGTATATAGATCAGTACGAAATA
CTAATCCTGGATCTTCTTGAATCTCATCATTGATCTGCCAGCCTGCTCCAATAACCTCAT
GGAATCTAGGTGGTGGTACATTAAATCCAACTACATCGATTTTTTCACCTAATCGTTCAA
AAGTATCGATATATGCACGGTATGTTGTAGAACTAATGAGAATAATTTCAACACCTTCTA
AATCATTCTCTAGTCCGCGATTAATTAGATTCTGTAACTCAGCAGATCCAGATACTTTTA
AATATTTTATACCTAGCTGATCTTCATAACCAACAAATGTTTCTTTTAATGCTTTCTCCC
AAATACCGAAATATTTAGGTGGAATCATAACAACACCACGTTCTTTCATTACTGCAACTG
AAGCTAAACTAGTTAAGGTTTTACCTTTACCAGTCTGTAAGTCAACACGGGCTGAATGTA
AATGTGGTCTTAGAATATCTTCGCGGATGGTTTCCTGATAATCCCTTAGAACATAATGTT
CAAATAAAGTATAGTCTACTTTAACAGCTGCTGGTACAGGAATATCTACAATTTCAATTC
TAGTAGATGGTATATTCTTATCGGCTAGATAATTAATAAGTTCTTGAAGACATTCACGAT
GGATGAATACAGATTTACCATCTTCTGTTTCACCATAATATTTTTTCTTTATTTCCATTA
TGGTGCGTTGACCAGGTATCTTCTTAGGTTCTTTTAAAACCAGTTTATTAAGATATCCAG
TCATCTTTAAGTATGTTTCCCGATCGTAACCGGATAAACGAACACCATGGGTGTATCGTT
CTGCTGTAAGAATCGGTTTCATAAAAAAATCAACGATCGGTAAGGGGAGCAGTGCTCCCC
AAACCTCACGTCCTCCACGTCTATCGCAGTTTACCACCTTTAACTAGTAAGTCATATGGA
TGGTCATTCCTCATCTTGTTAAGGAAACTGCCTGGGTTATTTAGTGGCTCATGCTGCTTT
TCGAAAGCCATCGCACCACCTAAACTACGACATTGCATTAGCCTATTATATTTTTCAAAT
TGGCCATTAATACCGGGTTTAGGTAAGCGATAGTCTCGATATTGAGCTGAACGGATCATC
ATAGCGTATATCAAGATCTCACAATGGGAAATATTAAGGCTAATCTTTTCATTAGCCATT
GTTGCAAATACAGGTAGTGCTTCAATTGGTGACTTGTAGTTTTTAAGATACGTTTTAGAC
GTATATCCAACTTTCTCAGTGCTTAGTTTACCTGCCTCGGCTGAGTCACTACCGGAATGT
AAGAAACTTTGGAATCGTTTCATTACTTCATACATGTTTACGTGCTTATTTGGTAGCGTT
AAGAATGGTAGGTTAAAATCAAAACCACGAAGACTAATGACGATATTGTCTCGCTGATCT
AGTTCCCAACGGACCATCTTAATATGCTTTAGCATTTCAATAGATAGACTAGCCCTACGG
TTATACAGCGACACAGTCAGAACATCACCACATTCACCATTCACCTCATCATCATAGACT
AGGGCCAGGCTGGTTAGTTCAGTAGCTGAAGTAGCTGGATATGCAGTAAGGTCATCAATC
ATTAAAATGTCAGCAAGGTTTTCTGCCTCTGACCGTGCGATTACTAAACGATAATCCTTC
TGAGTAAGTTCTTTCTTTAGATATAGTGTCTCTGGGATTTCACCTGTTCTTAAATAATTA
CTTTCAATTTTGCCAAGTTTATATTGTTCTACAGCAGAAGACGCATCGGTGTGTTTAGTA
GACAATACTGCTGAAGTAATTTTGTCACCCATCGATACGGCAGCAACCTGACCGATATTA
GTTCCTTTTGGAATATTGATACCTAGTCGGCCATAACAAGTCATACAGATACCTTGACTA
TCTGGATGATTACATCCAAATACAGACCTGAATTTCTGTTTAGTTCCAATTAGGTGTGTT
TCATTTCCACGGATCCAGTCTAGTTTACCATCTTCTTTTTGATAATATTTTCCTTTGAAT
GCTTTTAAAGTTAACTTAGTTACAGGATACTCAGCTAAGATTGTGGTCTTACAATCACCA
GGATGTAGCCTTTGGACATATTGTGCAATAAGCTGAGATTTCCGGTTAAAGTATTCAGTT
ACTCGCAGTAGTTCTTTGTTATATAGTAGTGCTTTAGTACCTGAACGAGATTCAATCATA
TTCTCATACAGATTCCAAATACCATCAATATAACCAGTTGTTACCGGATATTTAAAGATA
TCTGAGTTAATGTCAGTTGGAAAGCCCCGCCAAGCAAATGCTTGTAGAAGCTGTTCAGTT
TTCTGAGTACCAGAACGAAGACCTTCAATGATGCTGTTACCAATGAATTGGGTAGGATCA
TTAAATACTTCTTTGACTTTACCATAACTAATTTTTTCGATACCATAAGTAGTTGGTTCG
ATATTATGGTTAGCCTCACGTACCTTGGGATGATTATATACTTCAGCAATATCAAACATC
GACAAGGTTGCTAGATATTCAGACAGTTTCACAGTGGTCTGATTATACAGCCAGTTCTTA
CCTTCAATAGCCAGTTTAGATAGTACTTCAGGATCTACTGTTTCACCTGACCAATCATAG
ATGTTCCAAATAGCCTTATTTAAATGCTTAACCATGGCCTTAGATGTTACTCGGCCACCT
TCAACATTTAGATAATCTTTAGGGTTATCAGTTAAGATGCGATTGAAATCGATATGGTGA
TCAGATGGAATTGGGCAATCTTTATAATGTTTAAGAGGATACCAACACAGAACGGATAAT
TTGGTAATACGGTCAACTGACACAACCGTTTTACCATCATCAAATTCGATTAGATGCCAT
TCTGAAGGGAGTGACCATAAATCATCATAACTTAGATTTAGAAGATCACGCGCTTTATAA
CGATTAAGATTCATTATTTACCTCTTGTATTATTAAACCCCTGATCAATGATCAGGGGCA
TATTCTAATGCAATACCACTACATTCAAGCAGGTGATCAAACATAGCTACTGGGCGAGAT
CCACCAAATGGAATCTTTTCACGATCAACTGCAACTGGTACAGATGAAGGTTTTTCTGCT
GTTAGCCAAGACTCGATAACCGCAGCATGCGCCAATGGGTTATTAGTTTGGTCTAAGATT
TCAGCAGTCGGACCTGGACCAACTGTACAGTTATATGACCGAGTTTCAGATTCACCGAAT
GATCGAATAGCTGTTTCTCGACCAGGAGTACTAGCCCTATCAGCGTTGTTTAACTTAGAA
GGTAGACCAAATGGTTGTGTTTTTACAGATGCTGCTGCTGACCAGTCTTCACCAATCTTT
TCTAGTAGCATCATGTAAAGTGGACCCATTAAGACATTGTCTTTAGTTGTTACCCACTTA
CCAGCTTGATCTCGATAAGATACCTTTCCATAGTGTGGTCGATACTTATCACTATTAATT
AACTTATTAACTGCTGCCATTAGATCCACTGGATCATCGACTGGTGCGTAGATATATGGA
AACCCATCCATTAGTACTGTTTTAACATGTTCTGCTGGATTTGGGTGTTCCATCATTTTA
CTATGCATTGTTGGAGCAATGATCTCATAGAAACCTAATAGTTCTTTAAATGCATAATCA
ACCCATTGGGTGTTACTCATTACACTATTTAGCTGTTGCTGGGTTGGTTTAGCATGTCGA
TCTAGTCCAGCTTCAACGCGTAGGCGTTGAGCTAGATCTCGTGCAGCTGCGCCAAAACCA
TGTTCATAAATTCGACCATAATTTGAACGACGCATAGTTGAACCACCAAAGATAATTAGA
TCTGCCCTATTACCATTTTCGTCAATAGGCATATCTTCATCTTCCATTACCTTACAGATG
ACGCCCTTCGTTATGTTCAGGTAAGTTCGCTACGCTTACCCCGCCTCTCGTATTGCAGGC
AGCTGCATGTCACCATGCAGACCAGACTATATCTTAACCTTCACCCTAGGTGGTCAGGTC
CCTCCCATTTCCACTCGCTTGAGTGTACTCCGCGTAACCGGATAGTCGTTGAACGTTCAA
TCCATTTCTGGAAAGCTTCGCTGCTGATTGTCTCATTGAGATGTCCCAGCAATTAGAGAG
GATTTACTTGACTCTTTCGAGATCAAGCAGGCAATTTGAAAATATCCATCCATCCAGATT
TTCACCGGATTTTATCCGATGCTTAATAACTGAACGGTCTACATTGAAGTGTTTTGCGCA
ACTAGTTAGCGAGTTAAACCCAATGCACTCTTTATTCTTGAGTGCTTGAACAAATTGTCG
CTGACTACCAGCTGTTGATCTGTGTACTCGATACCGCTCCTCTGTATACGAGTCTCTCAC
CACAAATTCATAAGCTGGGTATTTTTCAGTTGCGTACTTTGCAAGACCAGGAATCGATCT
CCCATAGGGACTATCGTAAAGTTGGTAAGCTTTCAAGAAAGCTGCGTTGGAATAGATTTC
CTCGGCATAGCCATCTGGGTTGATAACTGTCACCATATAACGTGATGGTTTTACTAGTTC
GGTTCGATGCTCATAAAACCAAGGATCCGTTTCATTAGCATATTTAAATTCGAACTTACC
AGCTATCAACTTACCGAACATCTTAGGCTTCAACATTGCAAATGGTGTGTCTTTTGGAAG
ACCCATATGTACACATGCTTGTGCAATTGAATTAAATGCCATTACTTGTTTGGTGAAGAA
GCACCGTGTATAGCAAGCAATTGGATCACGTCTTAATCCATTGTTAACCGCATGGTAGTT
GTTACCCGAATAATCTGTCCATTCAAGATTCTCAAGATCGTTATTAAGTGGATCTCCATC
TTTATGGTTAACCACTGTCAACGTATCAGGTGAATCATTATTTATCCAAGCTAATGCAAT
CGCTCGATGGACAGGTAACGTTTTAGTCAGTGATCCACGAAAGGTACTGACTGCACGATA
ACCATCTAACATAAATGTGGATAAAATCAAATCTCTTTCTATAGACTTAATCACACCGCA
TTTGGTTACCGCATATCCTTCATAACCTGGTATTACTTTAAACTCTTCATTCATCGCATC
TCCCAAGAGATGGATGGATATTAATTACCACCATGAAAATCAGTCATCTTAAAAGCACCA
GCTGGCATCTTCTGAGCTTTATAGGTTACTTCAACTCGCCATTCATCCAGTGGATCTAGT
CGATAGAATCGAGATAGTTTACGGACATTATCAGGTTGAGGTAGGAACATCTGTGCAGTT
ACAATAAGACGTTCAAATTCCTCAGTGATATGTAGATCATCTTTACGACGTGCTAATAGA
CCACGATAAATCTTTAATAGTTCTCGATAATAACTGCTAAGATGAGTATGATATTTAACT
AATTGTGCATCCATCCCTGTTGGAGTGGGTGATGGATTTACACGCTCATCTCGCCAGATA
TCAATATCAATAACCTTCGCACCAGGTGTGCCAATAACAGCTCTATCGAAAGTTCTATCT
AGTGTACGAAGTGCCCTAGGAGTCATCTCGGCAGGAGCTAGATCATCATCATGGTCACGG
ATGGCGAAGATTACGCCATCTGGTCGGATAACATCACCAATGTCTGGGAATGGTTTATAG
ACCTTATCATCGCCATACATGTTTAAGAAGAAAGCTTTCCTACCAGCATTAGCTACAGCC
GTGCTATAACTAGTTGGCATCATCCTTTTAAGGAAATTCTTATTAGCTACGAATCCATCT
TCAATGGTACCAGCGGCAGATAGGAATACAACATTAGCATTAACACCCATCCCTAAAGTA
CCGTCTTTCTTAACTGCACCAGACTGTGCAATCACTGTGTCTTTAGAGAACATTTCATTT
GGGGCAATGGTTTCCCACACTTCTCGATTCTTTACAAGTTCATAACCAAAGTCTTGGTGA
TGACTCATGTACTCGGGAACATGTAAGACACCAATGGTTTTATATTTGTCAAAATAGTTT
TCGTAGATAATAGTTGTTACCGGGTTAGATCTAATACTGTCTTTACCAATACCCGTTGGA
TATTTTCTAAGAACATGTAGTACACGACAATCCTCAGGAAAACGAACATCATGTGTATAC
TTGGCATACTCTAATTCAGCACCCGTTAGGAAATAACGCGATTCATTTCCATTTACTTCT
GGTGCCTGGCCAATATGTGTTACAAACATAGCACCCCGTGCAGATGAGGTAGTGCCATAC
CAAGGATCTAAACCAGTATGCCCTAATAGGGTTAGATCAATTTCACGTTTACCTAGTTCA
GCCATTTTGTTTATCACCATTAATTAGACAAGATGCAGTACTACTATATTTCTTATTTGC
GCTGTTTTTAGATATAGCCTTTTGTAAGACTTCAATGTCTGGTATCACCAATCTCATACC
TCCTGTTTACTAATTACAAATCAATGATATAGATCTTAAATAAAATTTATTGGAATTTAT
TATGGCATTCACACTGTTAGCTAATCAGCCAGATTCAGGTGAATCTGTTTATTATGAACC
AGGGTTCAGATTAATTATTGAGACTCATTTGAATATCTTACGTAATGTCAGATCCACACG
TATTCAGATTCCACCTGAACTGTATTACCAGTTCGAAGGAAACTTTTATGGATACATGGC
AGAACGCCGTGTCAATCCTGATATGTGGTGGATTCAAATGCGTGTTAATGGTTTAGTTAG
CCCTTATGATTTTGGTAAAGTTCTAAGGGATCCTTCAGCTAATGATTACACCAGTTATTT
AATCATACCGAATAACGACATGATTCAACACCTCGTTAGCTTATATCAAACTAAAAAGTT
TTAAAGCAAGCCAGGGGACCCTTAGGCCCCCTGGTTTATGCCGTGTTACAGTAGACGACC
CATCATTTGGTTTCCACCTAGATTCATCATCGCAGTGTTACCATTGCCAGCTAGAGAGGG
GTTTAGTGCTTGTGCAAATCCACCACCCATCGGCATTTGATTGCCCATGAGTTGCATCAT
CTGCGGATGCATATTAGCCATCATTGGTTGCTGTGGCTGCATCATCCCAGGCATTGCAAA
GTTATTGTTCATCATAACAGGTTGTTGCATCATTCCGGGTTGAGCAAATTGGTTTTTCTG
CCCAGCGTTTAGAAGATCTTGGATAGATGCTTTATTGCTAGTTTGAACTTGCTGTAAGGG
ACGTTGAGGTGCCTGAGTCATTGCTACTGCTTGACTCATGGATGGATTAACATTCACAGT
TGTGCCTACTGGTACACGAGTAGAAGTAGTTTGTTCTTTAGCAGTATTACCCACTTTAAC
TACATTATCCTTTTTCTGGACAGGGATTTGGGCAACTGGGTTTACAGTTTCAGAAGCTTC
TTCTTCTACTTCATTGCTGACTCCTTCATTACCATCAAGAGATGGGATCTCACGTTGCAT
CTTTGCAAAATCAGCAATCACCTTCTCATCAACTTTTGAATAAGGTTGAATAGCATCATC
GAAGATCAGACGATACTTATCAATAACACTATTTAGCTGAGTAGTGATTTTGTTAAATGC
CTGGATAAGACATACAAAATAAGGTGCTACTCGCTCAACAGTTCCTGCTGAATATTCGGT
TGGCGAATCACCAAATGGTACAACCAGTTTAAATAGTTCAATTAGAACTGGCCGCTGTTT
CTTAGGTACATTTACTCCAAGAATATCATCCTTAGAATAAAGATCCTCTACGATAGGGAA
CCGAATAACGCAGATACGGTTAACAGTTTTCCCATCATATTTACCATTTGCTTTTAGATA
CACGCTTACAAAACGTGAACGTTTTTCAGCAGCTTTGACAACCTTATTAAACCACTCAAT
GGTATCTGGCTTAGCACCGGATAGTTTCTTTAGGAAGTCTGAACATTCTGGTGGAATGTC
TTTATGCAGAGTAGAGTCGGCAGCTACTTCTAAAATACGTGAAGTAAGATACTTCACAGT
AAACATTAGGTTAGCCTTAACTTGACGCTGCATATGCTGTAGTACTTGAGAAGTACCTAG
CCGAGAGATCTTTTCAGATAGCGGGTGGAAGGCGATGTAATCATCGCCAAGCCCTTTACG
AAGCCAATCTTTAGTAGGTACTACTAGTCGCTTACCATCTACCTTTGCAGGTGCTGGTCG
ACCAAGTGGATCGAGAATACTGATCATATCCTCTTCACCTACTTTGTATCGGAAAGCAGG
TAATACTTGATCACTATAGAACTTGGAAAGAGAAATCGTAGGCATTGTTATCACCAAATT
TAGGATTGATTTGAGCAGGTTGAGCCACAGGGTGCTGATACGGTTGCATGTTAATCGGCT
GACCACTACTGTTTAGAATGTTTTGTTGAGTCTTAGTGGGGATAACATTCTTAACAAGAT
AGGTAAGGTCATTGGAGATCATCGCTGGTGCAGAAGCATCCCGAGTAATAACCGGACTGA
ACAGACTATCAATGAAAGTCGGTGCAATAAATCGTTCTACCGATTCATGATTTAGACTGA
TATCAATAACAGTATCACCAGCTAAGTCAGAGTGCATGGAGATTTTAAACGGAATCTGGT
TACCATAAGAGATACTGTTAATCGCATCGGTAATAAGACGACGTTCAAAGTCATTGATCT
GCGGAGTCATATCAATTCCATCCATGATACTCCTGGTACCATTTGGATGCATTTCGAATA
GATAGTTATTCGCTCCATGTCCATTTGTAATTGCAAAGGAAGTTACCCGGAAATAGTTAT
CCATCATGATTGCTGGAACTACTTGTGCAAGTAGAGATGCTGCAACAGTGTGATGATCTG
CACCACCCCAATGCATGGAATGCTCTGCTCGGTTAACGAAGCGTTGAGAATTACCATTAT
CCATACCAGCTTTAACTACACCATCAACCAGTAATTCAGGGAATACGTGTTGTAGGTCAG
CTAATGTAACAAAGCCCCGCTCCATGTAGTTGCAGCGTTCTTTTAGAATACGCATGAACA
TATTGGAATGGATATCTTGATTTCGAAGTACAGCTGATGCATCACCTAGCATCACTTCAT
CAGAGACACCTCCAAAGATATTATCGTTATCATTATTAGCCATCTCAGCTTCTTTAACAG
AATGCTGCCATGCATTAAGAGTACTAGATAGATAACGAGTAGGAGAAGTATCACGGCGAT
TTGAATATTGGAAAGTGCCTGCTTCACCAACACTGGAGCGTTGGTCAATGATCCGGTCAA
ATACGCCTTGATGTAGTCCAGTTGATTCAATGCGTTTAGCTACTTGCATCGTTTGCTGAA
TTTGGAAAACATCTTCTGGTCGTTGGAGATATGATGAAGTTCCAGTATACATGCTAAACC
CGTTCTGAGGGATAGTAATATCACTCATGATATCGACGGGTGCAAGGATCTGGTTAGAAC
CTAGGATATGTGCTTGTTTGATTACCCCAAACTCAGTTGGTCGTTGACGCTCTACAATAA
CAGTTTCACTATTAAAATAGATACGCATGTTAGGATCTAGACTATTGCTAAGCGGACTAA
TAGAGCAATGGTCAGAGCAACCAAATAGAATCCGGCAAGTACGGGTATTACCAAAGAAAC
GGTTATTCTCCCATACTTTCATCATGAACCTAAACCGGCGTTCACCCCAACCATTGACGA
TAGGGACTTCGCCTTGAGTTTGAGCACGTGGTGCGATCACATCAGCTGCAATTTGCTGTA
CAGCTGCAACACCTAGATTACGACCATCATTAGTTGCTTCTTTTAAACGTTCAATAGAGT
TCTCAGTGACCTCTACAGTAAATGGTCGAACATGTTCAGGTTGATAAGTACCAGTTTGTA
CTAGAATGAATGATTCAATCTGTACTTCAGTATTACCGCCCATTGCTGAATTATTAAAAC
CTAACATAGAACTACCTCAATTATTACTGATTAAGTTTACCCAGATGAATTACCAGTTCG
GTGATCACCGACTTAATTGTGGCCGGTACAACAAGGACTTTATTCTGAGTTACCTGTTCT
GCTTCTTTGAATAAACGATCGGGTCCATGATAGATCCAGTTACTAGATCTAATGGATGCA
TGTGCAGATTGCACAGCAATGCCCGCAATATTTACAGGTGCTACTGGAACACCATTAATA
GCTCGCTGTTGTCGTTGATGTGGATAAAGCTCATCCATTACGTCCTTATATTTAATTTGA
ATACGTGTACTATTACGTGGTTGAATGGACATTGCATGATCACCACTATAATACAATTCT
ACTTGCATAAATACAGCAACTTGTTGGAAACCCCAATGCCACATTAGTGACTGAGCTGCT
GCCAACAAATGGTTAACTGCATTCTTATTAATGTGGCTGAATGCTCTTGCAGGAAAAGCT
TTGTGCATTACCCATTGCGCAAGTAATATCTGGTGTGGATAGATATCTTTAGTAGCTGTA
ACTGCAACGCAATCTAGACATTCCTGAATTAACTCTACTGGGACAGTGTCATCGATTTTG
TGAACCAGTTTAACTACATCAAGAGCATCTAAGTTATAAGCTACAATATCACCAGGAGTA
ACTCGTTGTTTAGTTTTATGCGATTCGATAAATGATGTTTTATCATCATCATCAATACCA
CCTTTATCTGGCCGTTTATCATTAACCCGGTCAGCAGTTGATCGTTCAGCAGGGTTTAGA
TTTGACTTAACATATCTAAACATATTTGAAACGATGGAATGTGAGGTGGCATCGTTTAAT
GGTAGGATGGTTAATCGCCTAACCATAACTTTAGCCTGTAAGATATCCGGCACTTCAGCT
GAACTCATACCTCTATAAAGGTTGGCTAAGGTGGGTGCTTCATCTTCTACACAAAACTTA
ACATATGCACTTAGCTTATCATAAGCTGTTTCTACTGGAGTTCCATCAATTGATATTTCA
TCAACAGGCCAATGGTTAACCTCACAATCCGAGATGAGACTAATTACTTCACACTCTTTA
TGCATTTCCTGAGAAGTGCCCTGATCAATAAACTCGCCCCAAATAGGTACTAAAGGACGA
AGAGCTAGCGATACAGATGCAAGGTTAATATAGTCATGTTTCAGATATGTTTGATCTGGT
CGATTATATCGTGAATCATCAGTGATAACTTCTTCAATATCTACTGGAATATAAAGTTTA
CCAATAGTTAGTAGCCATCGCCGAAAACTATTCATCGGCATGGCTTTATACATCTCTTTG
ATGTAATAGGATAGACTCATTGCAATCCTCATCGGATCCATAGCCATATCCATGATCTTA
CGAATTTCTACATAACAATTCCAGATATGTTGTTGTGCCTCAGCACTTAGGCCACTCCAA
TAATCATTGATTTCTTGGAATACTCGTTGTTGATCTTGTACACGGATTTTACTATAAGCC
GTAGTTGTCCAAGTTAAACGTTTACCATTGTGTTCTGTAGCCACTTCAGTAAAACCAGTA
CCTTGAACTCCTGTAACGATGATTTGCATTTTAACCTCTTTTACCAATGTAGATACATGT
TAGTAATATAGATCTCAAATTTTTTTTAGTATAACGGCATTTAGTACTGAGGGCATATCG
GTGCCTACTTCGAGAGTAAGCACCGAAATATGTTTTAGAAGGAAGGCATATCCTCATCAA
AAGCTGAGTCATTATAACTATTATTAGCCGGCTTAGCATAACTATTATTGCCGCCGTTGT
TATAGTTATTGCGCTGACCACCGTTATTGTAACCGACGCTATTACCATTACCCTGATTGA
AATTAGCAGGGTTAGATACACCTTTAGCATCTGGATCGAATTCAGTTACTAGAAGATGCA
TTACTAGTTTATATGCGGGGTCTAGGAAACCGTATGCATAAGCATCGGACATTTCCTTAG
GTGATAGTTGACTACCATCTGCTTTGCGGATATCATGGAATTGGGATGGGCCAAAGAAGA
ATTTGATCTTTGGACGATCAGGTTGAGTGCTTAGCACTGCGATGTAAATTCGACCATCTT
GTGCACGGCCAACATGTAGCTTAGAAAGCTCAATAAAATTATCACGCTTCTTACCAGCTA
CGAAGTTATTGCGGTAAACAAAGACACGTTCAGTATCTTCAGTTTTACCTTCAATTAAGT
CCATTGCAAACTTAATGAAACATGCAAAGGTTGCTAGGTCAGTATTGAACTCAATTTTAC
CATGGTCTTTATCACCAGGTACATTAGTACGAACAGTAACCCGTGGTTGGTTTTTAAACA
GACCAAAACGCAGCGTCGGTCGTTTTTGAGAACCCTCACATGGTTTGGCATGTAGCCAAG
TATTCATTACATTAAAAGGGTTAACTACGGGTGCATTAGACTGCTGTTGTGACATGATGT
GATAACTCCAAATTAAAACTAGATTCTTTTTAACTAGATGGGAAATGATTTCTACGTAAT
ATTATCGCAACAAGTATTTCTTCTATTTGAATTTCTTGTATGCTTCTTTTAACTCTTTAG
AACCATAAGCAGTAATGTCATGATGAACTTTATCTGGTGTTGTTAATCCTGTCCATTTTC
TAGATTGTGCCAATTGTTTTAACTGTGCACGAATAGCTTTGTCTTGTGGTTCAAGTAATT
GTTTATCGCCAAATATCTGTATAGCAAATGATGTAAAAGGAAATGGAGTATCTTCTTTTA
AACCATTTAGTTTAGTATACCACATGTTGTATGTCTTTATTTTGCCCGTATGGGATTCCA
ATAAAAGAAGTCTATTAAAATGGGGTTTCCATAATAATTCATGTGGGAAATGGGTTAATA
GTAAAACAGTACCTTCAACCTTTGGAGGTTTATTAGATATTTCCATTGTAGTTAAATCTG
TATCTTTTAACTTCTGGTATAGTTCAATTGACACAAATCGTTCATAAACATCATAAGCTA
ATTGTTGCGGTGTTCGTGATACTTTAAATGTAGCTTTAGGGAATAACCACTTCACTGCAT
CTCGACCAGTAATGTAATATTTTACAGTTGCTTTTATCCCCGATTGCCGTAAAGCAACCG
GGATTGTTTGTGCTTCTTGAAATAAAACATCGACTGCTGCAACCAAGTTAATATTAGTTT
GTTGTTCAGACTTCATAGCCTGCCACATATTTCTTGCAAGAGTACGGACATTAATCCATA
TTTCTTTAATAGACTTAACATCAGTTGGTTGTCTAGGCTTTTGTGGATGTGTTCCTATAA
GCCCTTCGAGAGCAAAAGAAGTTCCAATGCTAATCGGAATATTAGCACCTACATCTCTCT
CGATAATATCCATTATTATTGCCTTTTATTTGAACTCTGTCAATAATCCCAATACCCGCT
GGATCTGAGCAGCGTCCGCTGTAAATTTTTCAATATCTGGAATAATTAAATCAGAAATAC
TTTCTGGAGTTATATCCAAAAATTCTGATAAATCAAAATTCTTTAGGCTATCTGACACAG
TATTTTTCTTTGTAGTAACTTTTTCAATTAAGATACTCCATGAAAAATTAGGATATTCAT
TTTGAAATGTATCGAGATCACCAGTAGCTACATCACCTGGATTACATCTTAACCTAATTG
CAGAGTTAGTTGGTAGTGTCTTGATATGTTCTTTAACAGTGTAATTAAGTTGCTTAGTAT
CCATTCCATGGACATTCAAAGTATCATATCTACGCGCACCCTTATTCTCAAGGAATGTAG
CAGTCCATTCGCCATTTTCTTTCACCACAACATCAAATAATCCTTTTGGAATTTCATCGT
TGTGACTTAATCGGTCAAATCCACCGGCAGCTAAAATGCGTTCATAGATAGACATCTCAT
GAACATGTCCACCATTGATCATATATTTAGTTAATGCTAAATATTCATCTGGATCATGTG
TTGGCTCTTCAACAATGCTAGGTAGCTGGTGTTTAAATGCACCATGTAAAATAGTGAAGT
CAACTTGAGATATACCTTTCTTATGCATTAAATCTTTTACTTGATTTAAAGTCTCTGATG
TGGATGGATTCCATTTATCAGGGACATAAAGGAAATATGCATCTAGTTTCTCAATATACT
CGATATCGAGAATCTTTGAATAATGCAAATCAACTTTAATATTAGCATTATTCTTTTGTT
CTACGAAAAACTGCATTTGCCCACGATCGTGTGATGGAGTCCCTTCAACAATACGGATCA
TTACATTATACATTTCACATTTGTAGAGAAGTATTGTAATAAATCTATCAATTGCGTATG
CAGCTGGATCACCATTGTTTAATTGGCGATCAAATAAATCCCCTGTAATAATCAACATAT
CAATATCTTTTAAAATTGTATCAGGGACAGTTTTCCAAAAGTTATTGATGATTAATTCAG
TAGGAGTTTGGCGATGCCCCATATGGACATCGCCTACTGTTAAATATCGAAATATGCCAG
GTTTCTTTGTTTTATCAGTCTTCATATTCGTCACCGTAAACACATTCATCATTCTCAGGT
GTATCTACTTGCACACCTCCAGATTTAGATGAAGATGCATTCGGTAACTCATATAACGGA
GTACCATCAGTATTTTTTAATACCCGACCATATGCTGCTAAGATTTGGATTAACACTTGT
AGAAGTTGTTTTTCCAATGGTTCATTATAAACACACCGCTCTAAGAATTGAGCTGCTTCT
TTAGCAAACCCACCGCGTGGATTGCGATTATGTTCTTTATTATAATAATCCATTACATTA
GAAATACTAGCAACATTCTCACCAGATGAGATTGCAACACTTGGACGAGGATAAAGTGCT
GGAACTGTAAAAAGTACAACTGCTTCTTTGGTATTAACACTTGCTACACGTAATGGATTT
GATAGCTCATGAACATATTTACGATATTCATCTAATGCACCAGGTGCCCACGGACATTCA
AGTAACGGTAATATATTCTTTACAAAAACGTCCTCATGGACAATAGGTATCTCTTTCTGA
TGAATGCTAACCATGGCTTGCATTGCATCCATGATCATGTTATCGCTATCTGTAACTCTA
GTGTTCGGTTCCGGAGTTGCCATCTTCTTTACCCATAACTTGTTCAATCTGTTGTTTAGT
CAGAGTAGTGATGATATTGAAACGAGCTTCTTCTTTGTTTTCCATTAGTTGAGGATTACT
ATTTAGGTAATCAATCAACGCATCGCAGTTTTCAGTAGTGAACTTATTAGGTGTTCCAAC
AGTAGCAAACATATAACCTTTATCACCGCCTTTACGAACAATGACCGAGTCCATATGTTC
TTTCTGATTAACTCCATCTACTTCAACTAGTGAGAATACTGGTTTAGTATCACCATTGAT
AGCTCGCATTGCGTCATCAACTTCACGCCGAATACTTTCACCCATATTGCAAAGAATATC
TGCAAGAACTCGACTAACGCGAATATTAAATGTTGCAGTTTCTTCAGCTTTAACTTTTAC
CAATTGTTGGAAAGACTCATCTATAACTTTAGCATGTTTCGTTAGATTCCTAACTGTTAC
TTCTAGCATATGAATTCGTTTTAATAGCATGGAGTTCATAGCTTCGCTTTCATTTTGTTC
AACTTCACTAGTCATTTATTCACCATTATTAAGTCTTGCAATTTCAAGAATATTAGAATA
TTGATAACGTACGAGCTTACCGATCTGAACAGGTTTACCTTGAACTAATATAGTAGCAGT
AAATGTGATGGACATTTTACCATCACCTGTATTTGATTCATCTTTTACTATTACATTAGA
ATCAATTAGTTCATTACCAAATACGGTATTAAACTTATCGCTTAAGATACGTCGTAGTTC
TATCTCTAATTGTGGATAATCATTGGCATATACCTTCAACAGATAAGGTAATGAAGTACT
TCTTTCCCTATTAATAATATCTTGGGATGGATTAGATAGAATGAAGTATGAAATCGTTTT
ATCTGCTACTTGTTCAGGTGTATCAATCCAACCACTAACAGATACTGTTGGAATCGTTTT
TGGCATATTGAACTCCAAAACTAAAGAAAAAAATTAAGTTAAGATGGGAGCCAAATGGCT
CCCTTTATATTACTTGATACATACAGTTAAATACTTACATTAACTAGTATACTAATATTT
ACATGCAATTAGTTCAATGTGATACACAATAACAGCATCTTCTTTTTTCTTGAGTGTACT
TGTTAAAACGATATCGTGTTCAGTAACACATGCATGTACACTAATGGGTCTGGTAGTAAT
TTCACTACTTGTCCCTGAAAAATGGGTTGTAGCTACATATAGCTGGGTATCATCAATTAA
CCCATTCGGATCTCTACCAACATGTACAAATGGTGGTCTGTTAGCCACCTTAGGATAGTC
GTCTTTAATAACAAGATGGCCATCTTCAGATGGGTAAGCATAGTCATATCCAGTCACATA
GATACGTAGAGTACCATTTTTAAATGCTTCTTTAAGATAAGAATATTCTTCAAGATTAAA
ACGAGTTGAATCAACTACAGCAGTAGTTAATTTAAGAATAGGGTGCAGTGGCATTGATGG
GTTATTGTGCTTAATTAATAGCATCGGTATTTTCCTTAACGTAATAAGCAATATGTGGAT
GGTTCCACAATGGACTCTCATCACAAAAACTATAACTATGTATTTCCTCGCCAGTATCTA
ATTTAACAGAGACCACTTCACCTTCAATAACTGTAAAAATAAATTTAGTATCAGGTGAAA
CATAATCACCAGTTACATAGTCATTATCAGGAAGATACAATAGTCGTGTTTGATTATCGT
GTTTAAGTTCTATTCCATCTGTACTATTAAAATACATATATCCCGTACCATCTGGACTTT
TTTGAAACATCTTTAGTTTATTTGGTACGAGTAGATCAATTGACATAGATCTCTCCTAAA
CGATAGAAGAGAGCCCCTGTACGGGACTCTCATTTATTTAACCTAGAAGATTACCTACGA
CTGAAGTTGGATCTTCTTCACCTGCGTCTAGATGCCCATCAATAGCATTCCACATACGGA
TGATGTCAACTTTTTCATGCAAACTAAGTTTACGATCACTCTTGATATCTTCGTGATAGT
TTTTATAACCGAATTCTTTCTTATCGGTATACATAACTCCATCCATCACGCGACGATAAT
CAAACTGTCGCTCACCTACTGCATCACCTTGGATGTTATTATAAGAACCACTATATCCAT
CAACTTCATTATTAAGATACATAGTTCTTAGACGTTCATGCGCCATAACCCAACGTTGCA
TAATCGGACCAGCTGTTTGTAGTTCAGCTAATGTCTCAAGATACACAATGTTGTTCGACT
GCCATAAATTATCTTTCTTTGTGGTTAGATTCCGCAGTGCTTGAACAGCAGCTGATTCAC
TAATCATACTGTACATATTTTGTGCAGTATTGAAAAAGCTAGCAGCAGCAGTTGACATAG
TTGAACGCAGTGCCTGACTACGCTCACCCAACCATTGGGTTGTTTGCTGTGTAAGATGGC
CACCTGCACAGATGTCCAAGAGGTCTACACCATGTGCATCTACAATCATTATTCACCTCA
GATACTGTACTCATATACCCAGCACAGATTAAATAGACGTTGCATAATAGGTTACCTCTT
AAAGCTTAGAGATCATTTCGACATATGCATCGACAAACCTTCTGTTTACCACTACATCAC
CATTCCCACGAGTGATATATCTCCCAGTTAATATAGCTACCGATCTGGCTTCACGTTCAT
CTCGTTCGGCTTGTGATAAACGTTCCGGGTTACGTCGAATAATTTCACGAATATTAGACA
TTGGGTATTCCCCTTATCACTATTGCACCTTAGTGATATAAATCTGAAATTGAATTCAGT
GTAACTTCACGGCATAGTTGTCCAAGAGGTCTACACCATGGGCGTCTATAATCATTATAC
ACTTCAGTTATTGGCCGTATATGACCAGCATAGATTAAACGGATGTTGCATAGGTAAATT
AAATGTGTCTAGTTCCTGACCGCACCAATTTACAGCTTTTGTAACACCTTCAACAGTTAC
AGTTAATTCAACATAGATGTCATGTTCAGGTGCAGTTACCACAATAGCGATTGGATCATC
ATGTTTAATACGGAATCCAAACTTAGGATGATGGAATCCCGTATACTCACCTTTAGTATT
TTCTAGAATACATTCAAATAGATTAGTTTCTTTATTAAGTTTAAATGTAACTAGTTTATC
TGAATCTTTAAGTAAACCATTATCCCCAAATACATTGAACCGATAATGCTTATGGCAGAT
ACCAAGTGTTTTTGGTACATCATGGGAATTATCGATTTGCTTAGTACATTCGTTGCATTT
ACTATCCATCTTTATTTACCTTTAATAGATTTGTTTATCAAAAGAACAATTGATTGGAAT
AGTGATAACTTCATTAGTAATTACATGTTTGCCTGTCTTTTTAAAGAATTGGGCAAATTT
TGAAGTAGCTGGAATTACAAAGGTATCATCCCGATCATTATTTGACATATTGTACAGAGT
AAATTTACCGTCTAAATCAAACCTAATTTGCCATTCAATATCACGTACTTTGAAATCTAT
ACCAAATCTTAAGTGATCATCAATCAATTCAGAACCACCGTATTCATAAGCTCCGGTGAA
ATTCCAATTAATTTCTGCGAATTGGAAAGTTACAGGATGTTCGCCATATTCATCTTGTAT
ATAGTAACCATCATGAGCTTTCCAATAGATAACTAAATCATGCATGCTACCAGCCTCAAA
GAAATAATAGGGGAGTTAGACTCCCCTATTAATTTATTTTGCTTTTAGCCACTCTTCTAA
TGGCGGTAAATACTTCTCATGTGCCCAGTTAATAATTGTTTCTACAACAGGACCCTGTAA
TTCAAGGTTACCTGAGATTTCATGTGGTTCATCAATAGATAGAACCCATGTATGTGGCGC
GATGCGTTCAGTTGCTTTGGTTAAATACACATCGGGCATTAATGTTAAATTAAGTTGCAC
TATCTTCATACAGCATCGTCAGCGACATGTCTAAAAATCATCTGGGTCATTTTCATATTT
AAAAATGAACCCATTAATTGGTCGACGGTCTTTCTTTTTGAGTTTGCTAGTTACTACTTT
CTTTGATAATCCAAGATCGAGATATGCCTGCTTGGCTGATTTGTATTTCAAAATCTCGCC
AGTTTCCACATTTTTCACAAGTGTGGTCTTATTTTTTAGCCTGACTATACTCAATGGATT
CATCCCAGGTTGGCCATTCTGAACCAACCCGACGTACAATGTACCTATCCATAATGACTG
GATAAATTGCATGTCCGCTAACTTTCAAAGAAATCGTACCTACACTAACCCCTATCGCCT
CACTTGCTTTCTTTTGCGAGTCATATTTCCTGATTTCACCCGTAACGATATCCTTTATCT
CAATACCGTCGTGCTCAAGAACAATTCCGTCCGTGTTAATTCCGCGATTTTTCAACATTC
TCATGATCGCGGTATTCTTTGCTGATCCAATATAACCGGTTTTGATTGCATTTCCATGCA
ACACATTTTCACTCTGGGTTACCCATTCTAGGTTATCGGGTACTGTATTGTCACGATCAC
CATCTATGTGGTTGACCACTTTCTCATTGATGGTGTTATCGTATTCAATAAATGTCAGTG
CAGCTACACGGTGTAAATTCGTTCCTACATAGGTGCCATCATCTCGACGCAATCCAAGAT
CTCTGTATCCAGTTGTCGCCAAACTTGTTAATTTAGCTGAACCTTCAAAAAGACTTATGA
CCTTGAGTTCATCATTGATTGCATAGCAGGTAAAACTAGGGATGAAATAATATCCTGGGA
AGGTGGGAACCTCCAATCCTTCTTCCGGGAATTTCCAAATCAAGTTTCTAGGATGAATAT
TGTCTTCATCTCCATCAGAAAACAATATTTCGCAGCGGCTAACAAACTCTAATGGCGCAT
GCCAGCCTTTAAAACACACTGCTATCAACTTAGTAACATGAATGGGTAGTCTATGCCATG
GTAATTCAAGAACGTAATGTCGGTTTATTGGATCTATCAATTTATCCAAAATCGATCATA
GACTAACCCATCCAGAGTCAGTCTATAACGCCCGAATGTACCGGGAATCACAATTTCTCT
CGATTTGGGTATACGACTGTAAATAAACACATATCCTCCATTGGAAGACATGTCGCTGCT
GTACCGTCCACTTAATATCTCCCGACATTAAGTAACTGCTCTAGCTTTCACTAGATGGTG
AGACTATATCTTCTTCCCAGAGGGAAGCCTTCTATTTCGGACCACTTGGCCCTACTCTAC
TCCCTTGGCTGCTTTCGCAGTGGTTTCGATAGTCGTTGAACGTTCTTCCTATCTCGCCTC
ACGGCAATACGTAGAAGCTTCGCTGCTGATTGTCCAATCCTAACACTTTTCAAACCGTTA
CATTTTAGCTTTCGCTATCTGCTTTGGTAGTTAGGCTCTAAGGAGGTTCCAGCAATTAAG
AAGGTTAGGAGACCAATTAAAATCTCCGTCGAAATCTGCGTTTGGAGCCTTAAGGCATAA
AACTGACATGCTGATAGAATTATCATTAATGTCATCTTTTACTTTAGTAATAAAGAACTG
CTGCGTAGATCCACGTTGAAGCGTTGGCAATATCTTCAGTTAGTTCGTTAGGCTAACCCG
CACCATTACGTGCAGCTCTAGCTCTCGCTAGACGTTGAGACTATATCTTCACCTTTGGCT
TTACCCAGTAAGGTGCTTCCCACTTCGAGTCCACTTGGACCCTACGTGCCAATGCACTAG
TCGTTGAACGTTCCACATATTACAGTTAAGTAACTTAGCGGCTTAGCTGCTGATTGACTC
TATTCAGTTATTCTTAAGCATTCATAGAACCTTTCGGAACTATTGTAGCTAACTGACCTA
ACGAGTTGTTCCAGCAATTCAAGAAGTTTTGTCGAGTATCATTTCTGATACAAGGAAACC
CATATTAAGTTAAGTCGCTACACTAATTGCTTAGGTGGTATGTAGCTTCTCTCTACGCGC
TTTGTATCTATTGTAATCATCAATGGATTTGTTAACCATTTCTTGGGTTAGGTTAGAAAC
GTATTCGAATAGCCGTTCCTTATCATCGACCCTACAGATAACAACACCGTTGAATAATCT
TAGATCTGGTTTCTTTAAAATGTCCTGCACTGACCCTTTAATTAACCCGGTTCTAAGTTG
TAACTGCGTTAGGTTTACATATCGTCCAAAGGTGTTGGTCTTGAAGTCTATGCAATAAAC
TTCAATTGCATTCTTACGCTTCTGTGGGTGATAATCCCCACTTACTTCGAATACATATTT
ACCTCTGAATGGTTTAACTAAATGACCCAATACGACATGTAACCCTTTATTGTGACCAAG
CTCTAGGAACTCGGCTACTTCTTTCATCGAGATGAAGTTATTTACTTCACCAGTCAGAAT
GTTTGTACATTTAACAGCGAGTGCATGTTTATTGGCACCGGTTATAAATGCATGCTTAAC
ATTACCGCTACGAGTTTCCCACTCTAGGTTAAGGTAATGATTATTATGCTTAATGGTATC
TTTGTGGTTAACGTCCAACTCATTAAAGTTTTCAGGTAACCCATGAAACGCCATGCACAC
AAAACGATGAACATAACGAATCTTTCTAATACCGTCATCATTGTGGATGTTAACGGTAAG
GTAAGTACCTTTAGTTGTCTTATTCTCGTGTTGTGAGATTAATTCGCCTTTAAGGTTCCT
AACTTGACCATGATCACTGACTTCGTAATTATTGAAACCAGGTATTTTACGCCATCTTAT
TTCTTCATTCATAATTCCTCATTAGAGATTCCTGGTTACCACACCCAGAATCTGTAGCGC
TTTAACTTAATAGATTAATTTCGGTGAAAAGTACAACCCATCCCTTTATAAGGGGCTGCT
TCTGCAATTAACTCTTTAAATAGATCTGCGATGATTTGGTTATATTGAAGTACATTCTCA
TATACAAATGAGAATGCTTCACGAGTTGTCATGTTAAACTTAGCTTTTAACTTGTTAGTT
AGATGATACTTTAATAATTGACAACCTACTCCCCAAGGGATATGTAATTCATCATAATCA
TGCGGGTCACTAATAGAAGTGATTACTGCACGTGCCGTAGCGTTGAGACGAGCACCAAAC
ATGTGACGCCGAGCAAGACCAGGCTTTTGAGCAATTCGTGATTTTGCGTAGATCTCGTAG
AACTGGCCATATAGTCTTAGTCCTCGCATAGTCCTATTCTGAGCTTTAATTGGACTAAGT
GGTACAGATGATGCATCAATACTAGCGAAGGTTAAGGTAGCATCAATTGCTGCTTCAATT
GGTTTATCTAAGTAAGTACCAGATGTGGTTGATTCTGCTACGAAACAGAGTTTAGAAGGA
ACTGGTAAATATTTAGGGAATAACTTATCTTTATTCTGAGCAACGAATTGAGCGAATTCG
GATTTATTATTAGAGATAATATTTGCATCTAGTAGGAATTGGAAGATCTCATTGAAATTA
TCAATGAAGTGATTTAATCCTCTTTCAAATCCACGATGCAGTAGCCTATCTACTTTTCTG
CGTGTTTCTTTAGAACCAATAGATTCCACATCGTATCGATAAGAAGTATCAGTTAGATAT
GCTAAGAAATCGAATTCTTTAGTTACTAGATATCCGGTTAGCATAATGATTAAACGTGGG
TTAATTAGACTACGTACATGTTTTGGTGTACGAACCCACATTGATGGTTCGATAGGACGG
CTAGAAGTATTGACAACTGGAGTATTACAAATATCACAGATTACTCCGAGTTTATGTGCG
TCTTCGATTGCTCGACAATCACAGCTTACACTACTTTCAATTGCTTCTGAATCTTGGAAA
TGAGAATAGAAATGCCTATCAAATTCTTCTTTCTCATCTGAGTTACTCGTATTGTAATCA
TTGGCATAAATTCGTTTACCCGTAAATTGATCATGAACTTCATTATGATCAACAACTTTG
GCATAAAGACCCATACCAAACTCCTATTTATCGATTAACAAAAAAAGGAGATATAAGCGG
CCCCCGAAGGAGCCGCTATATCAGTTTTTACAATGGACCACCAACGGAGCCTGGCCCGAT
CCTAGCGTCATCTACAAAGCTTAACCTCCGCTCTTCTCTGTAGCATACCGGCACTAGTAT
CATTTACCATCCATTGTAGTTTTTGATCACACGTCACCTTTTGAGTAACTCCTTTCGGTT
AAGTGATCTATCATCCTCGTGTAGTGATAGGTCGACCTAGACTAAGTCCACTAGTCGATT
ACTTCACGGAACCTACTCCTAACCGTTATCACCGAAGTGAACCAGGGTCGCAGTATTAGA
ATCGGGATGTTACTTATTTAACATCCCTATCTACCGAGGTATTTCCTATTAGTACCAGGT
ACCCGGTGCATTATAGGAAGGAGCGCCGTAAGTTTGACCCATGCTGCCAGCCATACCAAC
TTGTGCACTACCAGAAACAGCCATGTTACCCATACCGGTGTAACCAGCGAAGCGCTGTTG
ACCGAAGTTGGTAATTAGGTTTTCCATGGTTACAGTTACACCAGCGGCTGCTGCTGCGGC
ATCCATTGCGGTGATGAATTTCGGGTTAAAGGTTAGACGACGAGCACGACCAGTATAGGT
AACGTTACCTAGGTACATCTTGTCGAAGCCTTTACTGTTATTCATACGACGCACAATGTG
GTCATTACCTACCTGAGTAGCATACCAGGTCTTCCACTCTTGGTCATTACCTTCAGACAT
GTTCATGGCACCTAGAACGTCAAGATCACGACGGTCGCTTAGTTCGCCATGCTCATCAGT
GTAGTGACCGAGGTCTACTTCATGATGGTTGTCAAAGATAATCGGACCAGCTTCAGCTAG
GTTATAGAACTGACGGAAATCAGTGCCGTATAGGTTAGTTAGAGCTTGGAAGATCAGGCT
AACTGCACGAGCTTGGTTTACGCCACCAGCTGCATCTAGGATGACTTGCTCAATAGCTGA
GTTGTCGCCCATTGGATCGATATCGATCTGGAATGCAGGGTTCTGGTTAACCATCTTGTT
CATTAGCATTACGAAGTTGCTGTCGTCTGCCATGAATGCTTCGGTGCGAGTTTCAATCGC
TTTACCTAGCTCTGAGTAATAACCAAGTGCACCAATATCACGCATCTTGCTAGTAGCGAT
CTTCGGCATTAGGGTACGAGCCCATGCCTGGGATGCAGTTGCACGATACGCATTACCGAG
TGCGAACAGCCACATTTCTAGAGTCCATGCTTGGATCCAGGATGCCTTACGAACGTCAGT
GATAACGATGTAAGGAGTGAACTGCGGAGGTAGAGCTGCACCAGGTAGAGTTACGCCAAA
CATACCTTGTTGCTGGCCAGTGGTCGGAGTCCAATGTAGATCTACGAATAGACTAACTTG
GTTTAGCTGGCTATCGGTATCATAGAACTCGTTCTCAGGTACGTTGGTTTTCTTACCACG
GCTAGTGGAGATGACCATGTCAGAACGGATCGGATTACCACAGCTATCTTTAACCGGAAT
ACCATTGTAGTCTAGGTTGCAGGTAAGCTGTTCGTTTTCTGCTTTGATGTGGGTCGCAAT
AGAGAACGGAGTCTCATTGTTACGACGTGCAATAGCATCTTCACAGATGTTAACAGATTC
AACTAGTAGGTTCTTAACAGCTAGTTCATCTTTGAAGTCGAAGTCAGCATACACTGCACG
GGGACCGGCAGATAGTACTTCTAGACCAGGGATGTTGTAACGGTTCCGTAGGAACTCGCC
GATCTTGCTCCAGTATTGAGCAGTGAATACATCACGCGGTAGTACCTTCTCTTCAATGAT
GTCGTCGGTTAGACCATTGTTGATTTTGTGGGTACGGGGACGGATGCGAGTACCAGGTAG
GTTATCGAGTACTAGAGTACGAACGAATGCCTTCATGGAACCATTGATATCTTTAGCTAG
TTTAACAATGAGTAGACCAGCCATACCAACTTGTTGCGCATCACGATCGAAACGATGGAT
ATCGAAGTCATCAGGTAGGTCCTGATGGCGGATTGCTTCTTCTTTTACTTTAGTGAATAC
TTGTAGGGCATCTGCTGAACGAGCATCAGAGCCATCTAGTCGACCAGAGCGACGCATTAG
ATGGTTAATGCCAGTAGTAGACCCAGGCGCGCCAGTAGGACGTTGAGCTTGACGCTGTGC
AGTGGGTTGCGGAGCAGGAGCAGTAGCTTGAGTTTGAACGGTGCCGATTTCGTTTTCGTT
AACAGCCATTTTAAATACCTTTACGATTATGGTTTCTTGATCAAGAAGAACCTAAGTACT
TAGTATACTAGATTCAATTTAGTAATATAAATCTCAAATTTTTTTCATTACAACATAGAC
GCTATAATCTGCTATCAGCAGATCGTAACGAACACTATGTTCACTACATATTATTACAAT
CTGAGTATTATTTATTTTTCATTTTACAATTTCCATATCTTCTTTTTTGAGTTTATGGGT
ATAAAGTTTGAATCCAGAAACTAATTTACGTCAGTCCTGTATTAAATAATAACTATCAGT
ATTTTTATAAAATGCAGTTATCATTTACTTTGCATATATTTACGAACTGTTCCAAAAAGA
GAATGGTACAGTTTGTATAGTTTACTAACTGGATCAACTTTATTATTATCAGTTGTGTCA
AATTTAGCAACAAATGGTGAATGTGCTGAAGCAGATGTTTCATTTACTTTAACTACACTA
CCAAATCGATGCGCGACTAATAGCTTAACTAATTCCTCATGGAGTTTAGTAGCAGTTGCT
AATGGATTGGGGTCATTAGGATCTATCTTAACTCTACGCTCTACATTGAAAAAGTTAACT
ACAATTTCTTTGCTAGTCATGTATACAGTAAGATCTTTGTTATTACCTAAATATAGTGGC
GGGTCTTCAACATTATTTTTAGCCATTGTATATTCCTATTTGTAATTACTACTGTTGTTA
CCAAACTATGATATAGATCTCAATTAATTTTTAATCGGATAATAACCATGTATAATTTAT
TTAAGAATGCTCCGTCACGTAAATTGGGGCAGGTGGTTGATCCTAACATCCATTATATCC
GACGAATCTACGCTGAGCAAATTAGGGACGTTAAAAGTTATTATAGACGGGCACCGAAGT
ATGTTGAATCTAAAAATATATTAGCACAAATGATTCGACATTTTAACGTAGAGTTACTAA
GTGATGATGCTACTTTTATAAAGAACGTGGACGATCGTTCACGTGCTATTATTCGTTCAT
TTGGTATTACATCATCTTTAAATAAAGGTAAGGTTCATGTAGGTGGTGTTACACTTGGCC
CTCAGACTGAAGAAGTTTTAGTATCCACATCAGAGAGCTTTGATCTAAAAGATCTAAATA
AAACATGGTATAAACTTTCCCCTGTTACGTATCTGTATCATACACGTACTGATACTAATT
TACCTATCATGAACAATACCACGCAGGGTAGAGGCTATGGTGTAACTCTAGTAAATATAC
CAATGCTTCTTGTGATGTACCGTTACTGGTATCGATGGCAAGTTGAGAAGAATCCTGATG
AAGTTGAAGATACATATAGGTTTATAGGATCATTTGTATTGCCAAATATGGTTGACTCTT
ATTTAGATATTTCTTTCTTTAACAGGTTAGCAAGGAATGCTTTAGATATTAAAAATCCAA
CATTCCCTATACCGCATCCATTTTACATCACTGATATGAATCCACGTATTGATAAACTAT
GTACAACTATCAATAGAGAATCCATATTAAAGGGTGTAGACATGGAGGGTTTATCATGGA
TAACACCAGCTATCGTACAATCTAATTTGTTCGATATGATGCGACTCCCACGAGAACCTA
TTAATAGGAATAATGAATGGGCTTATGTATTGGCTCGCACACCCTTCATTAAGTATCTTG
TAGGACAGCTTTTAAAGAACACTGGTTATGATCAATCTTCTGTTAACGCTGTATTAATTG
ATCTTATAGAAGCATCTAATGATCAAGCATTTAAGCAACAAGCAAATAGCGAGTTTGTAA
AAGCTCAACAGGCACAAGTTGATTGGATGATAGATGCACTTAAAAGAAAAGAAATGTGAC
ATAAACCCCCTCCTAAATTGGAGGGGGGTTATATGCCGTTTTATTAGAAATTACCTTTCT
TCATTTTAGAAAGTAATTTTCTACGTTCAGCTCGGTTAATTCCTGGGATAGCTGGCAATA
GCATTTTATTACTAAACTTACCTGGTCGACGGTCATGATTTAGTAATTGATCAACTACAG
CTTGGTCACTGCTTTTAACTCCATTATCCATTTCATCTAATGGATCCATAATAGTTTTAG
CAGTTAGCCTTAGATGCGTAACCAGTTCATCGAATGAACTATCAGTATTAATAAGTTGTT
TATCAACACCTTCTTTAAGAGCTTGTTTAATAGTTACGTCTTTTACTAGAATATTATCAC
ATTCCCAAAGAGTTGTATGATGGGTATTTAGCATTAATTCAAGTGAGACATTATTGTAAT
CATTGTCAGCACTTGAGTGCCAATTGAATTCATCGATATAGTCATTTAGACTATTTAACT
TTGGTGGTTCGTTATTAGAGGTAATTAAACCAATTGGTTGAACATCATCTAGTGAACTTT
TATCACTAGTAATTGCAGTTGTTTCAGTAGTAACATCAGCTTCTTTTAATTCATTAGAAT
AAGTTACATATACCAATTCCTCAGTACCATCATCCAAAAGAACATAGGCTGTTGCTTTGG
TGGAATCATCAGGGGCTAATCCATGGATCCTAATACGATTATCATTTACTAATTTACTAT
AATCATTCCAAGTGATTACACGAACTTCATTAGTCTTTTCCATTATCATCTACCTCTTTT
AATTTATCTTTAATATATTTTCGGATAAAAGCTCGTTTCTCTTCACGAGTTAATCCCGAT
GGTACTGTTGGTAATGTGATAGTGCCGCTATTAATTGCCTTCTTCATCCGATCTAAGTCA
AAATTAAATTCGGTATGATTTGTCATTATATTGAACCATATTAAGTTAGTAATTGGCAAT
CAGACTATATAAATCTTAATTATTTTTTAGTATATAAGCCTCCCACTAGGGGAGGCTATA
TTTCTTAATAGAAGTCGGAGATGAGTCGATCGTTATTTTTATCAATAAGGAAAATACCTA
GGGACTCTAAGGTTAGATAGAATACACCCATAGTATTTCCAATGATAGTTCTAACGTCAG
CAACACGCGTAATAACTTCTGGAATACGACCAGTTTCTACTACTGTACTCGGGATATGGA
AATCACCAATACTGGTTTTATTTTCTTCAGTAACCCATGCTTGAATACGAGCAGCTAATT
TCTTATCTTCGATACCATCAATCCATTCTTTGATCGCAGTTTTATTATTAAGAGTAACTG
AGATCTTTACATGTGAATAAGGTGGATCACCAGCGTCACCAAATGATGGAGCAAATACAG
TCTTCCACACTAATCCCTTTTTATGGGTTGAGTTATCTTCAGATTTATAAGACTCAGGTC
GTTTAGTTTGACCACTTGTCAGATACTCAGCTTTACCACTTCTAACAGACTCAATAATTT
CTCTTTCGATATCACCAACTTCTTTTAGAATTGAAGCCAAGTCGATTTTCTCTTCAGTCT
TTACAGTTTTAATGATATCTTCCATGAGTGTTTTAGCACGACTATTAATCTTCTTAGGTA
CTTTACTATCCCTTAGTCCTACACCCTTGATCTCCATTCGTGACTCATTAAACATTACCC
CTTCTTGGGCATCCTGTGATGCAAAGTAATGTTTAGAACGAGTAGTTAAGGCCAGTACTG
CGAAATAATATTCGTTCTTCATTGCAAATAGACGAAGCTTATCTTTAGATACACCCATAT
TAGCGGATTGAATCGCCAAGATATGCATAACTACTTCAGACACTAGAAACACTAGTGCGA
ATACTAGTCGCTTAGCTTCATTGCTAAAAGTTACTTTACCAAAGAATTCCTCAACCCACC
ATTGTAATGTAAACATAGTGGAGTCAGTATCTGAAATAACAGCAGCTCGTCTATACACAG
TTGGAAAAGCATGAATGCTTGATGGTACACATTTAGTCAAGAAGAAAGCTTCAATCAATA
GACGATATTCATTAAGAGTTTCAGCGATATTTCGACCAGTGGCATAAACTTGGTTTAATG
TATCTGGATCTGACTCTTTTAGTTTAGCTTTAGATCGACCTTTAACAGTATCAAAGCAAA
TAAAGCTAGCCAATAGATCCATATCACCATCATAAGTTGAATATTCTTCTTCAGTGATGA
TTTGTTCTTTTGTTCCAACCTGGCTTAATTTAATTAGAAAGCTCTTGATTAATTCTTTAT
TGTATTTATATAAGTGATATAGATCACCTACGTACATAACTGCTGCTCGTTCGACTGGTG
TCATCCCAGTAGCTAGTTTTAAAATCTGCGCCGTGTAGTACTTATTTTGCCAATAGTGTT
TAGTTGAATAAAGAACCATATCAACTACTTCTTCTGGCGTTGGGCAATGTAGATTAAAAT
TAGTTACTGCTTTTTGAATTAACTCCATATCAGCTACATTAATAGTGTTTACTAAATTAG
CTTTTGTGATTTCTGGAGTATAATAATGCCTATTACCCATAATGAATTTTTCATTATTTG
AGTTAGCATAAGAGGTACCAGTTCTACAGGTAGATGTTAAACTAGAGTGTGTGGACTTAT
AATAAAGAATAGTGGCAGCAGATACAGTACCGCCTGAATATGAGTTATTGTTAATTTTGA
AGTTTTCTTGCTCGCCTTTACGTACTTGTGCAAGTTCTGTTTTAATTTGTGAATTCTCTT
TATCGCCGGCCTGTAGGAAAGCAGCTGCTTCACGTTCAGCCTGCATCTGTTCACCTTTAA
CACGCTTACGGTTTTTCACACCTTCGGCAATATAGATGGAGTGCGTAGACTGTCTAACAG
ACTCTGGTAAATATGCGGTCATTGATGGAGATAATAATAGATTCTGTTTCTTAACACGGT
TAAGAAAAGCCATAAATGAAACCGTCTTTAATTCCCTATCACCAAACTTATTTTTATCTA
GAATAGTTGCTAATGGATTACGAAGTGCATATTCACCATTTTGACGTAATTGTTCTTTAA
CAAATTCTTTACATTCTTCTAAACTAATATTTAATTCATCTTTTGTCATTAATTGAAGAT
ATTTGGCATTATCATCAAGACATGCATTAATGATATCAATATCACGATGGTAATCATTGA
CATCTTTTAAAAACGGATTTGGTTGGGCAAATGCGGTCATTTCACATATCTCTCAGTATA
CTTATTTTTTAATTATAGTGAATGATTTCTCTCTTTTTAACTAAAAAAGAAAAGGAAAGA
ATGGGTACCCTATACGGGTACCCTAAATTGAGAGGTAGCACATCAACTTACATTCACATT
AGATGATGTAAGTAAGTAAAAATAAAACAACATAAAAGGAGCCATAATGGCTCCTTTATA
GTTATTCATATGTCACTGAAGTTGGTGGTGCATTATTTTGTCGCACTGCCAATAGAATGC
GATCATACATTTTATTATCGACATCATCCCATACTAATGTCAGACGTTTACCATCTACAC
GTTCTAATGTATTCGCAACAATCCAAGGGATACCAATAAACATCACACTTTCATTATTGG
CCATTCGTACACGAATGTAATTGTATTGTGTTGGATCAACTGGAGCTGACCCTGCTGGTA
AACTTGGATATACTTGCTGCCCAGCAGCAGCTACATCAAAACCCATTGCAGATGCTACAG
ACGCAGTAACAATACCTTCGACTGTAACGTTCTTAAAATTAGTACCTAGGATAGCATATG
GATAGACCTCGAACGAGATCCGATCACCTGCTTGAATGTCTCGAATATTAACGGCCATGG
TAATACCCTAAAATAGTTGGTTACATAGGGTATTACTCATCTAGTAATACTACTACACCA
AACAGACCTTTCGTATCCATTGGTACTGTAATGAGTACATGTCCATCTGGATACTTTTCT
TTAAAGCTATTGATAAAGTCGGTGCAATATTCAATAACATATCCTTTAGTAGAATAATTC
TCTAACTCAATATCTTCATCAGGATCATCAAATGAGTCATGTCCATACATCAGCATATGG
ATGTATATGTCATTATTAAGCGTATCCATATAACTTAACTTACGTGATTCTTCAAATAAA
TCAAGTGGTGTTGGACAATCTGGATATATCATTCGCTTTGTATATTCATGAAGCAAATGT
TGCGAATATACTTCTGACTCTTTAGATTTAAATACGATAAATACTCGTTTTTCCATATCG
GTTCCTAGTAGGAAGCCTATGTGAACCGATAGGCTTTCCTATTTGCGTCAATTGTTAATA
TGTGTCACTTAATCCACATCATTGTAACAGTCCATACCAAAGTCTTCACCTTCTAGAATA
TAACCCTGATTATGTTGATCAACTGCTATTGATTGGATTCTTTCTACACCATATCCATTC
TGATAGAGATATGTTATTTCAGATTGTAGTTTACTAGCCAATGTTTTACACACAGTCGCA
AACCACATATTAAGAATACTCAATGCATATTTATCTTGCATAATCACAGGTGCTACTGAT
GGAAAGTATTCTTGTAAATAATAGTCAACCCCTATGATTGGTTGAGTAGGCTGTTGTGCT
AGAAATTCAATATATGCATTAATCGCCTGATACCATAACTGTTCTATAGACTGGTGTTCA
GTATATGGGTAAGGGGTATTGTAAGATTTATTGACAACTACATCAGCCATTTTATTAACA
ATGGGCCAGATATCACTGATGTTAATAACTACGAAACTCGTCAGTCCTTGTTGACCTGGA
GTTATGTTATTAGCATCATTTATTCGCTGCATTTCTTGTTGTCTATAAAGAAGTGGATGC
ATCATGTTTGAGACCTCATAACTAATTTAGTTACCATCTTATATTTATCTACTTCTATAC
ATTTAAGACTAGTAATAAGATTACCTGCTTGAATAACTTGTTTTTGGATTATCTCTAGGA
AATCAGTTCCAAATAAATCCAATACCCTTTCGATAATCTCAGCAGATCTTAAGTGCCAAT
TGATGGTATTAGGATTTCCCTGATGATCAAATACCATCATACTCGTCGGTCTATCTGGTT
CTATATAGGTATCGCTTAAGTAATCTTCTAACCATTGCTCTAAAAAAGTAGGCCAATCTA
ATCTCTGCCAATGGTTAAAGTATTCTACATATGCTGCTAGAAGTCTATTAATACACCACA
GTACAAAATCAGTCGGCTCATCTACACCTAGCTCTTCCGTAAAAGAACGCGGTTTCAAAA
TTAGCAACAATTGCATATTGACTCCACTCTTTACCAGTGACTATAGTTAATAGAACAACT
TTATTATCTATTACTCTAATGAACTTATAGTCTATTAAATTCTTCGGTGTTCTATGTAGT
AATTGGATTCCAGTTGTATAAAACAAATTAATGAACTCATCCCAATCTGGACCGTTTCCT
AATTGTATTGGTATATCCACAAAAGGAATAACCGTATTATCCTGTTGTAATTTAGACATC
ATCTTAACGACCCATTGAGTTAATAAGACGATAGCTGTAGCTTCATCCTTATTTGTTAGG
TAAGTAAATTTCTTTATCAATGTGATTAATTGTGGGAATACCACTTCGATTGGCAATACA
TATACCAGACGTTGTACTTCCTCCGATGTACAATCCATCTCGTGCTTCTGTTTCATACCA
CAGTTCCTTAGTATTTGTTGGAATGAGGTGCATGATCTGCTCAGCGCCCTCATCGAGAAG
TTCTATTAGTTTATGCATGAAATGAATGTCTTTAGCATATTCATAGAACATTTCTTCTTT
AACGACCATTTGCATAAGCTTCTGTTCTGCCAATGCAACAAGCAAATGCATTGCTTCGAT
ATAACTAATATCTAAAAAGTCTAATACAAATCTTAGATAGTTATCATCTTTAATAAGTTT
ACTTTTAGTCGCTCTTAGTAAAAAACGAGGTTGTGGTGTGAGTAATGGTGACGTATAGAT
CTTCTGGTTTCTCAGTATCATAAATAACCCTATTTAACTGGATGTTACCAGCTGATGGTA
GAACTACCCGGTTAGAACAATTATACAGATAAGTTGTTAAGTCAATATCACAAATATCTC
TATAACCCAGCATCTGATTAATTAGTTCTATGATATCATTAGATGTGCTACCTGATGCCC
TCTCAGACGCTGCTGCCAATACAATTGTTAATGCATATTCTGCACCAATACTATTTTTTA
TAGATTTCCAAATATCAGAATGTTGATCTTGTACAAAAGATCTTACTTCCATTCTGATAC
ACATTGATGTGTCTTTATCATTAGATATGTTCATTATAAAAACCTTATAATCGGTATAAA
GCCCCCCATAAGGAGGGCTTTATTTAGTATAGATTATTTTCTAAAATGTATCGCTCAGCT
TGCGCTCGCTGATCATCAGGTAAATAATCACCACGTTGATATTCAAATACTAATTTCTCA
ATAGGATAAGTTGCATTCTTATTCTTGTATACAGAAATTACATAGCTATGATACTCTAGT
TCATACTTAACATCATGCTCAATTCTGGTTGAAAAATATGCCATGTTAATAGAACTAACT
AGAGGGCTAATATATTTCTCTTCAAATAGTATTAAATTATCAAGTCCTAAATTTGCAAAG
AAATCATGGTTAACCTTAGGTATTAGATAAGATACTTTAATATTACTATATTGTTTAACA
ATTACACCAATAAGTAATGCAGTTAACTGTTCTTGAATATATTCTACTGCGATGTTATAT
GCATGGTTAGTAGTGATGTGGTCTTTATTTAAAGTATAGCTACTGGCACTAGTAGTAGAT
AGCTGAGTTTTACGCCTAGATTCACAGATGCTATAACCTAGTGCTTGTAACTTAATTTTG
TCAAAGCCATGGAAGAATGTACGGAGAAATTCACTAAATAAATAGTTTAATGGGTTCAGT
AGGTTAAGTGACACTACTGCATGATCATCGCCATTATCAATCCCATGGACACGATCATAT
TCTGCGATACGATAATCTTTGCCACTGATTAAAGTTATAACTGAACCAGCTTTAACTACA
TCCCATTGGATCCATGTACCACTATCGATATATTTAGCTACTTGTTTATAGATATCTAGA
TAGATAGTTTCTAGATAAGGTAGTTTCATTAGATTTTCTACCCAAGCAACTTTATTACTA
TCTACGTCAGTTACAGCACAATTAAAAATAGCTGCTGCCATCTTAAGATTGGTGTACTGG
TCTTTGGCTGTTTTATATGAAACTAAACTCTCTACTATATTTTCAACCATTAGATGTAAA
AACTGTTGAGCCACATCTTTACTCAATTTCACCCCAATCGCTTCATCAATTGAAGCTGAA
GCTGTAAGCTGACCTAGTAAATCGTATATTGCTTTTTCTTGGTGGCGTGTATCAAGTACA
ATGAGCTTATTCGACATTATATTTCTCCAATTAATTTTTTGGAATAGCGATCCAAACTGT
GTTCTTTAACCGATAGAATATTACAAACTTACCTGCATTTACTCTAGGTATAATTTTTAA
TATATCCCAAAGATCAGATGCGGCTTCATGATTATCATGAAACCATTGGATTTCTTGAGG
GGTATTGTTTATTGGGCTATATCCAGTAGTATACATGAATTCAAAAGAGTCAATAGAGTA
TTTAAAGAAGTCATCAATTAAGCTGTCCTCTACTGATTTAAATATATGCTCTAATGTACC
ATAGTCATCTGGATGTATTCCAAAGCTTTGGCACCTAATTGCTAAACGCGCATTTATTAG
CTCTTTTGGTGATCTTGGTACTAACTTGGCTATTACCCTCGTTACATCTATTACATACAG
GTCAGCTACTTGGGGAGTAGTCACAGTACAATCTCTCATTAAATGTTCAGGAACATGATA
TAGATCTAAAAATATTTTTAGTCAAATCTGTTCGTGGTAAGCCGATGTATATTATACCTT
AGTTGGGTATTATCTCCATCGAAAAAACGCGTACAGCGCATTATAGGACGTTTTTATGAA
TCCAATTACTAAGGCTTTACGTGATATTTCTTTTAAGATCCCAAAACAGATATTAAATAC
TGTTTTCCTATCTAGCGAAATGTCAGGCTGTGGTGCAGCTATCTCACTAGAAACCAGGAT
ACGCGAAGCTGTTATTGAACCACGTGTTATGTTAGATATTGATTTAGTCGGTGGTTCAAA
AGTATTCATCCCACTAGATTTCCCAGTGCAAGCAGAATATGTTGACCCTTATACAGTGGT
TTATTATATTCCAGACGAATACACTCAGCAACGCCCAATTATCCAATGTTACAGTATCCA
TTTTGGAGTATTAGGATTCCACACTGCTGGCTATGCTATGCACTATAACGAATCAAGTAT
GGGGGCATTAACACGACGTGTACTAGATTCAGCTAGACAGTTACCAGTTGCCCAAACAGC
ATATATCAACTTAATTAACCCACACACTGTCATGGTCAGGTATATCAATATTCCTAACTA
CTCATCATTCCTTGCTTGTCGCGTAGGTAATGATGAGGAGCTAAATACCATACGACCTAC
AGCCATACCTGCATTTTCAAAACTCATTGAGTATGCGGTTAAGTCATACATCTACAATGA
GTTATTTGTATCTATGGGTGAGGCACAGTTATCAGGTGGTGCTGAGTTAGGTGTATTCCG
TGATAAGGTTTATGAATATGCTGATGCTGAAGAACTATATCAGGAACAATTAATGCGTTG
GATGAAAATATCCAGGCAGTTCAATGATCCTGAAGGTAAGCGACACCATATTCGGACAAT
CACAGCCGCTCAATAAAAAAATAAAAAAAAAGACATAATGCCCTCCCATTGCGGGAGGGC
TTATGCCATTAAGATAATATCTAAATAACACTATATTTAAAAACATACTGGTATAACCCA
TCATCAATTAATACTGTTGAGAATCTTTTTGATGAGGTCACTAGGTGCAATACCAATGCC
TGAACAATACCGTCTAAAGTTATTACACGGTTGGCATGCTTTCTTTTCAACGATATTTAA
TTCAAAGCAAATATTACCACGTGAATCTAGAATGGATATAAATGCTTTGTTACCTGTTAC
GCGATATGTCTTACCGAATACAACAGTTGTTTTATATGCAAGGCTATTCATGATTATTCC
TTTAACATAGATTATTATCATGTTTGTAATATAGCCTTTAAATGTATTTAAATATTTATT
AAACCCCATAGCGATGAGCTATATATGTTTTTAATACCTCATACGCCTTATCAGTTGCCA
TGGAGCTATTGACAAAATCAGAATGATCAATCTTAATAATCTTACCAAATGAATCATAAT
CGATAGTTGTAACCACTATTCGATCACTATCACGAATCAATAGTTTATTTTTATTTAAAA
CAAAAATATTCCATTTCTCGCCATCGGCTAAAATAACATCCTCATCTTTAAGATTAAGAC
GAACAAACTGTTTTACATAAATACTTAACTGAGCAACTGTTGACATAATGATTTCTCGAT
ATCTGTTAATGAATTAATCATATCTTGGACATTAATGGTAATAACATTTTTATAAGTTAA
ATAAGTTGGATATGAACCCATAAATGTAATAGTCCCACAGATATGATTTTTATATCTAAT
ATCAATACACCCGTCATATCTCCAGATAAAATCAAATGATCCTTTAGTGTCGTGTTCAAG
TGTAAGAATAGAACCACTAACTAATTTAGGATATTGTTCAAATTCAGACATTACATAATC
TGCCAGTTCCTTAACCTCAGGATAATCAATCAATAATAGCATATACGTAAATCTCAATCA
GTTAATATAACACCCCATCCAGGGTGGACTCTTTCGAAAAATGGCAATGTATTATTTCGT
ATACTGTCTGCATCTATATTTGGAATGTGAATGGTACAACAGTGGGGGTTACTGTCAATC
TTGAAATAGAAATTATCTTTTAAATCTTCAACCTTGGATGTTTGCAATGGATATAAAATA
CCATTCCCCCAAACATACCAACGTCTATACAGCTTATCGTTTAACCGCTTCTCAATAACC
GAATGCGATTTGAAACGAGGAACTCGCAAACGCATCCCGTTTACTTCAGCCCATTTGTCT
ACCCGATCATAGCTAATAATTCCATCCTTAACCATTACAAAGATAAATCCCTCAACTATG
TTGGGGAGACGAACTACGTGTTTCAGAACCATAGTAAACGGAGATAACGTCAGATCAAGT
TCAGCTGCCATTTGCTCGTCGAGCTTTTTAGCAGTGTTCTTTGCCATCGGTTATCTCCTA
ATATACAGATTATTAATTATCGCTAGTTATTTAATATCTGCAAAATTCTGATTTACTTTA
CCCATAAAAATACCATCAGCTCTATCGTCATAATAAAGCTTCCCTGCTTTAGCATTACAT
AAAACTCCATAAATGTGACCATTGTAACCATCAAAATTAAATAAAGATGGATTATGCGGT
ACATGAATGAATCCCATTTTATCGCACAGAAACTTAGCTACAGCAGCCGATCGGCTAATA
CCTGCCTCACAGTGTACGAATAGGTGTTGATCCTTACCAAGAGCTTCACAGAACGAAATA
ATACGTTGTGCATGACGATGATCAAATAGATCATAAGAAGAATCAACATAATCCTCAATG
TCATCAACATTGATACGTAAATAATTAAGATGTTTTGCTGAATAAAGTGGGACTCTACCT
TTCTCCAGTAGACAGATCATATTTCTAGGGGAATAAAATGATTCAGCCACATGCAAAGGA
ATATAAGTAACTGTATTTACTGGCTTCATATTACACCTCGTTACAAAAAAAATAAAAGGA
GCCCCGAAGGGCTCCAGTATAAGTTAATCGAATACAAGACCACTACTAGTTGCTTGGTCA
TCCACATCTAGAGTAGACTGACGCTTACGCATATTAGCTTTGGCTCGATTCATCATTTCA
CGACGTTCTTCTAATCGTTTACGAATATCTTCAACAGATAGGCTAGTGATCACAAAATGC
ATTTGATCGAAATCATATTTCTCGGGATCGGCATAACCAGTAGTACGAGTTAAAACAGTG
TTAATGGATACTTCGCGATCAGGGTCAGTGTATAGTGAGGCAATAGAAATTGGATCCAGA
ATAGCCTGGGCTTCTTGACGATCAAAACACACGTGTAATTGGACAGTCTGCACAGGTACA
TCATGGTGCTTATGGAAGTGTGCCCAGTTAGTGATATCCATTAGATCAAGACTTTGGTGT
TCTTGATTAAATAGAGTTACTAGTGCATCTAGTACTTCAAGAATGTTTTGGTTCACCATT
GACTGCGGTACACCTTCAACATTCTCATGATAGTTAATAATCATCGGAACTTTACTAACA
GAGGAAACCCCTTCGAACGTCTTAAGGCTACCACTACTATTTCGAAGACTAATATCACTG
TCGTAAGATCCAATGACCACACTTACAACTACTTCACCTTGTTGTTGTAGATGACTGACA
AGGGAAGGACCAATAGTTGAACCAGAAGCACCACCCATTGAATACACTACAATGTTAGCA
TCCCCTGCTGGGAAATGATGGGCAATGGCAGGAATGTGTGCAGAGATTAGTTCTGCGGCT
GCCTTACGATCTTTACCCATACCGATAGCACGTTTACGCGCGGTCTGGTCAGCTAGCTTA
GTATCCGCTTCAATAATGATCGTATTATCGTCAGTATTATGTTTGTGTTTATTCTGTACA
CTGGTATCAATGTAACAAACATCCTCATGATAACCATGAAATAGTTCACCAATACGGAAA
CCAGCACCGCCACAAAAGTAAATTCGAGTTTTTACTTTAGACATCATTACACCTCATTGT
ATTTAATATAAATTCATATACCAACTTGTAAATGGTATCAGTGCTTAAAAGTAACGATCT
CTTCATGAGTTCGTTCTTGATGAACAATTAATTCATTAACCACTTTACCAATATCTGATT
TAAATTCAATTGCAAGCTTATCTCGACACATATAGGTTTGCCAAGTGCCACCAGACTTAA
CACAATCAATAATCATGTTAAGTACATTCTTAACTTCAATCTTACTGACTTTATAACGGT
AAATACTTAGAAGTTCAGTAAGCCATTTCGTTTTTGGGATTTTGGCATTTTTACGTTCTT
TAGAAATATCAAAAGGAATTAATGCAATGATCTCACCATCTTTGTTGGTGAATTCGAATA
CCATACCTTTTGTATTAGCTAAAGGACGAATATTGTAATTACCTTTAGCACTGCATACTT
CTTCAGATAACTTAACTAACCTATCTAGTTGAACATCAGATGCATGAATGTTATCTTCTT
TAAATGCTTTCTTTAGTTCATCATGAGTTAGTGGAGTACGTACTAGAGTGTAATCTTTCT
GTTCAGTCATTTTTCATTTTTTCCAATTTTTCTATTTTCAAATTAAACGGTATTGGCTTT
TTATAGCCAATCCCTTATTACTAAAAGTATTAGATTCTCGAACTAAGGATGGGTTATACC
CCTTCTCTAATAATAAGGAATATTATATGGGACCCCCCCAAAGGGTCCCCCCCACATAAT
ATACTATTTATATAATTTTCTTTTTAGAAGAAAAGAGATAAATAAGAGAAATACAGTCTA
TTAAAGTAATGAATTTCTCAAAAATTAAATAGTACACCGCGCGTCCTTTGCGTCGGATTG
GCCTGCCAGACGATGGTCCGGATGTGCGGTAATAGCGGGTTTTTCAAAAATACTTGCATC
GCAGTTGAATTGAGCGGTTGATTATAACGTGTGATCTTAATAGTAAATAGAACTTCTTCA
ACATCTGAATGACATCCTTCGAAACTAAAATATACTTCAGTCCGATCAATAAACTGATAC
ATTTCTACAGCTGGTTCAGCTGGATCTTTAAAGGCCAACTTATTAGCGAAATAATCAGTA
TGGGCTAGAATTAATTCTTTTACATTATTTGCATTCTTCTTATCAACAAGGAATTCAAAC
TCTTCAAGGTTATCTGTTTTGAAAATACCTTGATAAGATGACGACTCGATTAGTTCATCA
CTGATATCATCAACATGAACGCCCGGCATAAATTCAATGACTGGTAGAATAAGCTTGTTA
CCTCCTACGCCATCAGCGATATGAATTCCAATCACATTACCATCACTAATGTATTCGTCA
TCACCGCAAATAACGGCGCCGGCCGCTAGATATAAATTATCAACATATTTCAGATTATCG
GCAATAATGCGGGATAGCACATATTCTCGCACCATGGCATCATCTGGACTTGATTGCGGT
TTAAACGTATAGTGGGTGTTATGACTACTCATGGTCGCACATGTAACAAAAACTGAAATA
TCTACTGGATTAAAAATCCAATGAATAGAGATATCCTCTAATTTATGTGGATGATGTAAA
CCATCTAGCTTAGATAGGGCTTGGAGTTGTTCTTCCCAGGTAATGTTAAATTGAGTCATT
TTTTCTAACCTCTTCATTTATTAAAAATAATACACTTATTTTACTTTAGCAGTTGATACT
TCACATACATTAACTAATTGTTCAAATAACGGTTCGTTATCTGGATCATTAACTAATTTT
GATGTATTAATAATAATACCAGAATACAGCATATCGGTTACGTCTCGATCACTTGTTTTG
CTGGTTACACCTTCCCACTTCCATCCATAGTAAATTAAATCAAATGATGAACCAATGTTA
AAGATTAATTGAATAAATTTGCATGTACCATTTTCTTTTAACCAATCAGGTCTATATGGT
TCATTTTTATAAAATTCATGCATGAGCACTTTAAAATCAGTTTTAATGTTTTCATGTATA
ATGCAATCAATAGAATCAAGAGCTTCATCAAGAGCTGATTTAGACTCAATAATGATTTCT
GATGTATTGGTAGATTTTAGTGTAATCATACCTAGTTCATCTGAGTGTGCTCTTCCGATT
TGAAATACATTGAGCTTACCAATTGGTAAGGTGGCTTTTAATGGTAGGTTAGTATAGTGG
GATACATCACTTTTATAACTGTCTTCATATGACTCAATTAAATTAAGCCATGCTCTTTCA
ATACGTGTATTCTCAAAATGCTGTTCTTCTTCTAGTAATCTAGAAATTAGATGATTAATG
TATTGAACATTATGACCAGCGCCTGTAATTGAATTATATTTTGTATTACCGGTAATTCCC
CATTTATTATTTTCTTTATTTATCCAACCGTAGATTACACTGTTTCTAGGATATTTATTT
TTAAAATTATCGTATATTTCTTTTAGATGTGGATTAGGGGTAAAACTAAAAGTAGTTGAT
TCAGTCATTATAGATACCTATTTGAATATTGTTTATTATTGCAAATTAGTAATATAGATC
TTAAACTTTTTTTAACTCAGCATAAAGCCTCCCCTAGGGGAGGCAATATGTTCATTTATC
TATTTCAGCGTTTGGATCATACCAAGGTAATAAACTTAGTAATGCCGGTTGTTGTTTCTT
CATATCCTCTAAGATTGTTGCTTCACTTGCACCTTCTAACATAGTGGTGAAAGTAATCAT
GTTCTTAGAGTTATATATCGGGCGTAGACCATTACCAAAGAATTTCACCTGTTGAACCAT
TATTTTGAAATCAGGGTTATCGACTACATCCGGGATATAGATAGCAGGTGGTGCACTGAA
ATAACGTTTAATTAACTCAATAGCCCAATACATTGGTAAATCACCAAACTGTGATTTCAC
TGTAGCTAAGTTTAATTGGAATGCTTTAGGTTCTTCAGGTGGTGGTTCCACCGGATCAAC
TGGATCAGTGGGTTCTTCAGGGTCAGTAGGTTCAGTAGGCTCTTCAGGAGCCTCTGGATC
GCCTTCTGTTGGCTTTTCTTCAGATGTGTCACCACTTGGATCACCTGTATTACTTTCATC
TTCAGAAGGCTCCTCTGGCGTTTCTATGGGTGCTTCCGGAGTTTCCTGATTCTCCGACAG
ATCGGACTCTTCTGATTCCCCATTTCCAACTTCTTCAACAGGGCTTGGGTCTTCTGATTT
CTCATCTGTAGATGTGTCACTTGGGGTTGTAGTTTCTGAATCTGTCGTAATGTTTTCATT
TGCATTTGATTCAGTAGAAACAATTTCAGTAGGAGTGGTTTCAAGTTCATTGTCACTATC
CTCTACATTAGTTACTTCATTAGAAGGTTCACTAATTGCTGATAATGCCACAGGTGCACT
AGCTGCACGAGCTTTTCTTTTAGCTATGGTTGTACCTTAGATAGAATAGTATTTATGGTA
AGTGACTAATTCAGGATCAGTTAAATTGATACTTTGAATAGCCATATTCAGGATTACATA
GGAGTCCATTGTTCTACGGGTATATCCGGTTAATTCCATCTTGTTATATTTCTGTACATG
ATCTGGAACCCAATCACCAAAGATAACACCCAGTTTATGAAAACGATACACCAATCTGGA
TAGTGCACGTTGGGTTTCAGTCGGGAATATATCGGGAACATTTTCGGGAACAGTACATTT
ATCACTAAATGGAGTAATAATAGGACCACGATGAATGGTGTAGCTAAGCTTAAAGATAAC
AGCACCAAGTTCGTCATTAATACGCCTAAGTATACGATAACCATAATCGGTACGCTCAAG
TTTATATACATTACTAGGATCAGCATCTGCTAAACCTTCTAGCATGTCGTCTAGTGCACG
TTTGATACCACGGTTATAGATGAGTTCACGTTCTATGTAATCTCTCTCAAAAGCGGCCTG
AGGGCTTTCTTTCTCAAATTCCTTAGTTACTGACCAAGAAATTGTTTCACCAGTTAATTC
ATCAGTTAAAACATACAGATATGTCATAGAGTCAACGTATGAATACTGGATAGAGTATCG
TGATAAATCACATGGCTTAGCATTTAATCGTTCTTCTTTTAAATAGAAAAACATATCTTG
TAAATGATTATAAGTTTGGCAGCCACCACCAAGATGATCAATATCAATAGACGTATCTGG
CTTGACTGGAGCTTTGCAGCAACTCATTACACACCTCTACAATTATATTTGAGTTATTGT
ACTACAGATGATAAAAGAGAAAATACATCATAAGCCCTCTCCTTATGGAGAGGGCATTAT
ATTTACATAGTGTTAAAACACGCATTAAATTTAGATAATGAGCAGCCAGTATAAATTAAT
GATTGCTCTAGTTGTATGATGACATCGCCATTACTATCAAAATCAGCAGCAATAAAAGTA
GATTCAGTTATCTTAAAAGTAGATGGCAGCATTTCTAAATAATTAAATATTGCTTGATTA
TCGATGTCATGAGGATTTAAATCCATATGTTACCTATACATGGATAGTTATGGACCAAAT
ATTAACAGGACTGCATAAGACAATTGTGATTAAATCTCTATGAGTTCTTTGATAATGATT
GGAACACATAACTTTGATTAACTTTAATTTTTTAGTTTCTTTATTTTGAATTTCTTTGAT
AAGCGATTCAATAAGCTCATTAGTAATAAGTGAATGTCCATCAATAAATGGTTTTATACT
TACTAGCGAATCTTTGTTAAATAGAATTGCATCATCATATTCGCATGTAGCTGCGGTCTT
GTATATGGATGCAACTTTATTAACTTTGTCATTAGTGACTATAGAAAAATTAAATTCACT
CTTAGTTTTACTTAACGATGTTTCAAATAATTTATATTTATCAATAATAGTTTTATTATC
AATAAATGATTTCATCCCAATATTTAAATCTATGTCCAGTGTGTAAGAATCATGCATTAA
ACCAATTGATAGTTGAGTCTCATTACCACTATTGTTAAACTTAATATTATTAACTGAACA
TATTTGATTATTAATAAATGATAATAATAGTTTAGAAATAGTTTTAATAACATTAACTTC
ATAATCATTATTAGTACAAGCAAGTGCAGTTGTCATGTATCGACTAACTTGACTAACATC
TAGTTTCTGATAGTTACTACCACTATCTACCCATGGGTCAATATTTAAAAAAATCCTTAG
ACTAGCTAGAATATCAGAAGATGTTTCAGAATAAATGAAAAACACATTATTATTAAGATC
ATCTTTTAGCCAACCACTAGTTCTAAGATTTTCTAGATCATTTTCATTAGATACCAATTG
ACTTAATTGCTGAATTAAACTAGGGTTAGCTAGGTTTAATAAACTAATCATTTTATAAAC
CATTTTATTATCCTCTAATTTATGTAATTACATGGAATAAATAACATAAGTACTTTTATG
ACTTATGATTTGATTCTCCAGGAGGTTTTCCCAATGGCAACTATTAAAGAAGTCCTTGAT
AGAAATTTTAAGGATGTTCAATTTGATCGAGATTTATGTAAAAGAATTATTGACTTTACC
ATTAGTTTTATGAATAGGAATGCCGATCATTCTGCTTTCTTTGGCGGTGTATTACTAGGT
GTGCAACAAGTCAGATTCTTCGATACGGATCGCGAGATCTGGTATGATGATGTTTTACGA
ATCGACGAAGCATTGTTAGTTCAAGATTTTAAGTCTGTTGAATTTATTGATCCCAACCAT
CGTGTGATGTCAGATGTATTCAATCACCTTCCTGCCTATATTTGTTCTAGGTTATTGAAA
ACAACTAATGTTCCTTTGAATATTAGGCATGAAGCAATGGTTAGTTGTTTCATGGTATTG
CATTTTAAATATCTAACATCTTTACTTGTACCACGCTTTAAATATCCTGCACGTAAAGAA
GTAGCCGAAGCTGCATTCGCCGCGCTTAATTATCGATTTGACATTAAGACAATTGGGTCA
TGGGAGAAACTATTTAGGCAACGGGCCGAAGGTATTATTGCACCTGATTCTATTTATGCA
CCTTTCTTAACTGGTAAAACACAAGAACTGGATTATTGGTCTGGCCGTGTGGTATCTGAT
ACTCAAACACGTCTACGTGAATTAATCAACAAGTACTATGATGTTTATATCAGAACACTG
CAATCAGGTGGTAAATTAGTTATTTCATCAGACATGGCTGTCAATTCCGATGGTGAACAG
ATTCTACGTGATAAGTCTACCGGGTATCGTTCATATCTTACTTACATCCATCAAGTTGCG
CAACAAGAACAAAATTTCATTAGACCTGAGCTAGTTGGTATTATTGAAAAGATAATGCCC
ACAATGCCACCAGAAATGTTCATGGCGACACTTAGACACCTTTCCCGTAACATCGGCCAA
CCTAGGGCACAAAAGCTTGAGAAACTCGTGGATGAGTGCTTACTGTATGCTTTCGATTAT
ATGCAGTCATTACGTACAATGGTTGCTAGAAATAATGATCTACAAACATTGCTTGTAAAA
ATACGAGCAAAGATAATGGCATCTAAAACAGAAAATGCTCAAGTTATTTTCATGCGTGAA
GAAGGTGAGAAGTTAGTTAGGGATGCGACTAATTCTAGGGTACCTGCATATATCGCGGCA
ACTAGGACTGGGTTGATGTTGTATTTAATTCTACGTGCTATGACTAAGAATTACTATACA
AAAACAAAATAAACATAATGCCCTCCCGTAATGGGAGGGCTTATGCTGTTAAGTAACATC
AGCTAGATTGATCATTACATAAATTTTTCAGAGCATCGTAAATAGCCACATAAGTAAAAA
TAGTTAAACTATCTTTAATTTCCTTACGTGGGGTGCCACTGAATCCACCCCATGATACAT
TTGTATTACTAACACATACAGTGCTAATAGCTGGCTCATGATAGCCACCATCTACTTTAC
GCTTTGCATAAACCTTAGCCGTAATTTCTCCACGTAACTTTTTGAAGAAAACTAGAGCAC
CCGGAACGACTATACGTTTATTACCAATCTTCGTAATAAATTCTTTACGATTAGTAAAGT
GCTCTTTTAATAAATCATTAATAATTTTAGTTAAACTATCAATTTCATTCTTCATCGACA
CGTTGTTAGTTCCTTACAAATAAACTTGATAACGTGATCACTTACAAATTTCAATGGACC
AGAACAATTAGATTTCTCAATAGCGGTTTCAGTGTATGAAATTATTTGATTTCCACTTAA
GGATAATGAATCAAATAATTCATAAGAGTTATTATTTTTATTCTTAAAGGATACTGCATA
TTGACTATTTTCACTATTGATGCAAAATAGGTTAATAGCTGGGATAGATACAGAGTTATC
TGAAGTATGGCTATTTTCCGTAATATTCCAATTACTGTATACAGTGAAAATATTTGCAGC
TAGTAAAAGGTTGGCATTAACCGTTTCTAAACTAACATACTCCACAGAAGTACCTTTATG
CCAATATAGTTCAATTGGATTAACCCAAGTATACCCAATGGTTTTATAGAAGGCATGCAT
TACATATTCTCGCCAACGTGTGGGTTTCTTATTATCAGTTAAAACACACGTAATATTGCC
TGACGGATAAATGTGGTGGATGCTACATGCATTAATTTCATCTCTAACATTAGTTGTTTC
AGTAATATTAGAATGATCCTGTTTGAATAGCCATTTTAAATGACTATTAGTTGTGTCATC
ACCTTCCCCATTTGCAATGTCATTTTCTAACCACTTTTCAAATGTAGCTTGTCTATCAGG
TGTTGGCATTCCCCAATAGGTAGTTAAAATGAAACGATAATAGTATCGAATAATATCATC
ATCGTTAAGAATATTTTTATCCAGTTTCCAGTGATGTTGATACTCGTATACTTCGCTTGG
AATATTATTTACTTGATACCATGTATTAATTAATACTTGAATTGTTAATTGCCGAATACT
CTCACTTGTTAGAGTGTAATATTCCCTGCTATGCGGCTCTTCAATTGTCACTTCTTGATC
AGTATAACCAATGTATTTAGGTTTACCATCGATGAGTGCAAAATTAACATTCCATGATGT
ATCATTACTAAAAGTGATATTAATAAAACCTTGTTCAAAGCTAGGCTTCACTACGAAACT
GACATCATCCTTCTGATATGTCATTTGCGTTAGAATACCAAAATTAATTTTAGATGTAAA
TTCTTTATCGAAGTTATGTTTATAAAGTAATCCTAGTAAACAATCAATTTTATTAATAGT
GTGGTTTTCTAATAATAAATCAGTATTTGTAAGTTCATTAATTTTCATTTTAACCTCTCT
AAAATTTACAATCTAGTTTTACTTATTGAATAAGCAAACATGTAATATATATCTTAATTA
TTTTTTAGCATAGTTTTTAACAACATAAAGCCTCCCCGAAGGGAGGCGATATGCTTTAGC
TTTTTTGGTTAGTACCGACAGTCTGCTCATTCTTTTCAGTTTGAGCATTTCGCCGAAGTT
GACTAACCAGACCATTGCCAGCCGCAACTACATCGGGAGAAAAGAATGCATTGATATCAA
AGTTCTGATCTTGGTTGCGAGTCTTCCCAGGTGGGACCATCGGATATACTTTTGCCATTA
GCTTAATCCTACACCGTCGTAAGTTACCCGATTACCAACAGCACGTTCAATCTGGTCTTG
AATACCATTACGTGCACGTAGTACGTCAGCAGATAAACCACCCCAGTCTAATTTCTGGTT
ATTGGGGTTCATACCGCGAATGTTTAGTTTACGGAACATTTGACGAGCGTATTCTTGTAC
ACCTTCAGAAACATCAGTCAGTGCAGAGAACTCAACGTTTAGATCAAGGTTCTGACCAAT
CTGTGATGCATCTTTACGGTTTTCCCAAGGACCAGTAGTTAATGGGAACATGTTGGTGCA
AAGATAAGCGTTAACGCAATCCTGGAAGGTAGGATCAGGTTCTACGAATAGAACAGTCAT
ACCGTAGAAGGTAGCGTCGTATTTCTCAACCGGTACAATGCCATCTGATACAATACGCGG
TACTTTGGTATTCTCATCTGCAATACCATAGTTGATCCACCATTGTAAGAAACGTTGGAT
AGCGCGGTTTTGTAATTCCCAGCAACCAAAGTTTGGGTTAGACCGGGCACGGGTTACGTT
AGTAGCCGTTTGGATAACTTCACCAGAACCACCCCAGGGTGCTTCAGCGTTATCTACAGT
AAGCGTACGTTGTAAACCATCGATGGTACGAGTATGCGTTTCAACGAAAGCCTTAAGACA
TGCAACTAACCAGTTAGTATTACTAGCATACTTAAAGAATCGTGGAGCATCTAGTAGGAA
CGGCACTAAGTTACGTGCCACATATGGCGTGTTAGTAGCCAGGTTAGCTAAGTCAGGCCG
AAATACGTTAGTACCAGCCTGAGCAAGGTTTACAGTGTTACGGGCACCACCAGCACCATA
ACCAGTCTCGGGTGCCATCGGATCATTATAGCGAGCCATTTAACTTTTCCTCATTCTGAA
AGCCACCCACTCATTGCTGAGCAGGTGGGGTTTCAATACGAACAGTTTCCAGATTGAAGT
TCAACGTGGTCCGCGGGTTATTAGCCTCAACAGTTACGTTGCAAGTCCAGCTGGTGCCGT
TATTTGCGTCAATCGGAGTGATCTCTGTACGCGGGATAATGTTGACACGAGTACCGAACA
TATCACGTACTAGATCGAGAATATACTCGTCACAACGCTCAACTAATTGTTCAGGTGTTA
GTGTAGCATTACCGCTAAATTGAGCGTGTACTTTATGGATCAGTCGGATTAATACACAGC
AAATATTAACAGTAATCGGTGATAGAAGTACAGATGTATCATCTAGCATTACTGAACGTA
GGCACGGATAATAGGAGCTACGATGGTCATATGACTGACTCCAAGTAGCACCATTCGCCC
AAGCTTGTGCCCGTACACGATCATCAAAGAATTTAACATTTAGATCTTTAACAAAAGTAA
CACGGTTATTAGGACTTACATCCATTTCCATACCTGGAACTAGATTACCAGTTCCAGCAC
CTGCATAGCGTGCCCATGACATAGCTACGTCTAAAAGCTGCGGTACATATTTACGATAGG
TACCATCCATTAGTTTGCCAGATTGCATTACAATCATAGCGCGACAAACACCAGTTCCGT
ATAGAGTGGATTCTGGGAAAGCTTTTAGGCGAGTGATAATCTGTTGAACACGACTTAGTT
CAGTAGCTTCATCAGGTAGACGACTATCAGTTTCTACGAATGTAGTGAAGAAATATTGTA
GATCACGCCGCGCACTTAGTACGCGCATTGCCCGATATTTTGATTCCATCGGAAGGCCAG
TGTCATAAAGAACACCGAACTGATATTCTGCAATGTTATTATAGCGATCATTTAATTTGC
CAAAGTTAATATTTTCAATATCAACTAATTTGGCATATTCTTCTAGATCAGTTGTACCGT
CAGTACCACCACTAGCATAGATGTTACCATCTTTACCTAACGTAATGCCGCCATCTAGTG
GACCGAGTACTTGAATACCCTGGTAAGGATCACCATCAACAGCTAAGAAGGTTAGGAAGT
CAATTTCACCAGGTGCAGTAGTATGCGCAGCAGCGGCTGGGTTAACTCGCATCTCAGTGT
CATAAATCATCTGACGAACAAGATCAATGTTCTCATGATAGACGTAGAACTGAGAGAACG
GTGAATAAAGTGGACTTAGGCCAGAGACTACACCATCATCTGAGTAAGAATCAACTAATA
CATCACCAACATAAAGGTCAGCGTTATACATATCGCTGTAAACACCTTTATCAAATGTAA
TGTTTAGATAATCTTGCTGGTCAGCAGTTTTGACAATAACTGGACTAGTGCCTACTTCAG
GCTTCTCAATTAACTGAATACGGAATTGACGAGTTTTAAACTTCGCCATAGCTGCTTCAT
CGAACTCTTCGATATCAGCAGTTGTAGTACTCCATACACGCATACCGTTAGAATCACCTA
ATTTACCAAAGAAGGAAACCGGTGCTTCAAATAACGGATATACTAGTGATTGAGATCCAT
CTTTATCTGATACTAAAGTACCTGGTAGTACACGTTGTGTACCTACTTCAGAGGTATTAT
CTTCAATAAGAATAATACGTGCCTTTAGACCATCAACTTTATCAGCAGTCGGGACTGGTG
CATTACCAATGTCACGAACACTGTTTGGATAGTTGAATCCACTAAGACGACGAATCGTAA
GTGGGATTTCATCTTCCACAATTTCAATAGCAACGATTAGCCGTGATGGGTTGGCTGCAT
CTTCAGGACGTAGACGCTTAACATAAAAACCATTACCCCTACCTAATAGGTTAAGGGCTA
ATAGTGATTGTGTATTGAAAAACTTACTACGTGGATCAAGCGATGCTTGACCATAGATGG
ATGCAAAACCATCATCAGAATCACCGACATAAGTGGTTTCAGTCGGCCCTGTCTCAGTGA
AGAGACGTAATAGCGGACAGTGTTGTGCGAACGTGATGTCCGGACGGATCAGGGGCCGGC
GGCTACGATCCCGGATACCATTAAACACAACCCTAGGGACAGCGTTGTAATATGCCATCT
TTTAATTCTCCCAAGTTGGAGCTTTGAACTCGATGTTATGAGTGTTAACTAACAGTCAAT
CATAGATATTAATCATAGTTGACCATACTAGTTATTTTTTACTATCCATTTAAGGAGTAG
CGGTAATGTTTTTGCTACCGTATGAAACTACAGTTTGTAAAACTTTATACAATCCCACCG
GCGGTGGAAAATTATATCCTAAACAATATGTTGATCAAATTGAAAATGCGATCAAGAAAG
CCAATGTGTATCTACCTATTCCACCTGTTGATGCACGTAATGGTGAAACGCTAGAACATA
GTGGACAGATTACCCCAGTTGATGATTTTGAGGATATTAAGAAATTTACTCAAATTGTCA
ATATCGGTGATCGTGATAATCCTAAGCTAGTCGTTGATGCTCGTCTATATAAAAAGATTG
AACAACGTACTGGTATTCCTAGGATTATTCAGCAGAACGAATGGCAGTTCCAATATATTC
GGATGGCACTTAATATCAAACTATTACGTGAAGGCCCGGACTTCCTCCATCGCTTAGGTG
ATATCCCAGTTAAAGTTTTCTATAATTGGATCTCAGGTATCCTAACACAAAAATACAACC
TACCACCTGAATCAACCCAAGCTATTTGGGTAATCTGTGCTGTTTATTACTTTGCTATGC
AAGATGATGATCTAACAGAACCAGGTCAGGAACGTGATCGGTTAATACCAATTATTTCCC
GTCTTACATATATTCCAGCTGGTTTTATTGCGGATGTTATTGATACATTAGGTCCACTTC
ATAATGCCGGTGATCTAGCTTATGAGATTTCAACTAATGGTCGTTCAATCAGGATGGGTA
AACTAAAATTCAGTGATCTACAATTATTAGTATCACCGAGTTGGTTTGGTACCGCTTCCC
GTGAAAACGTAGGTGTGGCACTAGAACACATGCCAACTTACATCACACTGATCTACATGG
CATTAGCTGATCGCTCATACCGTAAAACAGTTTTAAGTCAGAAAGTTGAAATGATTTCAC
GTTCTGATGATGCAAGTCGTTTTATTAATCTAGTGAATGAAGCTGTAAGTAGCCAATTCG
TTAAGTAAATATAGGGGTGAATCAATGAACGCATATCTATTGCGGCATGCGATTGATAAC
GTTTGGTGTAACCCAGCCCAGGACAGACAGTTTGTTTATGAACTGAAACAGCTTACCCCA
CGCTACGGCGTGAGGGTAAACTGGGTGGTTGATTACACCCGGTATAAGCTACCAGTCCAA
AGTACACGTGATTATTGGCATCTTTATCAAATTGGTAAAATGATTCCTAAACACCTGGGC
TTGCCTAAGGTTTACAATAAGTGGATGAGCCTAAATGAATTGGCTCAAAACCATTTAAAT
TTAGCAGACGTTTATGTAAATAGTGGTATTAATTATTCACGTAATGATACATACGTTTTA
ATAACCAGTTCGCAAAATCTTTTAATTGCTGTTAAGATAGATCCATTATTCCCTGATCTC
GATGAAAATCAACCCTATCTTCATGTTTATAACAATGCTTACTTTCAATCAAATAGATCG
GATGTAGCTGGACATAGATGGTTAGTTTCTGAATCGTATCGAGTTAAAACAATATCTGAA
TTAACTCAATTTCAGATTAAGATAATGGATACCATAGCATCTAAAGGTGGTGTTCCTAAA
TACTTTGTAAATGGTAGATATGTTAATGAGATATCTCCTGTTACAGCAACAGTCGGTGAT
GTTTGTGATTTCATTCTAGATCCATCCATTAAAAGGATGGTAGATTTTGATCTACGTACA
TTACCTGTTTTCATGTCAGAAATAGATAGTGAAAGAAAATATATTTTACACTACACTGAT
AAGACTGTGCAAACAATTGAGTTCTTTGATGATGTTGAAGCATATATCTATCAGCCATTA
GGTAATAATCGTTATACTGGTGTTAATTACCATCATAACGAGAGCCGTTGGATGCGGATG
CTTACACATAAAGATTATTCTATACCAACTGCACGGATTGATCAGTTTAAAGCACTTCAT
CCAGAAGATCCTCGACGTGGTGCTGATCCTACTCGTTGGCCAAGTCAAAACTGGAAAGCA
TTAGATAATCTAGTATTTAGAATCTACATACATCATTCTGGTTATGATCGCCCATTAGTT
GCTGATTCACATCGTATTCAAATTCTGTATCGTTTAAAATCAGAAGATATCATAAGGGCT
ATGACTGGTGCAGATTCTGGTAATCCTTTATGGCGAGCTGAAAATCTAGAGCAATCACCA
TATTGCTGGTTCATGTCAGCACCATCTAGTTTCGTATACCCATTAACATTCAATCTACCT
GAAGAAACATCGCCTAGTAAGGTAGAAGCGCAGAATATGGCTGGTGATGTTTTTGGTTAT
TATGAAGCAGCTAATATTCAAGGTTATAATCCAGCTTGGGTTTATAATGATGCTGGTCTA
AAGACCGCTGATTTACGATACAACTACTGGCTAGATGCAACTGTATTTGAGTACGATGAG
AAAGGTATCTTATTAGGTTATAATTATCATACAGCAGGTCGCAAATATTTCCCTAAAGAT
AGTCGTTGTGCATATGTTGAATGCATTAATGGTAAAGGAAGTGTAGATCTACATGAAGCA
TATGGGAATGATCCCGTGCCTTTACGTGATGGTGACAACTGGCGAGTTTATGTTAGTCCT
GTTTGGGCTGGCGTACCAACTGGCGAATGGCAAGATATAACAGACCATCCAGATCGAAAC
AATTGGGGTTTTTATGATGATACCACTGATGATAAACGTTGGGTTTGGATAGCTAAGTCA
AATGAGTGGTATGGCCTAGTAAGAACCGATGAGTACTTCTATCTAAAAGAATTAAAGTTT
AATAAAACTGATGGTATCATTAAATGGAGTATACGCAATACTGAAACTCATAATGGTGTA
AAAGTCGATAAATTGATGGAGATACCATTTGGTCAGTATGATGTGTTTGTAAATGGTCGG
CCTATCATCGAAGGTCTTGATTACACGCGTGAATGGCCTCAAACTGTATTATGTAATCTG
GAATATTTAAATGCAGATCCAAATGCAGTTAATACGATTCTTCTACGTGGAACAGGTTTC
CCAACACCAGATTTAAAACCATACGAACCTGGCGAGATTGGTTTCATTGAGTATGGCGTA
TTGTCTAATGATGGTATTTATAAAGTACATTCAAATAAACAATCACGCATAATCATTGAT
GGTCATTATCGTGACCCTGCTGATCTTGAATTCCAAGAAGATCAAGGCACTACTGTTATC
ACTGATGAACGCAATGGTGCACCATTCCAAATACAAACACCACAGGCTCGCTTCCGCGAT
GTTTATAATGATGATTACCAAGCTAGGATTAAGGATGATGCACGGGATAAACAAGTCACT
GATTTTATGACTGAATATTTCCCAATGAAACCTCAACCTAATCCGGACAAGATCGATTAT
AGATACCAGGTGCTTTCAGCGTTTTCATGTAAGATCATTCATGATATCGTAAAAGAATAT
ATCAAACCCCCATATCAAAATGGACGGTATAGTGACGATGATATTGTTAAGCAGCTAAAA
GATTACGAGTGGTTAGCAGCTTATGACATTATCAATAAAGGCTACAACAAAAATAAAGTT
GTAGTTTATCCACATTGGTATACTGAACCTGTAGAACTAGATATTTTCCAATGGGAATAT
TTAAATCGTATTCTATCGATATATCTACGTGAAGTACCGCCACTATCCTTGTTCGTTAAG
ATTAAAAGGAATCAACCATGACAACGTCATATGAAAGTAGCCAGTACCAACCACCACAGC
ATAAAAACCATTTCTGGTTTAGAGGTGATATTGTCTCATATGCTGGTGAGACTGGCAAAG
CAATCCCTGCTAAAGGAGATTTAGTATTTGACGCAGCACAAGGTTGGTTTATTGTTCGTG
AAGTTGATGAAACAACTGGGGTATCTATCTTAGATCCATGGTACATGCCCCAAAAACCAG
GCAATGAAAATGAACAAAACCTACTAGTTGCTGTAGGTCCAGGATATAGCTCAGAATCTT
ATCGGTTATTCCTAGATCAGTCTGTAACACCATTTAATATTTGCCCAGACCGGCGATTAC
ATTTTTATGGATCAATGGTACATGGCTATAAAGTTTTCCTAGGTTCAGATATATCAGAAA
TACATGGTAAAGTGATTTCCCTGTTCTATGATAATGCTGGTAATTATCTAGGGCCAACTA
TACCAGTTGAATCAGTACCCGATCCATTGACTCAACAGAATGTTGTTAAAGCGTTAATGA
ATGGTAGGACTGCTGAGAAAATGCAAAATGGTGAACGTGTAACTCTAGTAGCTTATGATG
ATGTGGGTGGACCTGTTTCGATTGCTCAACTCGTTGTAATGAATACTGAAGTTATAGCGC
AAGAGGATACCTCTAAAAAATATGTAGGTGGTATCACTATTGAATCACCATTCATCTCAC
CAGCTGATCCAAAAGTTATTGAGTTCCCATTAAACGTACCAGTTGAATCATTACCGATGA
TGGGTGCTGTTCATTACCGTGATGGTAAGAAGCATGTGATGAATATTGATGGTACGGCAA
TGGCAATTTATGGTTTACGTAACTATATTGCCACTGAGGAAGGACAAGAGTTTAAATTAA
CTTTATCTTACCAATTAGCACAAGATGAGTTATCATACTTATCGACTCCTTCGGCTAACC
GTCGTATTCAGGAGACATATACAGCGCGTACCACGCCTGTACAGGGTGCTTACAGTTGCC
GTATGTTTGTTTATCCAGCTTGGGTTAATGAGGCAGTAGGTTACAGATTAGAATTCTGGT
TAGCCAATATTGATCGTCAACAAATTTGGAATATTACCCCATATGTTGAATTAGGTGCAA
ACTCAGCACCCTTTAACCCACGTGGTTATGGTACTATCCAAACACTAACATATGCGGTTA
ACTTAAACCAAGTTGATGGACGATTCCTACCAGTTCGATTTGCATCTACTTTCCAAGTAG
CACTATTGAGCGCTGGTAATAATCGGAATGCTAACTGGGAAATCTATTCACGTCCTGACC
AAGGCGAAGCATATGGTCGTGATCTTAAAGCCGATATCGAATTTATCAATGGTAATCTTT
GGGATCTTCGGTTAGCTAATGGCGCACAGTCACAAGCTGCCTGGCTTAAGAAAATGTACT
TTGCTGCTGAGCCATTAACTGGTCCAATGGAAGCTACTCCCCCAACACCTACGCATTTCC
GGGTGCGTACAGTGCATAACGAGTATGAGTATACGGTAAGTCAATGGAACACTGCATTGC
GCATTAATGCTCAAGATATGACCGATGGTGCTTTACTACAAATCACCTGGATTCGTCGTG
AGTATGATACCGACCTACAGTTAGCCATTACCGCATTACCTTGTTTACAACGTTAAATAT
AAAGCCCCCCTAGGAACCACCTAGGGGGGCTTTATAACGTCTTTTAACACATTATCCATA
TGAGACTATACTTTACAATTGCCGTTCAATACGGCTTTATTATGGCACATTAAAATAAGT
ACCTTAAAGGGCAGTGTATGGACGTTATACTTTTCAATAGTGATTGGGATAAATACTACA
GCGCTAATGTTGATCTTACTACTAAAAATAAATCTTTTATAAAGTTAGCTTTAACTTATA
AAAAGATGGGTATTAAAAATTACAAATTTATACTAGCTATATTGGACCAAGGTTTAATTG
GGGTGGATCCATATGACCCTAATCTTAGCGAAGAAATGAAGTTCCGTATTAACATGGAAT
GCAAATATAATCCTTGGTATTTTTTTAGGGAAGTGGCAAGAATCCCCCCTAACTCGGGTA
ATAATCCAATTCCATTTCAAGCTAACCGTGGTAATATTGCTTTATTCTGGTGTTATTTCA
ATCACGTAGATTTTGGTTTATTACAGCCTCGTCAGACAGGTAAGTCCGTATCAACTGACG
TGCTCAATACAGGCATGATGTATATCTGGGGTGAGAACACTAAGATTAACCTTATTACTA
AAGATAACAAACTACGCAATGCTAACATCGAGCGTCTAAAAGTAATGCGTGATTTGTTAC
CAGAGTATATTCACTATACTGATCCATTAGATGCGGATAACTCCGAATTGATGACATGTA
TTAGATTAGGTAATAGGTATCTAACAGCTGTTGGTCGAAATGATGTTAACGCAGCTGATA
AATTAGGTCGTGGTCTTACTGTACCAAATATGCACTTTGACGAACTTGCATATATTAACT
TAATTGGTGTTTCACTACCTGTTGCACTTGCGTCAGGTTCAGCAGCTCGTGATGAAGCTC
GCCGTGAGAACCAGCCTTATGGTAACATCTATACAACTACAGCTGGTAACATCACTACCC
GTGATGGTGAATTTGCATACCACTTCTTAACAGGTGGCTGCCCATGGTCAGAGGAATTCT
TTGATCTACCAGATCAGAAAACTCTACATCGTGTTGTAGAAAAAGGCACTACTGGAAAGA
AACCTCTAGTTTATGGTGCATTTAACCACCGTCAATTAGGACGTACCGATGAGTGGTTAT
ATAACACACTTCGTGAATCAGGTTCATTCGGTGAAATTGCCGATAGGGACTTCTTCAATA
TCTGGACAGTTGGTGGTGAAGGTTCACCCTTATCATCAGATGAGAAAGATAAACTTAAAA
ACAATATGCGTGAGCCAAGCTGGACAGAAATCACGGATGATGGTTATACACTTCGTTGGT
ATATACCAAAAGATGAAGTAGCCTCACGGATGATGAAGGGTAGGTTCGTTATGGGAACTG
ACCCATCCGAACTTCTTGGCGAAGATAATGATGCCACTGGCACAGTTGTAGTTGACGTAG
AAACACATGAGGTTATGTGTGTTGGTAGATACAATGAATCATCAGTGCCATCAATGGGTA
ATTTCTTTGCAACAATGCTATTGAGATATCCTAATATTCTTTGGATACCAGAACGTAAAT
CAATAGGTATATCGTTAATTGACCATGTTATCTTGATTCTACATACTAAAGGAGTAGATC
CATTCCGGCGTATCTTTAACAGAATTGTCAATGAATCATCAGAAAGAGAAAATGATTTCA
GAGACATTCAAACTCCGCTATCAGCAAGACAACCATCGTTCTATGATAGGTTTAAACGTT
ATTTTGGCTATGCAACGTCAGGTACTGGCGAGTATTCTCGTGATAATCTATTTAAGGTGG
CATTACCATCAGCAATGCATTATGGGGTAAGGACCATCTATGATAAACCACTTAGCACGG
AGTTATTAGCACTTACTATCCGTAATGGTAGAATTGACCATGCTAAGGGGAACCATGATG
ACTTAGTGGTATCATTATTATTAGCCCATTGGTTATTAATACAAGGTAAGAATTTATCTT
ATTATGGTATCAATGTTCCCATCTTAGGTAAATCAAAATTACGTGATAAAGAACCAAGTC
AACTTGAAAAATATCATGAAGAGAAAGAACAGCAAGGTCGTAAAGAATTTGAAGAGATAA
TTGAGCAGCTTCGCGGTGAAAAGAACCCGATGATTGCAGCTAAATTAGAAATGCGTTTGA
AACAATTGTCTAAACGTGTTAATATTGATGATAGCAGTGGTGTAGGTATTGATGCCATGT
TAAATCAAGCTCGTGCAGAGCGTACACGTAGAGTGCGTATTAACAGATATTCTAGAAATA
GTTGGTATTAAACAAAAAAAATAATAATACGTTACCCTCTTCGCAATGAAGAGGGTATTT
GAAGTTAAGTAACTCTAGCGAACAAAAGATTACTGGAGTTAGAATTAATATGATAGTTAG
ACGATCCGTCAATCCATTTAGCATCGGAAATCTTGTTTACAAGCTGACCATTGCCAATGT
AACCTAGGAAAGTTTTATTATCATATACAGCAATTTTGATTAGCTCATTTCGTCCGTAGA
CTAGTGGCTTACCATTGAATGCTGTTACTTCTAAACCAGACATGTATCCATAAATTGGAT
CAGGTCTGGAACTTGTTTCAAAGACTTTCATTCGAAGTCTCCTCTGCAAGAAAGCCCATT
TTGGGCAAAAAATGTCAAGCTTAAACTTGACGACATATAGCCCTCCTGGTGCGACAGGAG
GGCTAATCTTTTCAGAACGTACGGTGTTGTTATAATACTGCTAGCGAAAATACCCATGAT
AGGTAAGTAGCTAATCCGCAGTTCTCTTGGATGATACCTACTGACAGTGTAGTTGCAAAT
GTGCTGTTTGGAACCCCACTGGTTTAGCGGCCAGTGGGAATTCCTTTTATGCCGCTTTTT
CTTTCTTTATTGGATATTTCTTATATTTCCAAACCCACGTTCTTACGTTGGTAGGTATCT
TCCTTCTTATTATATTCGTAGTTCTCGATGAGACGCTTGTTGCTGAACTCGGACATCGAC
CGCATCTTGTCCATGATGGCCTCAGATATTTACCATGTTCATAAATTCGGCGTAGTTATA
GCCAGTATTCATGTCGAGGTAGTCTTGTTCGACCATGTCGTCATTCAGGTACTTGACGTA
AGCCTCGGCGTGAGCAGTGGCTACCGACTTGGTGAAGAAGTAACGAGCGTGTTGACGGTT
CTGTTCGAACCGACGCAGATTAGTAGTGGCCTGACCGCCGAAACCATTGACCTCCATTAC
CCCGTAAACAGTACGATCATCCAAAGTAGTGATCTGTGCAATCACTACACGAGAAGCATT
TTCCGAATGGTCGATGAACGTCATACTGTAAATCTCGATTTCTTTGAAGTCTTCCATTAG
AATTTCCTGTTAAGAAATGAATAGACAATCCCTACCCGAAGGGAGGGGCCTTATATCGTT
ACTTGCTGTGAAGATTTTTCTCGCGTACAGCGTCTGTTAACTGACGTGGCGGGTTGAGTT
GATCTGACAGGAGCTTCCGGAGGTTATCCAGACCGATTACTTTCTTCTTGGATATTGAGA
TTATTCTCTTTAAGTAATTTGTTGAGGTGGTATTTAACCTCCACCCATTCTAACCTATCC
ACGTCAATCCACTTCCGATAACCAGGTGCAGCAGGTTTGAGGACCTGGGTTTTCCAGCGC
TGAAATCGGAAGTTGCCGACACGGATATCGGTGCTCTCAACAAAGCGAGGTGGGAGTATA
CTGAGGTCAGTCAGTATCCCTCGTAGCTTGTCAGAGTTCATCAGTAAGGGCGACTTGAGT
TTCGAACACCGAAATGATCGATCATTCGTTGGAACAACTTGCCAAACGAGAACTTTTCAT
ACTCGCAGTCGATATGGAGGACATCAACGGTGTCCACCGGTGGATTATAACTACTGCTCA
TTGGCCATCTCCTTACGTTTGTTTTTGGCCCAGTTCTTTTCATAATCGGAACGGATGAAC
TTAGCGCCGGCGGCATTGAGCCAATAACGCTCCCCTTTGAAATAACGTTCCCGTTTAGCA
CGGGTCAAGCGAAGAGGATCGAACATATCTTGTTCCTGACACATGAATCGATTACGCAAG
AAGCAGTTATCATTCAGGATTCGAACCGAGTACAGTTGACCAAGCCGGCAGTTAGCCAAC
TTGGCTTTCTCGGTACGTAGCCGAGTTTCGTATTTCTTTGCATCTTCGTGATGATTGCGA
GGATGTTTCTTTCCAAGTTTCCTAGACATTATGTTTTTTCCTATTCTGTTGTTTTACGAA
AAATCTTATCATGGAACGTCATTGCCAACACGACGCCTATCGAACCACCTAGACCGCTGG
ATATGATAGCAGGAAGACCCACTATTACAAATAGTCCAATGGTGGTCAACTCAAGGGTAC
TGATACCCCATGAGGTGAAGAAAGCAGCTTTTTTGTACCCATGAAAGATGTTTCTTTGCT
GAAAGGTTTTTACAAAGGCATAGATGAATGATGTAGCTGTACTTAACAGTAGTAATATCC
AGATAGGTAGATCATGATTAATGTTAATCACTTCTCTTGTTCCCACACGGTGGGCTCACA
TTTAGTATGTTGGACATTATGAATATCTTCCAGTTGTTAGATATTGTGTTCCTTCGTATC
GATGGCCGCCAGCGCCACGATTTCGACATGATAAGGATGATCCACATTATGGCTGATACA
TGCCTCGCATTTGAAGATACGCCACATTCCATATGAAGGTAGTTCACGGTTTTTCAAATA
AGCATAATCGTGAGCGGCCGCAAGATATTTTTGTTGGATGGAAAACTCACAAGTAATGTA
ACCTTTCTCACGAATGAACTCATTGGTCATCTGATCGAAGATCTGTTTAAGTTCATCAGT
AAGGGCGACTTGAGTTTCAAACATTGAAATATTCCTTTTGATATATTAAATAGTTTTGAT
TATTTCGGAGTTATTGAATATTTAGGTTACCATCTGCTCTATATAGACTCGGCTGATTTC
ATTTAAGTAAGCGAGTGCCAATAGAATACCAGCCCAAATAACAATTTTTCGAGTAGTCTG
TTTTTCTATTACACCTGGGTGTGATTCACGAATACTACGGTGACAAAATACATAAAACAG
ACATAGACTCATTGTAACAAAGATAATGGTAAACCATCCCAGATAGATCATTTTCTTCAC
CTATTTTTTATAAATAGAGTTTATAGTTTAGTTAGGCGGATGATTTCTTCTAAAGCTGCA
TCAACTTGATAATACGGCCATGAATCAACACGAGGTTCGTTATCAAAGTATGTCCAAAGT
TGAATACCTTGGAGTTTATTGTAGAATACATTGATTCTGATTCCTTCATGGCCAACAAGA
CCTTCAATGTAAGCTGCACCATGCACATACGTAACATGTAGTGCGTACTCGCTATCTTCA
CCAATGTATTGTATAGGTCTGGAGTAGATGAAGGAATAAGGATTAAATGGATCAGCCTGA
GTGATATGTTCGAAGAATTCTTTCAAACTAGATTTTTTCATATTGGACATTATATTTTCC
TCATGATTTATTAAGTATACCTCCTAGAAGATAGACTTAATACTATTCGATGTTATTTTA
AGACACCTGCCTTGTAACCTTTAACAACAGTTCTAGCTTCTAATGCACTGATTTCGCCAA
TGTGTTTACGCAGTGCTTTAATAGCGTTGATGGTAGGTTCATTATCCGCGATATGTCGCC
AGTTTCCCTTACCCTTAATGAGTTCAACATCCTGGACATATAGACCATCTTTAACTAGAT
CCATTGTTTCTACCAACTTTTCGACTTCTTTAGTTAGATGCGTATGAAGACTGGCGAGGG
ACATGTCAGTCATTTGATGCACATCATAGAGAAAATCCCTATTATCAGAAGACGATAAAA
TTTCTTTGGTGAGTTTATTTACAGTGTCAATGTTTGCTGCAATTGAAACTAGCAGTGCAG
CATATTTCTCTGCATTATAATTCATTAATACGTATTCCTATTTAAAATTGGATTTAGTGT
AATGCGGTAATACTGCGAATATCTAATTCATGTAAATCATATTTCTTTAGGAACTCATTC
ACCGCTTGCTGAATGGTGTACCCACTCGGAGATTCCCACTGAGTACCATTAAAAGCAATA
ATACGATAACCTACCATTTTTTATTCCTCTAATCACAAAATAAATACCCTCCCGAAGGAG
GGTATTTATATCGTTACCAATTGATTACAGCGACAAACTCAAATACCCGACACAATTCTT
TATCACGATGGGCATGATGAAAAGATTTACCTTCAATACCGCAATACGGATAAAACAATT
TTCGGTGTTCCGTGTCGCCGAACCAGAAGGTGGTGTTATTGGAATCAACCACACCATGGA
TAGCCACATCACGAATGTACTGAAATACATGAACTGCCTTATCAGTGATCACTCGAAGTT
CTACACCGTGTTCCTTCATCATAGCCAGGATGTCTTCCTTGGTGTAATCTGCTTGTTCAG
CATTGGTCATGATCTTGTGAGTCAGAGAACGCTTTTCCTTGTCACCGAAACAGATACAGA
CCAATTGCACCAACTGACCTTCTACCTTGAGACCACTGGTCGGTTTTAGTAGAACGAACT
CATCATATTTGTAATCATTGGTGACAATCAGTGCCGACTTATTGCGAGTGACAATGCCTA
GGTTATACGACATAATTAATCTTCCTCATTTTAGAATATGTTGAACCTTGTGGATGTCTT
CCAGGCTATGACCAAGACCAGTGGCTTTGTAAGAATGTTCCTGATCAACACGCTTGTGAT
ATGCAAGCAGTGCATCTACTGGATGTTCAGCGAAGAAGTATTCAGTGTTGTTGCAGTCCC
AAGCGAACTCCCATTCACCATCACGAATCTCTATTTTGTTAGCACTGAGGTAAGTGATAT
TGATGGTATTTACAGTGGCATTACCACCAATGAGGTAGTACGATCTTTCATTGCTACGAA
CATCGATCCTGCCGCCATCGATAGTATCCTGATAGTAGAAACCACGGTCGAAGAATAACT
TCAGCATCGAAGTGAAGTAGCTGTTCAATACAGCTTGAGCATCTTTCTCTTCGACCACCC
ATTTTCCATCAACGATGTTATTCAGGTAATTACGATCATGATTGATCCCGACATTATCCA
CGATGTCAGCGTAGTTCTTATGGAACTTAGCAATCTCGTACAAACGTTCCAGAGCAGCAA
AACGGAAAGGGCTGGTGGGATGCAGAGCCAGAATGATCCGACCTACGCTCCACAAACCGG
TCCCGTTGACCTCGTAACTTTCTTCGAGGTAACCTTTGATACCACAGTTAACTTCAAGTT
CATCTGCTGGGAAACCGGTGCGGAGCCGCCTACGGATAGCCAATAGTACCGATTCGGATT
CTTCCGGATCGAACAGGTCTATGCCGAAAGTAATCCAGCTACCACGTACTTTGTGCTGGT
ATGCCAGGCGTACAGTATCACCGAATGGAGAAATGAACCAGCGTTCGTCTTCCGATACGA
CCAAATGGCAACCACATTGCCACAGGGTACTTAGAGGATCGTTAGAGGCGAGAATGCGCT
TGGTGTCGTTCATATCCGACGAAGTAGCATCTGGACTGCCACATAGGTGTGTCAGAATAA
ACAGAAGCGATGATTCTGTAGTTTGAGCACTCAACATTGCGCGAGTGATGGTTGCATTGA
TGATCATGAGATATCTTCCTTTTTGCAGTTTATGAATATATTGCTAAATAAAAAAAAATA
ATACGATGTAGAAAATAAAAGGGAGTCCGAAGACTCCCATTATTGCGTGTAATCTATTTG
ATAATAACCGCTTTAGAAAGAGTTTCCATACTTCCAATAACTAATTTGGATTTCTCTTCT
TCAGGGTTCTCCATTGCTTCATGCAGGAGTTCACCGATGGTTTTGGGTTGAACATCATCA
CTGATTTCACGCGAGCATGCCGAGTCGTCGTGCATATCAAACACATTCAGATCATCATCG
TCCAGTGGCGTGCTGTCATTCCATGAATAGCTTGATTCATCGGAAGAGTCCGAAGACTCA
CCGTACAGCTCATCGAAGTCATGTTCCATTTCTTTTTCATACATCTCGCTTATTGCTTTT
TCGTCTTCTTCTTGCGCCTTACGACGAGAAGTCTTGTAGAACGGCAGCAGGCGTTGCAGG
ACTTTATGGAACTTCTTCTTGCTGATCAACCAGTTAACCGAGTAGCGAGACAGCTTTACT
TCAGCTGCTTTGATGGTCGGCTCGAAATACAGCGCATTGACCAGCGCGTCCAGTTTGTAC
AGATGATCTTTAGACGAATTTGCATAAGCAGGATGTTCCTGAAGAGCGAACAACACAAAC
GAACGCATGTCAGTGATATAGTACTGACTATGATGTTTGTTGACTTCGACGTATGCCGGA
TCTACTACGCGGTTATAATCGAATTCCTCTGCCCATGTAAGGCTACGTACTTTAGTAGGA
CGAGGACCTTCTGCCCAACGAACAGTCGGATGTTTCTCACGGATGTTCCAACCATGATTG
CGATCATACTCGGTTGACTCTTCCTTGAACCAAGTGAAGTTACCTTCACCGCGCGACACA
ATACCGCGACACCAACTGACGTTGATTGCCTTGTTACGGCTTTCAGTAAGATCACAGGGC
ATGTCCAGAATAGCGACATAACTGTTATGACCATTGGCCACAACGCCGAGGACAGTTGCT
TCGAATGTCCCGTAGCGCTGGCCAGGATACACACGTTCGTTCTCATCCAGGTAACCAAGG
GTGCAGGATTCGAAGATAGCACGAGTACCGGCAGGGAAATGGGCACGACCGAAAGGTTGT
TCAGCCTTTCTTTCCTTACGACGGCTGATAACCCATTCCAGTTTTTCTTTGGACAGACGG
GTTACGGGTTCACGATATTTTTTCATGGTGTATTTTCCTTCTTACGATTAATTTGGATTA
TGTACATCCCAATGCATCCTTTCCAAGATACATTGGGATGGGGTCTCCGAAGAGACCCAT
TTTTTATTCCTGGGTCAGTTCTTTGACAGTGCCCTCGGGCGCTGGTTTATTCATATCACA
GAAGCTGAGAGAGAATTGGTAGCATGAAAGTCTTTATCTTATTGCGATACATATTCACCC
ATGCATTGGACTCGTCCACATGAGTGGATGTGTACTCAGCTACCTTAATATATTCTAAAA
AGCCAACAGCATCCGGACCTTGATCAATATAGACCATCTTGTTGAAAAGACCTACACCAA
TGAGCGATAAACGCTCTGCTTTTATGAAGGCGATGGTATCTTCGATGATAATCTTTTCCA
GGTCCTTGTACTTAACATGGTCGTTATGGATTAATGCCAACATGTCATCAACCTTTACAG
TCAACAACATGTCTTCATTACGACGGTTGACCAGTTCATTGGTCTGTTCTTGGGTGAACA
CATAGTCCACGTTTTGGAATACTCTCGACAGACGACTATCCATTTATTATTCCTCTATTT
AGTTACGAGCATTTCTTGACCATTGGGACCGATGCGATGACCGAGGATAACAGTTTCATT
AGAAATAGTTTGCTCTTCAAACTTAGCGTTTACAAACAGTCCGCCAAAAGTCAAACCAAT
AACCACTAGTGCGAATGCTTTCATTTTTAAAGTCCCTTTTTACATTAATTGAAGGTTAAA
TATCAAGTTGTAGTGGTTATTACATATCGTGCAGGTAGGTCTCATCAATGATGGCACGGG
CTAGCTCAATGAGGCTATCTTCATCAACAACGATGTTACCATCTTTCCAGGTAGCGCTAT
GGGATAACCAGTCACGGTAATCCTTACCTCGTACAGGATTGATGCATACCTGACGAGTAG
CTGCATCACGGTCGCCACGGAAACCCATGATAGCACGTGCACGACGGATTGCTTCTTTCT
CTAAGTCTTCATCAGATTTGAAAGTCAGGAAAGTTGCCATAGTTTGATTCCTTTTTACTG
ATTTAATAGGTTTAATTACACTGTTGTGATATACTGGTTAAAATGCTTTGAATGTATTAT
TTTATTTCCACAGACGACAATAGTCATCTACATGTCGAGTGATTTCTGCAACAGCCCTAA
GTCGCCGCCGACCAGTTAATTTAGAGCAGTGTTTATTAACTAATGTATCAACAGTTTTAC
GTAACCTAACGCAGCGTTCTTCGTTAGGTATATCTTGTTCGATAAACAAGCTAGTTAATT
TATGGATTTCCATATGGATTTTCTTACATACATCGTTAGCCGATTTTTCTTCATTTAATT
TGTTGTATGATTCGACTAACTTAACAATGGTTGTAGCAACAGTAGTTGCGGCAACAAAAA
TTTGAATACCATTGATAAAATTTTTATTAAACATTTTTAAACTCCAACTAATGTATTAAA
AAATATGTCTATATTGAAAATAAAGCCCTCCCCGAAGGGAGGATGTATGTTGCCAATAAG
TGTTACTAATTTATTTAGTTAGTTTGACCATACGTTCTTTCAAAGTTGTTTACATCATAA
CCTGAGTGGTGTGTTGCAGAACCACCTGAAGTAGTATCTGTAATCTTAACTACCACTTCA
TCATTTTCAATGTAAACCGACAGTTCATCTCGCATAAAATCCACGTGGTCATTTCGAGAA
CGTAGATATTTCATTACAGCTTCACCACTGATTTTACCGTCTGCCATTATTGTTTCCTCG
ATTGATTCCAGTTAAAATTATCTTTTGCATTTTTAGTGAAGAATTCGTTACCCCAACCAA
ATGAGTATCTAAAGTCCTTGATTACACCAACATCCGAATCGATAACCTTATATTCAATGA
CTTTATCACTATTCTCCAGAATGACTAAGATCGCGATAAGATCTTTAGGATCACCTACAG
TCAATTCATGTCTTTCAGACTCATCTCTGTGTATAACGATGTACATGGTACTTTATCCTC
TAATTACACCCATTTAGTTACTGGGAGTTCGAATGTTGCGCAAAGATCGAGTACTTTACG
ATGTTCCAAGTTATTTTCTGGATAGAAGGTAATGGGTGTAGTCGGACTACCCCAATTAAC
ACGACATCCAGTTTCTTTATGGATTTCACCAAGTGCGACATATGCACCTGCGCCATCTGC
ATAACCCATTTGATTAGGGTTAACACAGATTTGAGTAAAGCGCTCTGTCAATACTCGATT
AATAGTGATGGTCAGGAGACGAACGAACTCACGGGTCTTTTCGATGTCGTCTACCCAGAA
TTCCAGTAGGATCCATTTCCCATGAGGGTTATCATACCCACCTTGGAAGAATACACAGAA
ACCTTCTTTTGCTTTATAAAACTCGTGATTGGTGATGTTGCATTCAACTATTTGTTTCAC
TGCATGCCATACACGCTCGGTGACATAATCACCATAAAGTTCGATGCAGTGACCACGGCC
AGGGAATTGTTCTTTTTTAGAAAATTTAATTTCGAACATGGTATAGATTCCTTTTTACAT
TAATTGAAGGTTAAATATCAAGTTAGTAATATACTGTTTAAAATGGTTTGAATGTATTAT
CGGTAGAGGAGGGTTACCCTTTTAACTTTTTAATACTATTGGATAAGTACATGACACTAC
GGAAAATTTTGAATCTTGAAAAGTATTCACGTACTTCTTTTTTAGTCAATACAAGTCTTC
CATCTTTGTTTACATTATCACCAAAGACAATTTCCTGAGTATTCTTCCATAAAGATCTAT
AAAGATAACAGCCATGTGGTGCATCACACCAATCATAGATCTTAAGTTCAAATTCAACTT
TGTCGACAATGTCGTCATCAAATAAAATAGTATTTCCTTTACTATTTAACTCCATTAACT
CATTTGCACAATTTATTGCAAACTCAACCGCTGCCCAGGTTCTACCACCACTGAACATAT
CTTTACTTAATTTATTTAGATCGATAGCATTATAAGTTGTTTTCTTAGTGTTTTTCATGG
ACTGCACTCCTCAATAATAAATAGAATAATCTATATTTAATTCACCTTTGTAATATACCC
TTTAAATACATTTGAATACATGACATAAAGCCTTCCCCTGGGGGAAGGCTATTATTATGT
TTTAATCCAATGGGTATATGTACATAGGTCAGTTTCTTTAATAATGGTTGATTTCCATTT
ATCCCATTTAATGATTTCTTTAGGGAAATAAACACAACTACTATTATCGATTTCCATCTT
GACAGCAGTAATGTACATTTCGTCTAAAATATCCTTTTCAATGACTTCTTTATAAAGTTG
AGAACCGCCAATGATCCATGCATCCTTTCCAGTTTCTTTATTGAAATGAGTGGCATAAAC
AATAGCTGCACTTAGATTAGGGAGTACACCTAATTTATTATCATAGGCTACTGGGTAATT
ACCGTTACGATATAAACTTGATGATACAACAATGTTATTACGATTAGGTAACGGTTTACT
ACCTAAGGATAAGAAAGTATTTTTACCCATGATAACACAGCAACCAGTTGTCATTTCTTT
AAAGAAAGCTAAATCCTCAGGTATATGCCAAGGTAATAGATTATTATATCCAATGACACC
ATTTAGGTCATGGGCAACGATTAATTTAATAGCCATCAATTTTCCTTAGGCCAGAATTTA
CAAGATACTTCATTATCTTTAAATTCAATAGCCCAACTACAGCAAGTGAAATTAGTTTTA
AACTTAAATGTAGACGCTAATAGGTAATTAATTTGAGCCATTTGTAATAGTGTTAATTCA
CCATATACTTTCTCATCAATCAATACACCAGGTCTTTTATGTTTAATAACTAATTCATTC
AACTTAATATCTTGTTCAATATAGAGGTATTCCACTTCGCCTTTTTCTAGTATAGGTATG
TCCCAAAGAATCAGACTAATCTGTTGTGTGAATTCCTCAATACTAGTTGTAATATCTAGT
CCTTCATAACCTATCAATAGATTTATAAGTACTTGTAGACTAATCAGATTAACAGGTAAG
TCTTTTAAATCGTCTTCTTTAATAGTTGTTCTAAAATAAACAGTACCATCTAAGTTTTTA
ACTAATAATCTATTTAATAGATGATTGACTTCTGATTTAATCTGATAATCCAGTTTGATC
ATTAACTAATTCCTTGAGTCTAGTCATGCCATTGCTAACTTCAATAATGTAACTAAAATC
AAAACTATATTTCATCATTTTGAATTCTTCTTTAAAGTTAGCGATATTTCCAGACAGAGC
AATTTGTTCAAATCGACTAAAATCAGTGATAGTTTCATCGAACATTAGTTCTCTTGCGGT
AATATCTGGATCATAGTTAGGATGATCAACTACAGTGCCTTCGTGATTTAAAGTACCTTG
AAAATTCAAAGTCTTCTTAACATGGTCTACAGTTATTTTCCAGCTAGTTGCAATATATCG
AGCTTTAACTAAATTAGGAGCATACCTGTAAATACACCATTGTAGTGGAGTGCCAACAGT
TTGCGTATCATGCGTGGCTTTTATAACTTTAATAAAATTCTCAAGTTGATCAAATGTAAC
ATTTCTGGTTACACCATCACTAGTGGTTATATTAAGAGATGGTCGAAGACCAGTACCAAG
ATCATTGGTGATGATTATGTCCTCAACTAAAGCTTCATATAACTTTAGTCCTTCTTTTCT
GGATCCAACATCATTGCCCATTGTTTAGCTTCCTCTTTTGTTACCAGTTGATAAAGTTTA
TTAAATTCATGTTGACGCATTAATTTGTAATCTAATATACGCCCATTATTTTTACGAATT
AAAATAATAAAATCACCCGGACAGACAATTTTATCTTTATCTGAACCCACACGTAAAATA
CCATGACTAGATTCAGTTAGATTACATAATGGGCAAATCGCATTACTAAGAGTAGACTCT
TTAGTAGGTATAGCATAACCAACAATAGCACCTTGGTTGATATTATTGATAACGCCATCA
CCAGGTATATCACCGTTCTTTTTCCATTCGATTGCTTCAATTGGATCGGTGTATCTCGGT
AGATAAAAAGACATTCTTAATTAACTCCGATAAATAATAGTAGTATAGTAAAAAGCACTT
AGGTATATTTCTATTTTAAGTTATATTGCTGATAAAATAAAACCTAAGGGTACATAGTGG
GTTATTGTTTAAAGCTCTTAAATAGCATGGTAGAACGATATTGGACTATATAGCTGTAAC
CCTTAAGGCACTAAGGCTACAGAGGTTTTTAAGATAAAGATATCCAATGTACCATAATAT
GCTTTTACAATAGATCAACTAAATTCATTTAAAATGGGTCGTAAAAATACTTAGTTGATC
TAAAGATATGTTGAATACTTTTTCACATGAACTTACGACTCACAATTGGAAATTAACAAT
GTTAAAAACTATCATTAAACTAGACGGTACTGAAGAAGCATACTCACCTGCTAAGATTAA
TGGTTGGGGTGAATGGGCAGCCCAACATCTTGGCGATAAGGTGGATTGGAGTAGTGTTGT
GATGGATGCTGTTCAAGCTCTTGGTGATAAAACTTCATCACAAGAACTACAATTACAACT
TATTGAAGAATGTCTAAATCGTAAGACATGGTCTTATTATCTAATGGCTGGTCGACTATA
TGCGATTTATCTTCGTAAGAAGTTCTATGGTCTAAATGGCATCCCAACTGTTAAAGCGCT
TCAAACCAGGATGCGTAAAGATGGTATCATTGTTAAATTAGATTATAGTAGTAAAGAATA
CGCTCAGATTGAAAAGATCATTGATCATGATCTTGACCTACTTTGTCCGCATTTTTCACT
TCATCACATTCGTGGAAAGTATGCTCTACGTAATCGTAAAACTGGTCAAGAATATGAGAC
TGCCCAGTTTGTATATATGCGAATGGCAATGGCTCTAGCTGAAAAAGAGCCAGCTGAAAC
TCGCATGACCCATGTGGAGAATTACTATAAACTACTTTCTAATAAAATTCTTAGTGCCCC
AACACCTAACTACGTTAATCTAGGTACTAAGCTTCGTGGTTTTGCATCATGCTGCCTATT
TGCTTCTGGTGATAATGGCGTATCACTGGCAATGGGTGATTATATTGCCAACATCATGAC
CCAATCATCAGCAGGTATTGGTGTTAACTTAATGACTAGGTCAATTGGTGATCCTATCCG
TAATGGTCTAATCATTCACCAAGGTAAGAAACCATACATCGATGTAATGGGTAAAGCAGT
AAGGGCTAACCTACAGAATGGTCGAGGTGGTGCTGTTACGTGTTACTATAGTGCTTTCGA
TCCTGAAGCAGATATGATTACCCAGCTACGTAATCCACGTTCTACTGAGGATAGGAAGAA
CCGTGATCTTCACTATGCATTCCTAAGTAATAAGTTCTTTGCTAAGAAAGCGGCTCAGAA
AGATGGCATGATCTTTGTATTCAATCCATTTACTGCTCCAGATTTACATGATGCTTTCTA
TAGTGGCGATATTGATAAGTTTATTAAGCTTTATGAAAAATATGAAGCGGATCCTAAATT
TGAGAAAACTTATGTAAATGCTCGGGATCTTCTCAAATCAATGCTAGTTGAAGCATATGA
GACTGGAACCATCTATTCAGCTCAAATTGATGAACTCAATCATCATACGCCATTTAAAGA
ACCTATTTACAGTTCTAACCTATGCCTTGAAATCGCAGAACCCACTAAGCCTTACTATCG
AATGGAAGATCTTTATTCTAGTGAGGATCACGGGCGCGGCGAGATTGCTACTTGTTCACT
GGCTGCTATTGCAGTGGATAATGTTCCTGATAAGCAAACTTATGAAATGGCTGCTTACTA
CGCACTTAAGATGATTGATTATTGTATCCTTAATGCAGAGTATGCTTTCCCACACCTTGC
ACTAACCGCTAAGAATCGAATGAGCGCTGGTGTTGGTATCATGGGTCTAGCCACGCATAT
GGCACGTGCTGGTCTTAAATATAGTAGCGATGCTGGTAAAGCTGAAATCCACTTCATTGC
TGAACGGCATATGTACTTCCTCATTAAGGCATCACTTAAGATTTCTAAAGAACGCGGGAA
TGCGCCTTGGATTCATAAGACTAAATGGCCAGAGGGATGGACTCCACGTAAGACTTATAA
TAAGTCAGTGGATACTATCATCGAAGGTGGCTTTGAAGAACTTTATCCATGGGATGAGCT
AGAGAAAGAGATTAAGGAGAATGGTGGTATTGCACACTCCGTACTAGCTGCATACATGCC
TGGTGAGGCATCATCTAAAGCACTAGGGTCAACTAATGGTCCATATCCGGTACGTCGTCT
AATTCTGAATAAGACTGATAATGGCGCACGTGTGTTATGGGCTGCTCCATATGGAGATGA
TGATTCCTATGTGTATGAATCAGCTTATGATATCCCCACTAAAGATCTTATTGACTGCTA
TGCCATTATTCAAAAGTGGACTGATCAAACAATCAGTGCAGACCTCTATCGACGCATTGT
AGGTTCGGAAAAGATCTCTTCTAATGAAATGCTAAGTAATCACTTCTACATGGTGAAACG
TGGAATGAAAACCCGGTATTATGTAAATCTAGAAACAGCGGCAGGACTTGACATTAAATC
ACTTGAACGTGCTGTTGAGGTAACTAATGCTGAAGTTGGGTGTGCAGGCGGTTCGTGCAC
TCTTTAAGTGTATACACCCTCCCTTAATTGGGAGGGTGTTATTCCCAATTTATACTAACC
TCTATTATTTATTGTAAGAAATATTTTTAAATTGTAAAGGAACCGATATGTCTACTAAAT
CTCAACTACCAAAGAAAATCTTCAATGCTGCTAAGAGTGATTATCATCTACCGGAAATTA
TTCTTGGAGATGATCCAGGTCTACTAGATTCAATCCACACTCATTATCCTAAAATGTGGG
AGCTATATAAGCGTCTAAAGATGCTTGATTGGGATGAGCTAGAATTTGACTTTTCCACTT
GTCTAGTAGAATTTGAAACGTGTGATAAATCAACTTATGACATGATGATTAAGACACTGG
CCTGGCAATGGGAAGCTGACTCTGTAGCCAGTCGTTCCATTGTTAATATTCTATCACCTG
TCATGACAGATTCACGAGTATGGGCAGGATATGTACGTATTAATGATAATGAAGACGTAC
ATGCTTTAACTTATTCTGAAATTGTACGTAATAGCTTTAAAGATCCTAAAGTTATTCTAG
ATGAAATTCTTAGGGTAGAAGAAGCACAAGAACGGATGGTTGCAGTAGCCCGTACTATGG
GTGAGGCGCATGATGCAGTTCACGCGTATGCTCTTAATCAGGTACCCAATGATCAAGAAC
TTTACAATAAAGTATTCATGTTCTTCATCGCTCTGTATTTCCTAGAACGTATCCAGTTCA
TGGCATCCTTTGCAGTAACCTTTGCTATTGGTCGCACCGGTGCATTCCAGCAAATTGCAG
CTGCTGTTAAGAAGATTGCCCAAGACGAATTCGAAATCCATGCGCAATATGGTCAAGAAG
TTATTCGTGCACTACTGGCAACTGAACGTGGTAAACTCGCTTACAGTCAATGTAAAGATA
AAATCATTGAACTACTATGGGAAATTGTAAAGACTGAAGTTACCTGGGTTAATTATCTAT
TCTCTGAAGGTCGTGAACTGACTGGTGTTAATGCGACTAAACTTATTAACTGGGTACTTT
TCAATGCTAATGCCGCAGCAACATTCCTAAGTATTGAAAATGATGTTGTAGAACAGTATC
AAGTAGAGTTTAAAGAATCAGCTGGATTTGATTTTGTTTGGCCAGAGAAGAACCCACTTC
TTTATATGGAAGACTACCTAGACATTTCATCAACCCAAGCTTCTCCTCAAGAAGAAGAGA
AACCTGATTACATGGTCAACGTTGTGAATGATGTTGGTGAAGAAGAAGAATTCGAAGTAG
ATTTCATGTGATGAATAAATTAATTCTTGCACTATCCTTAGTACTCGTATCTATGACTCT
TGAAGCCAGTGAAATTAAAGCAACCACTAGTGGGATTATTAAACAAGTCGATTGCCAACT
TGTAGCTAAAGATAATAGTATCGCTGGTGCAACTATTGGAGGCACCGTCGGAGCTGCTGC
CGGTGCTGCGGTGGGTAAAGCACTTCTTGGTAAATCGGGTAGTTGGATTGGAGGTCTGAT
TGGTGGGGCAGCTGGCGGTGCTATCGGTAATAACATGGCTGCAACAGAAACTTACCAATG
TAAGATGATCATTGAAGATCATGGTAAACTGTACATGAATCAAATCGTCACAAATAAGAA
GTTAGAACCAGACATGTCTGTAACTATTGTAGAAATGTCTGATGGTACCTACGAAATAAT
GTAGACATAATGACCCTCCCTTAATTGGGAGGGTTTATGCTAACAATTCTATAGCACTCT
TATTAACAGTCATCAACGAGAGAGTAGACATGAATAAAATGCTAAACTTCCTAAACCGTA
CGCTATATAGCGGTACTGAAAAAGTATCTTCAAAAGCTACACCAAGTCTAGAACACTTTA
AAACAAATGTTGAACAAGTAGATAAAAAGATTCTACAACCCTTTAGTACTAAATTTAAAA
CCATTCTAAAAGAATGTTACAGTAATGAAGAGTGGGTTGAAGAACAATCATTTATTGAAG
AACCTATTGATCTTGGTTCAGCTGCACGCGGTCTTACCGAGCGCGGTATTATGCGTGGTG
ATTGGGGACGCTTAGCGCATTCCACTATTAAAGAAGCAGAAGGTATGATGCGTACTTATA
GTGGTCGTCTAAATGAAGATATGGAGGCATCTGAAATTAATGAAGTAATTCAAGATATGC
CTTATAACTTCACAGCTGGCTCAGCTAATACTAGCCGTTTAGAAGAAGATGATTCTATTT
TTGTTGAAGCAGATACAACTGTAGTTGAACCTCTGTCTAAGCAGACTCTGCCAAAAGTAG
CAGAACTTACTAACCAACTAGTAGAAGTTTATAACCGAATCACTGAAGAATTTACAGAAA
CTGGTATTGCTAAAGTTGAACAAGTTGAACAGCCAGCAGTTCTTGTAGCACTTGGTGAGA
TCATTAGTAGTTTTAATAAACTAATTGATGCTTCATGTGGTGCTCTACCAGTGGAAGAAA
CTGTTATTGTAGAGGAGGATCCGTTACCTGCCATTGTTACTGGTCCAACTACTGAACCCA
TTGATGGTGAAATTCCACCTGTTGATGCTATTAATAATTCTGCGGCATTAGAAGAGTTTA
TTGAAGAAGTACTAAGTACTAATCCAGAATTCATTAAATACCAAAGTATGAATGATAGTA
ATATTGATTCATATCTAACTGGAGATGACTGGATTATACTAAAATTTAAAGATGGTTCTT
ATTATTTATACAATGCCCAGAGTGCTGGTGAAACAAATATAGAAATCATGAAAGATATGG
CCGAAACTGGTAGTGGTCTTAATGGTTTTATAAATCGAGTTATTCGTGGCGGGTATGTAG
AGAAGTCCATCATTAATACTCCCGGTTTTATACAAGTCTCAAATGAAGGTCTTATCGACA
CCATTAAGAGTATCTTCGACTCTGGCCCTGAGATCAATCTTGATAAAAAGAAGAAAGCTA
TTGCTACACTGAAAAGTACCTATGGTGATGCCAAATGGGTGGCAGAAGCAAAGCTTAAAA
CCGGCGAAGTAAAAGTATCGAGTTACGAGACGTTCGCGTCTAATGATCCTAAGACCGCAA
AAGCCAATATCACTAATGCTGTAGCTAAAGCTGATCGTCACAACCAGAAAGTTCTGGATG
AGAACAGTAAGATACTAGCCCCCGTGGTTAATCTGTTCAAAGGGAATGATTGGCAAGACC
CTAAGAAAGTCGCTACTCTTCTGGCTGAATGGAAACCCAATGTAAAGACAAACTTCCAAG
AACCCAAATGGCCAGATAATGCTGGTGCTAAGATTAAGTTGCTTGATGCTACCGGTATTG
TGGAAGCAGCTAACGTTATCATTGACGTTCTGTCTAACAACACTAAGACTATTGCGGACA
CTTGGGTAGCCCAGTATCCTGACCTATCTGTCAATGGGGATATCTACAAACATAAGCTAT
CCACTATTAAAGATAAAGATGCTCTTGAGGATGTATATCTGCTGGCTAAAAGGGCCGATA
ATGCCATTCTTAACATTCATGCATCGTACGACGACGCTAAGGTTGAATCTACATATCGAG
TATTTGCTATCGACATGTTGAAACTAATGCAAGCATCTGTCAGTAGCTTCCCAAGTGGTT
CAACCGTAGAGAACACCAATGAACGCAATACGGTCATTGGTATTGAAGAATAACTTACTG
AGTATGTAATGATATGTAGAAATGATCCCTCCCCCTCGTTTCTACATTAGTCATAATAAA
TCGGAGCCAGTCCCCCTTCCAACTGGCTCCCAGAGAGTAAAACTCTTTGCTGGGCATTAA
TGACGATATATCGCCTCCCTTCGGGGAGGCTTTATATTTTGTTTTTACGTGAGTATGTTA
AAATATGTACAAATAACATAGAGTAATTATAAAATGATTAAGAATGAACTTTTACCAGGG
TTAATCTATGCCCAAAAAGAATTTGATAAAATTGCAGCTAATGTAAAAGACTATGATAAA
TATAAAAGACGTGAAGCTGGTAGGGCAAGCGCCGTTTTAAGAAGTCTAGTGAATAATATT
GTAAATCAAAATAAACCATCTTCACTTGAACATGAAGGTAAAGTTAGTACTACTAATACT
AATGAATATTTAGAAGAAGTTAATAATTACTTCTTTAACATTAATAATATTAAATTAATT
TCTCCTAAACTCATAAAAGAGAAATTAACAATTGATCTAATGAATATTTATGTTAAATGG
AATATGATTGGAGTGGCTGGCCGAAATGATGTGCCAATTATTGAGCACAGAATTAATGAT
TGGTGCGAAGTGACCGATGTCTACATTAATGGTAATAAGATAACTTCTTTACAATGGCCA
CGTTGAATTTAAAATAAGTTGTAATAAAATACCTAGTATTACATGTTATGTATTGAAGCA
CAATGCCCGAATGGTGAAATTGGTAAACACAGAAGACTTAAAATCTTCCGGCTACGGTCT
TGTCGGTTCGAATCCGACTTCGGGCACCAATTTAAATACGGAGTGTAGCGCAGTTGGTAG
CGCACCTGCTTTGGGAGCAGGATGTCGGGAGTTCGAGTCTCCCCACTCCGACCATTTTAA
TAATAGGTAAATAGGATGGATAATAAATGGATATCATGGGAACATCAAATTATAGGAACA
GCTCTTTACGCTATTCTTAGTGACCCTGAATTAACTAATATTCAATTAGCTCAAGGCTTA
CACTATCTAACAGAAGCAAAGTCTTCTGTATTGCATGTTTGTAATAATCATATTACATTC
ACTGTAACCTATCCACATGGCACATTTAGAACCAATGTAATTAGAGAGTGCCCTGTTAGT
GATACAAATACATTCAAATGGTCAGGTGTATTAGTCCGTCAAAAAGACGGAACATTCCTA
CCAGAATAAATAAAAGGGCCTATAGCTCAGTTGGTTAGAGCAGGCGACTCATAATCGCTT
GGTCGCAGGTTCAAGTCCTGCTGGGCCCACCATACACTAGCCTCCCACTTGGGGGAGGTT
TTATACTGTCTCATTGAGGAAAACATGAATACAGTAATAATGTTAGTATTATCTATCAAA
GTTGGATTATTTGGTTTCACTTCGACTAATGAGAGTAAGATCCTATTTGAAAATAGGGGA
CAATGTATTTCTCACCTGGATATGCTGGAGCATAAATACAAGTCTCTTGAAACTATTCGA
AATGAGAATACTCTGAAGATAGCCGACAGAGATAACCATTCGATTTATATTTTTAAATGT
CCCTAGGAAAAATATATTGAAACAACCATTAATCCGATTCTTAGGGGTGGTGCTAAATAC
CATTGAATTTTATTTCAAGCATACGGAGTAAATATGAATAATTTAACTGAATCTCAGTAT
AGTGTATATTCCACATTTTGTAGTCCAAAATTAATGTGCATGTCTCTTACAGATGCGTTT
ATTGAAATTCATAAACAACATCCAGAAGTAAAGCAATGTATTAAGAAAAAGATCAGTGAT
AGCGAAACTCAGTTCATCTTTATTTTTAAAGATGGGACTGATAATCTGATTATCAGTCGT
AAAACTGAACCGTGCCCTGAACTGGATATTCCCGTAGGGGTTAGGGTCAAGCTGTCTAGT
GAGGAACTTAAGAACATCCTTGCTGAACATGGTAGCCCTAAAGATGACAATTATTTTAAG
CACTGGACTGACCGACCATAATAAAAATATTACTGATTGTATAATACTATGTAAGAAGTC
ATGTCCATACGTTCGCGCTCATAGTTCAGTTGGTTAGAATACCCGCCTGTCACGCGGGTG
GTTAGGGGTTCGAGTCCCCTTGGGCGCGCCATTTAATTCCGTGATAGCTCAGTCGGTAGA
GCAAGTGACTTTTACGATTTCATTGGTAAGTACCCGAGTGGTAGCAGGGAGCGGACTGTT
AATCCGTTGGCGAAAGCCCACCGTAGGTTCGAATCCTACCTTACCAGCCAAATTCTAAAG
AGTAGCTTCGGCTACTCTTTTATGTTGCCATGGGTTATCTTATGAATTAAAATGATTTAC
TTGAGAGCACACTCATGTTTGAATTACTATTATCGCCAGATATAGGCGAAGAGTTACCCT
TGGTTGGATTTAATGAAATTATTAAATTAGGTGATCTACCTGTGGCACTAGCTGGTACTA
TGTCATATGTGGATGGAAATACACTATATGTTGGATCTGGACATCATACTGAAGGACAAA
CAGCCGCAACTGTATTCAGACGTTTTACCATATCACCATTCGCAGATGCAGGTGCAACAG
CTTCTGGAACATTCCTACCAGGTGTATCCTTAGGATTTGGAACATTACATAAGAATAACT
TTATTGTTTATGGCGGTATTACTGGATGGAACGCGGCGGGTAATGGTGGTACGGGGACAT
CTAACTTTATACAACATTTTGATATAAGTACAGGTAGCAGGGTTAAACGATATAGTGGGC
CTGTACCATTTTGGGGTACAGCATCCGCATCAGATGGTAATGATCTTATTTTGTGTGTAA
ACCCAGTTGGGGTAAATGCAATGCGGTTAAAACCATCGGGTAAGACATGGCTTAGTGGAC
AAGATTATTCAGGTGGTGCTCGTTCAGGTCAACAGTTATTCTTCTATAATGGTTACTTTT
ATCATTTTGGCGGCTGGGATAATACAAAGAACATACCTAATCTTGAAGTTTATCGATATA
ATGCAACTACCTTAGTATGGGAGCAAACACCTTGGATGATTATACCTGCTGATAAAGGAA
CAATCTGGCAAGGTAACGGTTATGTAGATGGAGAATATTTTAATTATATTAATGCAGTTG
ATGTCAATGGCGTAACTAAAATGTTTGCACAACGTTTTAACATTAGGCGTCGTAAATGGG
CTGAACCATTAGAACTTGGCATAGGGTTCCTTAATATATCGTCAATAGCTAAAGGTCCAG
ATGGCAGTATGATTATTGTTGGTGGATCTAAAACGGCAGTTGGTGGTGGAGCATATATGT
TGAAAAGCCAATTATTAACTGGTATATATCAAGTTAAAGTAGCCCCATTAGTTCTCGATT
AAACTAAAGATAAAAATACTAGTGCGATGATATTATGTAGGATTACTGTATCTAGATAAT
CCTAAAGCTATCCACTAAATACACTCGGTGGTAGATTTAATTATAGAGTGTGTCTGAGTG
CCAGGGGTTTGCCACCCCTGGCTATATTATGTCAATGAGTGTATCTCGTTCTTTATAACC
ACTATTGATATTTAATATAGGTGAAGGGAAGGTGACGAGGCCTTTCCATAGCCGGTATAT
AACCTAATTTAATAAAGGTTATATACTACATTGTAATAAAGGAACTTCTATAATGAATAA
CACAAATCAGTTTGTAAAAACTATTGTTGATTACCAGGCTATCCTGGATGCATTGATATA
TAAAACTAATGAGAATTGGAATAAGTATGGGATGCATTATCATCTTAATGATGTCAGTCA
TATCACTATACGTGATCATAGAACAGTAGGGTTTTTTATTGGTCGTCAATCTGGTAGTAC
TACAGCATTAATGGAATTTTCAAAACGCTACCCTGGTGAATGTTTGGCAGTATTCACCGA
CGAAAGAATTCGACGTGGTGCTCAAGATAAACTATCCAAAACACCAGATAACATTATTCC
ATATTTAACTACATTTAAACTACGTAGCTATATCCATAAATCTGGACTATCAACGATCCA
GAAAGACTTTAATGAAAATTTACTTTCAGATATCCGCTATATACTTGTAGATAATGCATC
TTATAATCTAAATTTACGAGGTATTACTGATAAAGAATTTAATCAGTGGGTAGCTGATAC
TTTTGGCACTAGTGTGATTGTAGTTCGTTTTAGTTAAAATATAAATAGGTAAAATAAAAG
CCCTCCGTCATGGAGGGCTTTATGTTGTTATGATATGACATTGTTGTCTAAATAAAATAT
AGTACGCATATGCGAAGTCATTTTTAATGGCTTTGCATATGTCATTAACTATAAATTATA
GTAATTTTTAGAAGAGGTATTTAAATGTTTGAGGCGTTATTATTTACACCACTTGTTAAT
TTAAAACCTGTTGTGGATGCTATAGACATATACGAAGGTAGTTTACCACCTTCAGCAAGT
TTCCAGGTTATCGATTTAGATAATACCGTGACTGAACCAGAGGTTATACCGGATGATAAT
TGAACTTAAATGGCTTGATCCTAATAAAACAAAATATCACTCCACTGAAATTTATCGAGC
CGATTACGAATTCGATAATATTGAAGATGCTGAATTAATTGCTACAGTTGGACCAGGGAT
AACATCTTATCAAGATACAACCGTGGAACATAAAAAAAACATATTATTATCGCTTTAGAT
TGATCTATGGATCACAAAAATTTGAAGCATCGGATATGTTCACATTTACAGCTATCCCAT
ACACTGGACCTGGTCCAGCTATTTTCCAATTTGGAGATGAACGTTTTGGTTATTTTGGAA
AGTTCCCAATGGACTTACCGTCATTACCATCGTTTAATATGGTTCGTGAAGCATTTAGTT
TAGGGCCAATTACAGGTAACTATCTAGAAGTAGCAGAACTTCATAAATTCGCAATAGGTG
GTACTGTTAGAGGTACCTTCCCATATCCATTGGCAATTGGGTCGGAACTACCAAGAGATA
GTGAAATCATGCAAACATTAATTAATGGTGGTGCAATTCCATTAACAATAGGTTTACATG
ATTGGAAAATAATAATACCCTCAGCCGAACATCATAATAATCCAAACCATAATGTGCAGC
ATTTCCCAGGTGAACTGCGGTCAATGATGGCAGTTATTACAGAGATGTATGCTCGTGTTG
AAGATGCTGAGACAGGTAACAAAACAGGTGGTAGACTTACATTAAACAGTGGTTTAAATA
TGTTCTATGACCCATTGAGTGCCAGATTTCCAGATACCGAAATAAAATATATAATTAGTT
CAGATTGGACTGATAATGAATGTACAGCTATTAATTGGACAAGTAGAGATGCAGTATATC
CATTAAGAGCAAAAGAACTACATACCGAAGTAGTTAATGTAGCCACAGATGACGTATGGA
ATAAAATGCTTATTTGGCCAATTCTAGTTTATACAGGTCTAACTAAACCGAAGGAGGTGT
AGCCATGAGAATTGAATTAACTGACTATAATTCAGATCCATCCACTACTATAAAGATATA
TCGGCATTATTTCCCATTTGATGCAGAAGATTTGCCGCCCGTACTACTTGTATTACCTGG
TAATACAAGTAGCTACACCGATGAGACCCTCATACTCAACACCATGGTTTATTATAGGGT
ATCAGTTGTACATAATGGCAATGAAGTAGTTGGTCCTTTATACACAACAATGAAACGTTA
TTATACTGGACCACAGATTGATAAGAATACCCCAGATAAAATCTTACGTGGTGATAGTTA
TATTGGTCGATATGGTACATTACCTTTGAACGTCATATTGTCAATAGATGAAGCTAAAAA
ATTAGTACCATCATGTACTGTACTTGAAGGAATCGATCATGAAACAATAGAGGTCGAGAA
GTGTAGTTATCATGGGAATGTGTTATTTATTTCTAATACACCTATTTTCTATGGTAGTCC
TGAAGATCTTTATAATGATGGTGCTCTACTATCATACGGAGACGGATTAGGTGTATTCAG
CCGCACATTTTACGATTCTTTAACAACTAAAGTTGAGCAAGGGAAACCTGTAACGTATAA
CAATTATTCATTTAAGTTCAGACTGATGACAACAAGCGAGTATGCTGAACTATATGTTAA
GTTATATCCAGATTCCCCTATGGGTCTTACATGTGATCGAGTTATAGGTAATTGTAACAC
GCATTCATATAAATCACCAGTCGTAGATATCGGATCACAGGGTAATAAATTCAGAACAGT
TGGATTAGATGGAGTGTCTTCAGACACAGAGTGGACTACTAAGGGACCACTTTATATGGT
GGTCGAGTTAATGAATAGAGGTGATATGGCATGGCCAAGCCCTGATGTAAATATCATTCC
TGCTGATCCAACTGATCGCATGATGTTCTGTCAATCTGAAATTATTAACGGACGTGCCCA
TTTCTTTGGTGGTGTTTATAGCCATTTTAATTCATATGCATCGGCCACTACTAAACATAT
CAGTATTAATTTGGATGGATCTGATAGGCAAGTACATGCGGATATGCCAGTTGGGGTATA
TAACGCATGTACTTGGGTTAACGGGAATAAAATCTACTGTATGGGCGGCGCCAAAAAGAT
AGGCAGTAGCGAATATACGTATGCTGAATTATACAATGACATTCAGGTATGGGAGGATGA
TGGTACGCCAGAAGGTTCTTGGTCAACTATAACGAATAGTTTACAATTTTATTATGGTGC
TAGTGTTACGAAGTATTATGATAAAATCACTGATCGTCAAAGACTTTTATATATTGGCGG
GTATGGTAATGTAATTCCTTCCGGACAGTATAATTTTGCAACAGCGGATCTGGATACATT
TGACGGTACATTTACAGTCTATAATCGGTCTAATTTCTACGACGGTGGCGGCGGTCCAAT
AGCACCACATGAAGATTATTTCTTATGGGTTGCTCCAGAAAGAAGTACTAATGGTTTTAC
AAATGCGACATATAAATTAACTATACCTGAAGACACTGACTCGTATACATATAGAACCAA
GATAACTCAACAAGGTACAGAATTACCAACCACCAAAGGTGGTAAAATTCATATTTGGCG
AGATACTATCTTCATGTATGGCTCGGCATCTCTTGATGAGAAACAAGGTGAGTTATACTT
ATATCAATTTGTACCTAATGAAAACCGCTGGTTGAAAATAACCGTAGCGATACCAGGATT
AAGTAATAGCAGTAGAGCATCTTTAAATGGAGCGTTTTACGAAGATAAGCTCGTGCTTAT
GCATAATCAACCTTGGCTTAATGAATCGTTTACATCAAGTTTCTATGTTATTCGATTAAT
CGATCCAATCGATGCACCAATCATCCCAGTCACAGATGTACAAGTTGGCACAAGTCGGAT
ATTTACAACTTATGCTGAGGTTTCGATATGATTACCTTTAAAATTAGGAATCCTAATTCT
AGATCAATTACAAGTATTGAAGTATACCGCGAGTTATCAGGTACACCTATTCCGGATACT
CCTATAAACCAACCAATCCAGAAACTAGACGGATTCACGACAGCTATTATTGATCGTGAT
GTGGTAATTGGTAATGTTTACGATTATCGCATTAGGACTGTAAGAGAAGGCGGCGACACA
GCCATTAGTCCAGTATTTACATTTAAAGCTGTTTCGCAATATGGACCAGGTGGTTTCTTA
GAACCTATGATGCAAGCAGATGGAGCTGCATTGTTAGATAGGGTAACTAGTCCGGAGCTT
CCTAGTCTTCAAGATCTATTAATGATGTTTAATGGGCAATCGGAAAATGCCATAAATTGG
ACTGATCAATGGACAAAAATTAAACATAAATCAGATATTTACTTTCTCCCATATATGGGT
TATATCGAGATACCGATAGACAAATTATCTGAGCTAATTAATAATGTAGATAATAATAGA
ACTATAGTTAAAGGTAATTGTAAATATTCTTTTTATGTCCCATCATTGCCAACTTCGTTC
TATATGCAAGTTATGGATGGTCGGTTTGTTGGACCATATACACTACCAGCTGATTACCCT
AGAAAATCAATGATCCGGTCAATTAGTGATCAGGTTAATAAAAATGCAGATGATGTCAGG
GTAATTATGACTGTAGTAGGTGCGAATTCAACTAGAGCATTTAAGGATCTGAGTAAGTAT
GGGTCATCAACCATTACCACTTTTAACCCAACTATTGATGCTAATGTTAGTTGGTATTGG
AAACCCATATTAAATTTTATCCAAGAATCAGGAGTAAATTAATGTACATCACTCTTAAAA
ATGTTAGAGGTTGGCCTGGTTCTACACCGATCGTTACATTTTGGTCGTATACCAATGCGA
TACCTTGGGATTACAATAACCTACCACCCCACTATTACTATGATTGGGATTTAATAGCAG
GATTCTGGCCATCCAGATACCCTGAAGATACATGCGTTTGGTTGAACTTAAAATATAAGG
ATATATTTGGTCAATTAGCTTATACAGGACCAATGCGTACTCTTAGTGTAAGTAGTAAAT
GGCAAAGTGTATTGGGATATACAAAGCTTGAAGCCGGTGATGGACAATATGCCAGGTTGA
CAAAGTCATACAAAGGTGAAAATAGACCAACCCTTAGACCAATTGGTTCTTCGCCATATA
GCATCCCAGGAATGAATCTTGATGAGGCTCCAACCCCTTATTTTATTGATAATGAGTATG
TAGCTTTTCATGATACATCTAGTATTGAGAAAGCTGTCGCTGTGGCTGTTTACCATGCGG
GGTACATGGGACGGTCTGGAGATATGTCCGATGTATGGCCGAGTGAATTGATAGAACATA
TAGGTGGTCCAACTCAACAAGGACGTATAATAGATATGCAGGACGTTAAGTGGGAGGTAT
ATGTTCCAACATTAAACGAATTCAAGCGTTATATGGGTACAGCTTTTCAGACAGGCATCC
AAACAGACCAGTCCCCGGTAACTAATTTATCACTGCCAGATAATGTAAAGTTCCTCACAT
CAACACCATCTCCAAGAAATAATACCATGTTAGTTGCTATCGATAACGATGGTATTGAAT
ATGATGTTGACATAGCTAATGAAGTTGATGTGATTTTTGTATTTAGACCTATACTAAAAT
AACTTTATACGGCATAAGACCCCTCTATATAGAGGGGTCTATTTATAAGTAAAAATATAC
ATAAAGTCATTATTATTTGTAGGTTAACCCTACATATAACTCAACTAGAAACCGGGCGTT
AATAAAATTTAACACTACGGAAAACATAAAGGTGACTCAAATGGCTTTTCATTTTAATAC
ACTAGATCTAGACGACTTTATTAATAATTCAAATAAAGTATTAAAAATAAATGTTGGCAA
GCAAACATTAGTAGCTTATGATGTTGATAAACTAAATATTGTTAATTCAGCTATTAATAA
ACTAGTTTATAGCGACCCTATAAGTGAAGAACATATCGAAGCATCACTGACAGATGATTC
ATTAAAAGAGCTTAATAATTATCTACTTAATAATGGCATTCAGAATAGCGCCAAGATGAT
GATTGATGCTGCTCTAGAAATCAAAGAATATTATAAAAATTACGATTCTTTTAGGCCATG
TATTTATAAATTAAAATCAATGCATACCAAAAATACAGATGATGTGTATCTAATATTTAT
TCTCGGTGAATCGGACAAGTTATTTGATACTATGCAAGGTTATATTGTTAATAAGTCAGG
TAATCTAATCAGAACTACTGTTCAGTCATGGCGATTCGAGAAAATTGAATTCAATGACTT
AGCCGAATATGATCAGCGTTGGTTATTTATTGAATCTTACACTAATGTTAAGCAAACGAA
AAATGATATAGCCAAAGAGCAAGAAGCCGAATTAACTAAATTTATTTATTATAGTACCCC
AAGTTAAAACAAATAAAAAAATAAATATAAGAGCTAGCCCATAATGGGCTAGCTCTATGT
TATCTTACTCTGCTACATCTTTTACATCGGGTTTATTATTTCCGCGTACTGCTCTCACGA
TACCATACGTAAGAATAAGAGCACCTATGGTGCCAATAGTGGCGCTAACAATAATACCAA
GAGTTTTTGGATCAATATTCATATCTAGTACCCTATTTACAATTAATAGAAAATATTACT
TTTAGTAATATCACATTAGTAATATACTGTTTAAAATGGTTTGAATATAACTTTATCTAT
TATAATAAAATAATACTTTCATATACACTATATGTAGAAGATTACGCCGCTATAGCTCAG
CTAGGTAGAGCAACGCACTTGTAATGCGTAGGTCCTCCGTTCGATTCGGAGTGGCGGCAC
CAAATTTACTGAGGTTTAAACTATTCTTAAATATATTAGTTAGGATGGGATTGAACGCGA
AAGACTCAGTAAATCATATTGCCCCTCCATATGGAGGGGCTTATGTTTGTCATTAATCAG
GAAAGTATAAAATGAGTCATCTATTATTTATCATCCAAGAATATATTACTAATAAATTTG
AGATAACACGAATTGATATGAAGCCATGCAATAGAATGTTACGCGTATGTTTATACGGTC
AACATGAGGGAAAAGGTTTCGTCCGTGTAGATTTATGGTCAGTTGGTTATCGTATTACAA
AGAAATAATACTCCAGATTATTTAATATGTATTAATCAAAGGAGTTTATAATGAGTAATG
AAACTAACTATCTAGGTTATGAATGGAAAACAGATATAACTACTTCAAATCTTAATAGAG
TAGTTGATTTATATACACTTGAATTAGCATGGCTAAAAGAAGATTTTAATGATACTCTTT
TTATAAAGTCTTATAAAGCACTAGAGGGTCTATTAGAGGAACCGTCTAGGGCAATCCATG
ATGATACAGTGCCCATTCAAGATCAATTAGATGAATTAAATACTGTTTTTAAATTAGTAT
TTGGGAAAGACAATGATGTAGAGTTATCAATTAATGATGATTCAATTATTGTAATCGGCA
CCACAGATGAAACTAAAGAAAAGTTAGAGGTAGAGGTGCGTGAGTTTGCATATAGAAAAT
CATTAATTGATGAACGTTATCCAGACATTGTAACGGATTAAAATACTTACAGCTATCTAG
TATGTAACTAGGCGGATTGCCATTTGTAAATTATCTATTTAATCAAACTGAGGAAATACT
AATGAAACAATTCTTTCAACTACTTCTAAGCCTACTTTTCAAACTACCGGTTCTATCATA
TTTTGCTGAGAAGAAACGACTAGAGAAAGAGAAAAAGGAAGAAGAAAAGCGTCAGCAAGA
ACAACGTCAAAAAGAACTACTTGACGAACAACGCCGCGAACAAGAAGATCATTATCGAAA
GACAGCTTACGATCGCCTAGCAAAACTTATTCATACTCGGTGGTATGATGAGTTTAATGC
ATATGAAAAGAAACTAGTTGATCTCGCTGTATCGAGTGGTAAAGCAGTTAGTGTTAAGTA
TGGTAAAGTCACTAAGATGCAACACCCTCAGCAATTTAAACTACTTAATGATTGGCTGGA
TGATATCCCAGTAGAAGATTATTCTAAGTGAGTTTAAATAAAAAAATAAAGACATAGCCC
CTCTCCACATGGAGAGGGGTTTATGCCGTAATTATACACTTACTTTGATAAGATTTTTAA
TATCAGTAAAATGGGTATATGTTGCCTTTTTATCTTTGTGAACCAGTAAGCAACAGGTAC
CTTCATTTACTGTATTGGTTTGTTTTAATGGGATATTTAAAGCATATTCAAACAGATCAT
CCATCCAGTTAAATACCATGAACTTATTGATAAGGACATGATCGAAATCAATTAATCCAA
TAAACGAATCGATCTCAGATTGATAATACTCTACAACCATTTTAGACCATTCTTTGTTTA
TCGCCTCAATGACATTAGGATTATTTATTTTATTAAATAACTCAATACGTTCCTGAGTAG
GTAAACTGAGGTAATAATTAATATTACTCCTAACGATATCTGGATTAGTGATATCCATTT
TTTCTGGTAAGTTATATTTACTATCTACATAATTCTTAGTTTCTGGTGTCATTCTCCAGC
AACCATAATCAGCAGTAGTACTTGATGGATCTATTTTAGTCTCCACTACTTTAGAAAATA
CATCTACATATAAATTAACAGATTCGTATACATCAGGTCTGATTGGATTAAAGTTTAAAC
TTTTAATAAGACCCCTAACTGGCCGAGTACCAATTAGACAATGCAATTCAAGCTTAACAT
TTTCCTCTTTAGCCATCTTAAATATATCAGCAAAACTGAGCTTTTCTGCCATTTAGAATA
TACCTTTTATTAATTGGACAAATAGATTAGATACACATAGCAATAGAATAAACCATAAAC
CTAGTCTTTGTAATTTATCTATACGCTTAGCTTTTTGTTTCCTCTTTAATCTAACTAATA
ATGTATTTTTAATATCATTCATTAAATTATCTCAGATTTTTTAGACGGTGTATAAACCCT
CAGTATTACATGTTGTTATGATATTGTAAAGACGATGCCAATAGCGATCATACGTATTTT
TACGTTTGTAGCTATTGGTGCGGATGACTAGATTGGCGACCCAGTGATTCTGATCAATGG
TCTCATGTAGATGCCCGAAATAAGCCCCCAGTTCAATTTCGAATGGGATCTTACACTCAC
GCCCCTTACACATTGCTTCACGCAATAAACGCATTGCAGAATTCTCTGCATTGGTATCTT
TAAATAAAAGACTAATGTATCCAGGGCTACCACCAGTTTCTTCATCAACATGGCCTGAAC
AGCAATAAATAGTTGCAACATTGATAAATTGATTAAACCATTTAATTAATGGCCTACATG
CTTCATCAATAAGATCTTCATATTCAGGTTTATACATTACTTTAACAGTATCATCTGCAC
GTTGTTTCACATGATGAAAATATTGCTCCCAATTTACATTAGTGTAATATAGCATATCCA
TATTAGAATTACTCATACAAATCAACCCCATATGTTATTGGCATATTCGCGGTCATTGAA
AATGCGGGTAAGATCCATCCGCTTTTGAATGCGCGCTAGTATCCATTTTAGTTGTTTAGT
TGATAGTTCTTGATTTTGCTTGTACTCACCTGTAGCATGGATGTAATAATCAAATTTACG
ACTTACAGTAGTAGTATGTGCACATGCAATAGCAAATGCTTCAAGTGCAGTTAGTTTGGT
TGATCCATTATCATTACAATTAGGGATAAACTCAAGTACACTATTAACTGCATCTACACC
ACTACCCAAATGAGCCCAATCTTTCTTGGTGATGTTGATACCCATGTCTTTAAGAATAAC
TGTATATATGTCACCATTCTCCATAGTGAACATCATAGAAGTATTACCATTAAACAACCT
GCGTTCTATGACTGGCAAGATATTTACTTCAACTTTAAACCAATCAGCTAAATCAACACC
TGCGGTAAGGGCATTCAATAGATCATAAACATTATCTATAGTTCCAGCAAAAGCCATAGT
TTTAACACGTTTACCTTGCCAAGTAACTGTCGGATGAAAAATTATCTTGTGGCAATCATT
GTAATATACATCTACACCTTCAGCTTTAGCAGTTAGATCAATATAACCGTTATCTAATAC
TGGAAGTCGCCCAATGCTATCAGTTGCATTATTCCGCTCAATTAATAGGCAGTCTGCAAT
CATGACTTTACCATCATTTACGATATATGTCATTTTCACTCCTTATAATAAAATAAATAG
GCTTAAGCGAAATAAAGCCCTCCCCGAAGGGAGGGCATTATCAATAGGTGGGATCTCGGC
GGCACCTTCATTTGCGGACGGGAACGCTGAAGGGAGATAGTCCGGGAGATCCCGATTTGG
GTATTCTTTACATATGGTATTACTGCAAGTATTTGTTCCCCGCAGTATAATCACCATTGA
TCCAATTTTTGATTACAACACTGATCCCTTCATTTTCTTTAACGGTAACCCCCAACTCAA
GATCGATTGATTGATAAGCTACAGCCGCCAGTGTTAACCGAAGATAAACGGATCCATCTT
TTTCGATATCGTAGGATACTACGAACCCGTCTTGTAGATTTTGTAGCTGGAATGTATTAG
CATGTTGTGGGTGGAGACGATCCATATTGTACTCGACGACATCTAGTAGATATTGCCGAG
CATCAGCAGCATTATCAAATCCGAGATCGCACAGACCGATCGGATAACGAGCTTGCGTGC
ATGTAACTTTCATAGATACGACGCGGTGTTGTTTGCACATTATATTTTCCTCTTAGATGT
CAAAAACCCTCCCCGATCAGGGGAGGGTATCTCATTGGTACTTCTTCAGCAAAACTGAAA
CTAAGATAAAAGAGCAATCGTAAAGGAACTACATAGAATAGTGTATTTATTTTACTATTT
TTTTACACAACCTCTTTAGATGGGGGTTCTTTATGAATCCAGTCTAAAGTTGTTGGTAAA
CTATTATCTGATCTGAAGGTACACACCGTCCGGAACCGAGAGTGATCAACTACAGATAAT
TGCCCGTTAATCGCAACCTCATATTGCTTACACAACTTCACACACCTTTTCTCTAGATCA
GTTGGTTCGTAACCTTCTTCTCTTGGTTCAGTGTATGGTCCATCCCAAAAGAATATTAAT
CTAAGATCAATCCCAGATTTATACTCCGCTTGGTATGAATATTGATGAACATCAAAATCA
TCTAATTCTTCAACTAGATGTGATGTTATTGTTCTAGGATGTTCATGAGTTAATTCACTG
TATATATGTTTATTTCTAGGGTTTTGTAAATCAACTACGATAAGTTGACTAGTCATTTTA
ACTTTTATCCAGATGTCTATTACGAGTGCGTTCCACTGCTGTAGGTTCGACAGTGGCTCG
CGGTAGATAAGTAATCTCCGGGAAAGTCTTATTAAGAGCATCTTCAATTAGCTCTTTAGC
AATCTCTGCATCGATGTAATGGTTTAGAATAATACCACGATGATACAGGAAGAAGCTGTA
TTCATCATAACCATGGCGAAGACTTACTTTACCACGATACCCACCATAGGTTAGAGTATC
TTCGTTAATTTCATTCCGATAAATATCAAGTTGGATATTATTTTGAAGATGCATTTGAAT
GAAGTCATTACTATCACCGCCGAATAGGGTTGGTCGTTTCCGACCAGTAACAACATCTTG
GATGGAATCCATTAGTCGGTTAATGTCTGTTTCTAATCGTTGGATATCACATTGAGAATT
CATTGCTTCATGGAAACGAGTTACAACTGCATTGAATTCTTCTTCAGTCCAACCACTGGT
ACGTTTTTCATAATCAACAATGATAATACCGAACCAGGCATAACCGTTAGAATGTTTTAC
TTTAACACATAGATGAGGTACATTATCAGCACCTGACTGATGGTTAACAGTGTAATTATT
ATTACGGCTGATTACTAGTTTGATAAAAGGTAGACTAATGATTGACGCCATGGAAATATT
CCTTTTGTATTTTTTAAATTAAAGTAGGAGTTATTATTGAGTTTCAACTCAATACATCAA
TAACTCCAGTATGTTTTCAAAATTAAATACATGTATTTACAGTTACATTGTAACCAGTTA
GTTTTGCCAACAATACAAATTAGCGAACCTGTTCGATTTTTTCAGAAACAATGAAAATAT
GTGCAATACGATCCTCATCAACATACCGATATCGAAATGAGGTATAACTAGATGACACAT
CCGTATCGTTTAAATAGGTGATATTAAAATCATCTACTTCCCTACCATTAGCAGCCGCAA
CGGTATTTAGAATGTTGAGTAGACTCATTTTACAGATTCCTTTTTAGTATATTAATATTT
CAATAGACTATTGATAAAAGCATTAGGGTCATAACGGTTATTTGAAAAAGCCGCCATTAC
ATCACACCCTGGTTGATCTTTAAATCTGATATCTTCAGGAATATCGAAGTCAGGGAACAT
TAGTTTAATATACTCCCTAACCTCTTGATCTCGTAGATATGGAATCTCCACCATGTAATC
AACGCGACCTTTCCTTAGAAGTGCTTTATCAATATTCTCAGGATGGTTTGTAGTTAGAAT
GGTCATAGTTTCATCTAGTGGAACAATGCCATCTAGACCATTTAATAGAGCTGACAAAGT
TAATCCGCTAGCTGGTTGCTCATACGTGATTCCATTCTTCATACACTTCTTTAATTTCCG
CCATCGGCGAATTGTGGCAAATAATGGATCTTTCTCATCGGCCCATTTTGAAACACCCAA
TTCAGCCATAGCATAAGCACTTATCCCAAAACCTTGATCATCACTATTTTCATCAAAGAT
ATAGATGGTGTCATTAAATCCAACTACAGAGTATCCTTCATAGTCATCTTTAAGATCAAC
CCATGAAGATGGATATTTTTCAATTAAATCAATAAAAGAATATTTCCTCTCTAATTCCTT
TATCTCTTTATCTAGTTTTACAGGATCATTTAAAACGCGATCTTTAACTGCCGGGGTATC
ATCGAAGTCCTCAATTAAAAGAATATTACCTTTAGGTAGTGTAGTAAATGCCCGCCTAAG
ACTATCACTAGTCATAGAGGCTAGTGATAGCGCACTAACATTTTTATTAAAATGTGAGGC
AATTGCTTTACTGATCGAGGTTTTACCAGTACCAGGAGGACCTGTTAAAACACAAGTGAA
TTTATAGGGTAGTCCACGATCATCGTACCATTTCCGATCAGAATAGAATTCTTCAATCTT
ATTAAGGAATTCTTCTTTGATCTCTTTACGCAAAATCACCGTGTTGATATCGCGTTTAGT
AACTTCGATTTCATTACCCCAGCGATTACCATCCCAATGTGAGATAGTAAGACCCATTTC
ATTTGGACGCCAGTGGTACGCATCAACTAAATCAATAATAAGTTTACTACTTCTAGATAA
TCCACGGATAGTAATGTCCATCTGGTCTCGACTGGCATTTTGGCTATCCCGGCGTGCTTT
TACAAACCAGAATAACCTACCTTTAAACAGAAAGAAATGTAAGCCAAAACCAACACCAAT
TTTCTGTTTAGTTGCACTATAACTTTGCTCATCAACGTTGGTTGAAAAACGGCGATTAAA
TCCAGCTAATGGTTGTTTAATATACCACTCCATAAATGAGTCAAAGTTTTTCTCATTTAA
ACCATTACCAGTATTAGTGATATGTAAACTAACTGTAAATTGATTTAATGTGAATCTAAC
TATCTTACTTGGTAGACCTCGGATAGTGGTCCATAATACACCACCAATCGCCATACCAAT
CGCACCACCCATCACCATATTCTTTTGAGAGATATCAATAAACATGGCATAATAGCTAAT
GAATGTATCAATCATTGTAAATTCCTATTGAATAAAGAAAAAAATAAAGGGCTCCGAAGA
GCCCTTTACTAGTTAAAGTTTTACAGAATAGGTTTTCTCGAACACTTGGTGAACAAAACG
ATCTGACGCATTATCCCAATTCTCACGACCATCTACACCAAAATAGTGAAATTCTAGTTC
AGTTGGTCCACCAACAAAATCATTTTTAGCAAAGCTAATGACTTTACCATTAGTGAACTT
GACTAATACATCTACATAGAAACCATTGTATGCCCATGCTTTGGCAATTAGTGCAGATTG
CCAGCTATATTGCTTATTGTAAAAATCACGGATAGCACACATTGTCCTAAAATTAAAATT
ACCAGTTCGGATAGAAGTAGAGATAATATTCGTTAGTTTATTAGCTCGATTTTCCTCGCC
AATAAGGTAGATACCTGAAATATCAGTATCCGATACCATGTCTAAAGTAAACGCCATATT
GGATAGTGGTTTAGCCCCATATTCATCGGTGAAGAGAGTTTTAATAACTTCTTTACCTTC
TCGCCGTGCGAACATATTGAGATAACCATCTTCAATATAAGACATATGGCTGGGTTGGAT
ATATTCGCTGGCATCTACTACAATGTTAGTAGCATTTAGATTAACCTTTAGATGATTCAC
TAGGTCATCGATCTTTTTAAAACGTTCGGCTTGTCTAGCGGTATTGAGATCCACGTACAC
CACGGCATCAATATAGTCTAGCGCCATTGGGCTGTTCTGCTTATCAATGTCAGCGTTAAT
ATATACATAATGACCAGCACCAGGACCAAAACAGGTCATGATATTTTCACGTAATTTGAA
TACATCGTTATGATGAATCGGTAATCCAGCACCACCAACAATGTTGAAGCCAATGCGAAT
TGTATTAGAACGACGTGCCATGGTTATATTTCCTATGTTAAATTAATGAATTATTTATTC
AATTACCGTACTACATCTGTGATTAGAATAAGTTCACCATCACTATTGATAACACAATAG
CTTTTTACAATTTCGATGCGCTTACTAATAATCTTATTCTCTAGATCTACTTTTACGATA
TTAACATGAATTACCTTATTCGATTGATCATGCATTTCTTTAAAAATGCATTCGATATTT
TTACCAATGACAGCTTTTAATTTTTCAATGCTGTCAATGGATGAATATTTAAAACTATAT
GCTTCTGCCAGGGTTTTTGCATTACCCACAACAGTAGTTAGGGTACCCCAATAATCATAA
ACATACAGCGCAGTATCACTATTGGGATTATCGATAATTTCAATTATAAAATCCACTTGT
ATCTATCCTATTAGTTTATTGATAGTACACTTGTAATATAGATCTTAAATAAATTATGAT
CTAACCATTTAAAATAGATAAAGACTCTATATGCCAATGGTGTATTAGTTCTTCTTTACT
AATAATATTATTGAAGTAGTTTAATCGATGCGATACCATTAATTTAGAATGCATATCGAC
TTCACTACTTACCTTAATCACCCCAGTCTCTAATAATTGTAGAGAGCCAATATACGCAAA
TAAAGTTGGTTTTAAATACCAGTGTTCCCTATATTGTTTTTGGTCAGGTACATTTCCTAC
AATGTAGTCAGTAGAATTACTTCGGTATGCGTAAATAGTTGATTTAGAACCAAGTAAATT
AAGATCGATATCATAACTCCCGCTTTTAGCTGCAATACATTCAATAACTGATGGGGCCAC
ACATATACGGTTGGTTACACTGTCTTCGCCATCAGCTCTATTACTTGGAATATATGGCCT
TAATAAAACATAATCCCCAAGGTATACTGTCGATATGTGATACATAATTAACCTATTTAA
TTAAAACAGATAACGCTCTGTTACTGAACGATATTGTGACATGATGTTTAATGGATCAAC
ATCCACTGGTGCTTTAGTGACAGTTAAGCGAGCACCTTTTAAAAATTCACCAATATCTAA
TTTCCTTACAGTAACATCATGGATAGTGTTTTTCGTAATCCACTCAGTATCAATGCTATT
GTGAGGATTATTATTCTTAATCCATTTGTCAGAGTCCCTAAATGGAATGGTATAAACATA
CACAACCATTTTTAAAATATCATTTTTATCGATATTATTTTGACAATAGATTGTAATATC
CCTATCAACAGTAGCATATCTATCACTATCAAATAACTTTTCGATAGCGCTACCAATACC
TAAATAAGATGCATCTTTTTCAGATGACGTTGCATATAGGTATTGGTTAGACTCAATACC
ATCCCACATAACAAGTTCACCAGATCTTTTAAATCCTGGCATTAATTCATCTTGTTTATA
AAGAGAACCATGGTAAAGTAATTCTGGTTTATTCATAATAAAATCCACTATGCTTTATAA
GAGTTATGGTTATCAATTAACTTCAAGGTAGCAGTGTGGCCGTATTGAAGTGATTGGTTA
CTGTTTCGATCAGCATATGCTCGATGTTGATTTTGTAGTATTCCGGTTCTTCGTTCAATT
CCCAAATGACAGTCGCACGTAATAGTGCAGGTGCTATGAATCTAACTACCTTACCATGTG
TGTCAAACTCTACATTAAACATTGCATAATGTTCAGTGGTATGATCTTTGTAAAAAGTGA
AAGTACCAGCGTAACTGCGAACCTCTATTTCACCGTGAACACTGGAGTAGACTTCCTGGT
GGAATACTTTACCTTTAAGGCGTGTATTCTCTTCAATGATATTTACCAATTCTTTCAATT
TGTCTTTATCTAGTTGCATTTGTAGGTTCCTATTAATAAATGTATACGATGGATATCTTT
TACGATTTCCGGTGCTTATCCATATCTAGTTTTACATCAGCATATATCTTGAATCTATCA
GATAGACTATCCATATCTACACGCAATGCCCGAATATGCATATGAGTATCTTTTGGTTTA
CCTTCAGACTCCCATACGGCCTTTACGATATCAAATACCACATTGTTCAAATAGTATTCG
ACTTCATGTTCATCAAGCAAAAGAGTGTCATGGAAACCAATACGTGATAAAATGGCGTAA
TCACGCTGATTAACATCTCTCCAACCTTTACGTACTAAGTAACTTTTACAGATTCCATCT
TTTTTACAACTTTTACTAATAATTTCTATAATGAACTTATCATGCCATTTATAATCCATA
ATCATTACTCCTTCATTTAATCAGCTTCATTACTAGAGGAACAGATAGACTTATGCCATT
GGCCATTTTAGCTAGGCTATGATAGACATCGTCTGCTTCTTGATTATTGGTACAAGGTAT
AGAAATGGCATCACCATAGTAAGGACTGTAGTTAATACGGTCGCCATACACACCACTCAC
AAAACTATAATCTAATCCATCCGTAGTAGTCATAATAACTACAATATGATCATCCCCAAC
TATACCGGATTCTAAATCCTCACATAGTTCCAGTTTTTGTTGCACACCTCGTTGACAGAT
CCATACCTCACGGTATTGATGATGGGGATATGGATTACATGCTACATCATTTTCACTAAC
GAAGTACATAGTCCCCCAGTTGTAAGACTGGAATTGGGTTGTTTGTTTGTGGGCTTCCCA
TACCTCCTCCATACAAAAGGTATGTTTGTTAACCCATAGACCATCGTTATTAAGACTATC
AACGATCCCATCACGGACACGTACTACACGGAGTGTTTTAGTCATCTACGTAACCCTCAT
CAGATACATAAGTGCGTTCAGGGCTGAACACATATTTGATGTTATTAATTACAGCTGTGA
TATAAACCTGATATTCTTTTGAAATAGATTCCATCAGTTCAATAGATACGGAATTTGAAC
TCTGAATAAGTTTATTTACTTTCTTTAGTTCATCAAATTCTAACCGACCGTAGATTACAC
CAACATCTCTGAAACTGATAACTGGATAGTGTTTCCAAATATAACAATTCAGTTTACCAA
GATGAATTACTTGAATTGTTTCATCGCACCATTGTTTCTTTTTCTTATTGTAGTATTCAA
CACGACGTTCGATGAAGACGCGAGTACCAGAAACAGAGGTGTACGCATTCAGTTCATAAC
CATACTTATGGTCAACGTTATTTGGATCTTGGCGCCATTTTGGAATGAATGCTTTCATTT
GTATTTTCCTTTTTACGAAATAGAAGCCCTCCCGAAGGAGGGCAATTATACCATTATTAA
ATTACGAGTCTATATACTTCTTTTAATTTTTCACCAGGGGTAGCTAGATAATCTACATTA
TATTTAATAGCAATTACACCCACAAGTTCTTTTCTCAGTAGCTGTTCTACCTGATCGCAT
AATTTATCAATAGCTCCATCTTCTACATCCTCGTATAATGGATATTGACTATAAATATTA
TCAGGTGTAAGTACAGACAGTTTCAATTCCCCATCTTTACCAATGACTGGGTGATATGTC
TGTTTAAGACCTTTACAATGATAGTGATAGGTAATGCGCTGTTGTTTAGTGGTCATGTAA
AGATACCTTAAATAAACCGTTGGGTAGTTCCGTCTTTAAAGACAGTTAGTTGATTAACAT
CTTTCAATGAATTATCTGCAATATTCTTAGCCAATAACAATAGATCATCGTGATATGTTT
TAATGAGAACTTTAAGCCTCTCCCTTTGTTTATATCGGAAACCTTTATTAATCACAGTAA
CTCCATCTGGATTATTTTTATAATTCAGTACAGTGATTGGTGTATTCGGTACAAAGACGG
CTAGTTCGTCATCGAATACAATGTAAACCATCACTTTATAATTATTAACCGATTCTTGGA
ATTGTTGTGTGATTACATTATAGTCTTTTGTGCGATGGCTAAGAAACAGCTCACTATTAG
CTCGGCAGAAACTATGTCGCGCTTTTTTATCAGCACTCATAACAGCGATACCACGGATAA
TGAATTTATTATCTAAGGTATATTTTCTTTGAGACATCGCATAGTCGACTACATCAACAT
CGCCGCCAAATAGCACGGCATTTTCACCGTATCCACAAATAAGAGCCATTTATAATTACC
TGTTTAAAAATTATATTCAATAAATTGAAGAGTGAATAGTTCACTACATTCCCATGTACG
ACTTGCTAATTTATATTTACCTTTAACAGGTAAGTCAAAATAACGTAATGCTTTTTCTAC
TGAACCAGCCTCATGATTAACCAATAGAACATTCCTAGCCTTCAGAATATTTGAACAATT
TACAAGTTCATAATCATCTCGCTTAGGTGTCAACATAGCTACATTAGTGCCTGGTTTTCT
AGCATACCAGAGCACCTCATGACCCTCTGGATTAATAATAGAGATATATAGCTGACGTTC
AGCGGGTAACCACAAGTTACGTGGATCATACTCTCCATTAACATCAAAGAATTTAAATAT
CATAGAGTTGGAACCGGTTTTGATGGATCAGCAATTAGTGCAGATTCTTCTACATAAACC
ATTGCGAAGTTTTCACCTTCTTTACGAATACCAGTAGAAGGTGTTTTCGATGGATCATAA
ACGATAATTTGGCACTGCTGTCCAGCTGTTAAATAAGTTGGGCCAGTTAATGCATTGGGT
TTTGGATGAGGAATATCAATTTTAGTAATACAATATTGACCAGTACGAAACTCACGCATT
ATATTAACCTCTTAATGAATAACTGTTGCAGAAGGACGACATTTCATAGTTTTAAAAATG
TCAGTAGGATAGATATTACCAGCTTGTCCGAAAGGTTTATCGGCTAGAAGAAACTGCGGA
CAAACTGTTTGTAGATAACCACTATCAGTGGGTAGGAATCCTTCAATATCACTGATGAGA
ATTTGCCAGATGGGCAATTGGTTATAATAGTCATCCATATTGTAGTATGCGTGGAGTTTA
CCACCGAACCCATATACAAACTGATGAGTATCAATTAGACGAATACCAAATTTAGGTTGT
CGTCCCATCCTTTGATCTTCTTCAAATGCGCTCAGTAAATCTGCAATCTCTACGCTACCC
GTGATCTGTTTCACTTCTTTTAATTTTTCAAAAATGGCGTAAAAGGTATTTACTGCCGAT
TCCTTAGTGATGCATGCAGTGATCACCAGTTCAGGAAAGAGTGGATCTTCTTTATTACAC
CCACACGTGTAATAAACAACATTGGGACCAATATCACCTTCTCGTTCAAGCACGGCAAAA
GGCTTTTTGGATAGTTTCATTTGCTTTTCAATTAACTGTCTGCTATTCTCACGAATAGAT
GCATATTCGTGACTGGCCTTAAAAATAGGCGCTTTGTAATCTATCTCTTTTGGTTCTACT
AGATCACTTGCCGATTTGATAACTAATGGGTTACTCATTGTATATTTCCTTTTCTCATAT
AAGAAAAGGGAGGTATTACCCTCCCTAATTAAGCATTAGATATTTAGGTTCAGTGGTGGC
TCGGATCTTAGCAATAAGTGCTTTCTGATCACTAACCTTACTAATGGGGTATTCTAATAA
ACGTAAATCCATGTCCCGATGTACTAAACCCAACATTGCCTTATTTTGATGACTATTATT
ACGTAATGCAGCGATATGTTTATCAACTTCATTACTAACAGTCTTTGAAAGCCCTACTAA
ATACTTCCCAGTTGCAATGTGTTCAATAACATAAACACCTGCTCCAACTATTTCGCTTCT
TTTCCCACGACCGTGCGAAGTACTTGACCAACTATAACACTTATCATCAACTATAAACAT
GGTTAATTCCCGTCCTATAACTATCTAATTGGACGGTCAAGTATTAGCTACCAGTCCATG
AATACTTATCATAAACTAACCACATTGAATGGATCTTATTGATGATATTGAAAATAGGTT
CTTGGACATCTTCAAAATCACCTAGATCAGCTGCCAGATTGGCCATATATTGGAATAGCC
GCTCAGTTGATACATCCACCAGATTGGCAAATGGAATACTGGCATATGGGATTTGCTTTA
ACATACCAAACTTATAAATTTTAGCAAACCATGCATCCAACATTGCAACATCTGCTTTAA
ACATCCAATAAGTTTCAGCTGGATATGTGCCGTCATGGATAGAGCAGAACAAATCACCAG
TAATCGTTTCAACAAGCATTTCTACTTCAGCAGAATTAATTTCGATCATCTCAACCCACC
TTTAGTTTACTGCAATATAGTCTAAACTTAAGAATATCCTCTACTAAGTTAGACCATAGA
GTATACCTATTTCGTGATGCATTTACTTCTTCAATCTTAGCATTTATATTTTGGCGAAGA
ACTTTGTAATGCTGATACGCATTAGTCGCATGTTTAGAGAATAAGATAATAATATCATCA
GGACTTTTATTTAGCACATCAGCTAGTGAATCATCATCATATATTTCAATAAGCGCATTA
ACGATACGATGATGAAGATGGGTTAGTAATTGGTAAATATGATATTCGCTACCAATATAA
TTACCTTTTATAAAAGCTCTTTTACTGTAGAGGATCTGTGCAGTATCTCTTACGCATTCA
AGTTTCATTGTGCATTAACCTGATGTAGATGAACATAAAATCCATTACTAGGACCGCTAT
TAGATGGATATACTAACAGATGGTCTCCATTAACAGACTCGATTATAACTACAGTGCCAG
CTTTGCATAGTGTAAGATCATAGCCGCATTCACCGGTGCTATTAATAATATCTGTATTGA
CTACAACTTTGTCACCGACTTTAAATGAATTTGACATATATCACCTCAATTATAGGCGTG
AAGAATATCATCCATATCTGTACATTGTACAGTTTCAATTTGATTATAATTGTCGGCATT
TAAAACTCTAAAGCCGCCTTCGGGATTACCTTCATCAACGCCTAATACAGTTAGGTCATC
TCCTTCATCGGCAAACTTCCATTCTAGATAACCATTCTTTTTACAAGTACGCATGATCCA
AATATCCTGTGTTGCTTGTAGAATCATACCAACTTGAACTTTATTCTTAGCGATAAGACT
AATACCATTAGCTAGCGCGCTTGCTAGACAGCTCACTGTTGAACTCATTTCTTTTTACCT
CTTTACAACTCTTCTCTTCAGTCAGCCATGACTTGTTAAAGATGCTATTTATGATAGGAT
TGAATTTCGGTGATTCTTTCTTTTTCTGATCGGTATCCATCGATATCACCTATATTGATA
ATTTTATTAATACCAATTAGCGTACTACCTAAAACCGCTATAACTAAAAACAATGCTACA
TATTTCATTCCTTCCATTTGTGATACCTCAGATAATATTTATTTTATTTGGCATGGTTGT
TATATAACTTTAAATTTTATTATAATAAACTATTACCCCGTATTAAGGTAATAGTTTATT
ATATTTATTATAGTTATCGATAACCCATTGGCATGACATATGTTTAGGAGTATCACCTAG
TAATTTGGTGTACGTTAGAAAATATATTACTTGGGCTTTGTTAAAGTCCAATCCAGCTTC
TTCCCAGATATAACGATACTGTTCAGTTTTATCCCCATGTGCAGCAACCAGACCAGCGCA
TGCATCAATGTATCGATCCTCACCAGAGAAAACAGCACTTATGAATTTATCAGTATTATC
CAACATATACTGAGTCGATTTGATTACCTTATCATTCATTTTCATTTGAATATACCTGTT
TATATAAAAGGATATAAAAGCCTCCCCGAAGGGAGGCCATTATGACGTTACATTGTGAAA
CGAATTGACACACCACAAATAGGACTATTGTCATCTGTCCAAATTTTTGCAGTACCATCA
TTTTTAATAGTTAAACAATAACCCCAACGGAGATTATTTATTTTAGTGGTATAACCACTT
TTGAATACAGCCATGTCTTTATAAAGCTGAGGGATAGTTGGCACTACCTTTGACTGCATT
TTACCAGATAAATCACGATAGTAGAGTTTATCTACAATCACATTATCAAATTTTTTATAA
TCACCAAAGACTTCAGATAGATTAAACTCTACCCCATCTGCTTTCAATGGAGCTGTCATA
AAACTACCTTGCTCAGTTGTAACCATACTGATAGCAACATCATGGTCTAATAGAAATCGA
GTTTCACCATTAGTTTTCTTATATACTGGGAAACTTCCTAGCGGTTGTAGAACACTCATT
ATTAACTCCTGATTGAAGGTCTATAAAATTGACCACTATAGACCCATATAGCATTCCACA
CCAATCTTTTTTATAACCATATCAGACTCACTATCAACATATTCATTATCATGGTAATAC
TCATCTGAATAGCCAATAAGTTTTTGTTGATTGTGATAATTTAAAAAGAAAATAACACGC
ATTACAATACATGCATACCCAGGATGATCAAGATACAGTTCTTCTTTATCTAGATCAAAG
AAAAGAGTTTTTATTTGAACTGGTTCATTTGTGAAGATTAACTTTATTGGATTATCTAAC
TGAACTACCTTAGGGTCACTATCGAAAACCGTAGTATCATGTTTACCTAAGTAATACGTA
ATTGATTTAACATAGTAAGTTATATCCTCGGTTTTCTCTAACCGGGTTATACAATAGCCG
GTTATGACTGAAAGAACAAACAATGATAAAATAACTAATATTATCTCAGTCACATTGACC
ACCCATATAAAGTGTTGTTATATCGATACACTGCGAAACAGAATGCTTACATGGAATAAA
TATTTCATCGATGGTTAAATCATCATCAATAGGTTGAATACTTTCTAATCTACCAAATCC
ATCACAGTTAAATTTAAGTGCTGGATAACCTTCAATACCCATGCTAATCCAACTATTATT
ATGTTTAGTTACATGGTTGAATTTAAAATTACGCATCTTTCCTAAAAATTCAATTGTCCA
TGTAGCATCCTTCTGCTTCTTCAAATGGTAATATTTATTCATTAGTATTCACCATTATTA
AGATTAGTTTCATTCTATTAAATAGATAGGGGGTCCAAAGACCCCCATTTTCATAATTAA
TTAGAATGCAGAAATGGTCAACTCATTGCACTTAACGGCAGCGAGTTTTTCCCAATTTTC
TTCATGTTCCATCAAGCATTCAATTACAACATGCATGGACCATGACTCGCCATCAATATT
TGCAAATACAAAGAAACCATCATCAAGCTCAGTAATGCCACTAATCAGATTATTTTTGAT
CAGGTAGACCAATTGATCATTAACGATTTTAACTTCATGATCAATGAGATGGCTGGCATA
TTTGCTAGTGATATCAAACACTTCTTTTGATGAAAGTGATCCATCGCGTTTGACGGCAGT
TAGGCTCCAATTAACCAAAGACGGTGAACACCAATGAAGACCATGCACATTCATCAAAAC
TGGATGTTTGTTATCCATAGCTTTTACAGAATGAGCCCAGTACTTTTCATCAATATACAT
TTATATTTCCTTTTTTTCCAGATTGATTATTTTATTACAATGCCTTCAGCATTGCGTACT
GCTTCTTTAGCAAATTGAACATCTCCAAATACATGTTCAATAAACTTTGATGCATCTGAC
CCAGCTACATCGCTTGATAGTAGTTTCACAGTCTTGGTAATCTTACCAGGATAATAGAGG
ATGATATCCCATCCATCACTTTCTTTAACAGAGCGAATTTTTAGAATAGGCTCTTCTTTA
CCAAGGTGTTCAAGACTAACACCACTTTTGACAGCGGCTTCATATACTACATCAGAGATA
GACATATTAGTTACCTTCTTAAAAGAAAGCGGTCATGCGACCGCATCTTTAATCAGCGAG
ATAATTCGCGCTGATGGTTCGCGCCAAAATTCAATACGTACATTATTGAACTGGCTATCG
TGATGCATAAAAGCTGACGATTGCTTTGCTGCATCGTGATTCATAATAGAACGTAGCTGG
ATAATATTTTTGTCTTTGAGTCGGATACCATCCAGATCAATGACTTTCAGTCCAGAGTTC
ATAGTTTTTACAGTTACATGTTGCATTTACAATTTCCTTTTAGTTGGATTAAAAATCTGT
TAAACTTCTTTTATAAGTTATTTCGGTTTTGCGATAGCTTTAATGAGTTCCTGTTCAAGT
TGCACGAGTTCATCATCTGCGATGTCGCGTGAAACACACATACACCGTCCTGGTCGTTTA
TACCAAGTAATGCAGACATCACGCCAAATAAGCGCACCTTCATCGATATCATTGAGCCTG
AAAGTCTTTAGCTCGTCAGTGTTAAGAGAAGGACCACCAGGATAAGGATAAAATCTTTCG
TAATCAATTCCACTATATTTCATCACTAGGGCATATAGTGGTGGTTGAACCATTTTCCAA
TATGAAGCTAATTTAATATCCTCACTTGGTACAGATGCCCAATACTCTTTTTCTGCTTCA
TCCATTTCTTCTGGTTTAGGAAGTCCACCAATCAGACAATATGCATGTTCAGCAACTTCA
ACTAAGCGTGTATTTTTCATAGCTTAATCCTAATCTTTGTAATACCGCAATCGTGCTCAC
CGAACTCGACTTTTCTCCAGCCCGCTTCACGCAATCGTGCTTTAACAACCTTCATTACAG
ATGGAGCAATTTCATCCTTATGTTCGACAACAATTTCATAACTGCGAATAAAATGGAAGT
TGTTGAAACCAGGTAGGTCTTCAAGCATCTTTCTCCGAATACCCGCACAGACTTCATTGG
CTTGCCGTTCAACCAACATTGCATGAATTTCATTTTTGGTCGGAATAGAGCAATTGCCAG
TTTCTATTTGAAGAGTTTTGATTGCATTTTCCAAAAGAGATTTTGAAATACCAAGAGTCA
TCGTATCAGTTCCCCGTGAGTTAAATAAATTTTAATACGCGTTTTGATGGTTTATTATTT
ACCAATAGATACAATTACCTCTTTTAATTTACCATGGTCATTAATTGCCATCTGACAAGT
GGGGCACGGATACGCATCCAATGGCCTGCCATCAGCACCGACCCGCGCAACATAGATCCT
ATATCCTTTTCCTTTGGAGAGGATGATAGAACGCAACTCACTATGCATCTCACAACGTAG
ATCAGACAATCCTGCTTTTAGAGAATAACGTTTCTGAACAGGATGTGTTTTACCATACAT
ATTTTGGCTTTCACTAATAATCCTGCCACGCTTATCAGTAATGACTGAATAAACACGTTG
ACGATGTTTTACATAAGGGATCTCGCGACACTTTTCCAAAGCATAATCCAACATAATTGA
TTTACCTATTTGAAATTTAGATAGTTTTATCACATTTGTAATATACTGTTTAAAATGCTT
TAAATACAAAAAAATAAAATATAAGCCCTCCCGCAATGGGAGGGCAATATAATAACTATT
ACAATTTATTCGCCATTTTACCTGGTACTATAACCCAGTGTAAATTACATTTAATGTGTT
TATTTTTAAGAGACATTCCTGAGATACACACATCCTCTTTGGTTATGCTAATTTTAAATA
AAGCTTCCCATTTATTAGCTGTGATGATTTCATCAACAGTGTGATGGAATTTAAGTGTGT
TATCTAATACTGAAATATAAAAGTCTTTATTGGGTTGACCTTTAGTTAAATCAATTATTA
ACCTATTATTTAATTTAGGTGAAAAAGTTGTTAATGTACCATCTTCATTATTTTCAGATA
TATAAGAGCAACCAGTAACAATGAAGACATTATCATTTACACTATTGGCATAAATTATTT
TTGGGTGTTTAAAAATATTAATTAGATAAACAATAATTGCTGACAGGATTAGTGCAATTA
CTATATCAGCCATTATTAACCCCTATTAACAAAGATAAAATAATCTCGTAGTTCACCAGC
TAAATCTAATGGTTGATAATTATCACTACCATCATCATAAGGGATATAATCAGCACCTGC
TTCTACAGCCGCTAAATATTCTTCCTCACCAACTGCTGGAATTAAATGAAACGCTGGGCA
ATCGTCATTATTGCCATCTAGTATATCTAGCATGCCTGTAATGACACTATCTGCTACAGC
CCTGTCCCGATCAGCTGGCTCTGTAAATTGATCAAGTTTAGAGTTATTGATAGCATTATC
ACGCATATTGACAACACTACTAATAAATAGTTCTTTAACTTGTTCCTGTGTTACAGGTTT
AACATTACCATCGCCTTCAAAATAGATCATAATTACATACCTTGTTATCAGTAGCTTATA
AATTTATTAGTTCATTAACGCATTATTCGACTGATATCATCAGCTATTTGTGATTGTATC
TTTTCCGCTTTTTCTTTAGCTTTTTCTACTAACATAGCAAGTTGCTCTTGCGTAAAATTA
CCCGAGTAATACTTAACAGGTTTCTCACCTGCTAAACTAAGGAAATGGTTCAATAGTGCA
TGTGGTCCTTTGAAAGGTTCCGTAAATGTCTTAGAAACTTGATAACGTAGATTACCAGAA
ATATCAACTGCATCACACTTTGCACGGATATTATCTTTTAAATTTTCAACTGGGTTTACT
GGCCAATAATTCTCACCAATACTTATTAGGTAGTCAATATCCTCTTGAGTAACATTAGGT
ATAAGTTTGAATCCGGGTATATTTGGATCATTGCCATCTAGGCCAGCTGCGATGCTATAT
ATAAATCCATCAAGCATATCTCTGATAGATAGTGCCTTATCTGTATTTTGAGTATCGGTA
TACTGTTTATGCCAGTAATTACGTGTGCTTTGAAGCCAATTTACAAAGAGAGAAGTTTGT
TCCTCTTTTGTATATTCTCTCGGATCATCTACTTTCTCCCATTCTTTTTGTTTATTTATC
TTAGGAGTCTTAGTTTTCTTTACAGGTTGTTCAATCGGTGAATCTGAAACCTTTGTTTCA
AATCCTATACCAACTATAGTTTTATCGGTTGTATTGATCATAGAACATGAAACCTTTGTA
TATAGTTTGGTTTTATGCGTTTAGTAAATTGCGCTGAATGCTCAATGTAATAAATGCATT
TATCATTAAGTGAATACACTGTATAATAGTTTTTAGCACATATATGTCGTATGCCAATAG
TAACACATATTTCCCAACCGATCTTTGTAAATACATAACCTAACTGATTAGGCTCTATTT
CTAAACATCTTTTGTCGAAGTTAACCATTGTGGCTTCCTCGGAATAGTTCGCAAGTACTG
AACAATAAGTCGCGCGAATTCATCCATATCGTCTTCAACTAGAATTAACTCATCCAATGT
ATACCAGCCATCATCAGTTGTTTCAATTAGATTAGAATCATCTTTGATTTCTCTATCTAA
GATGGCGTATAATCTAGTTGGTCCAAAATCAGGCTCTTCTATAACCCCAAGATGTATCAA
AGAATTTCTATTATTAGTATCATCTGTGATAGTTGGCTGAACACTAATATTGGAAGTTTC
CTCTGGGAAGTTATAACTATCTAAAATAGCAAAATCAGTTAATTGTCTAATAGCCTTTCT
AGTGAAATCATAAACCTTCACTATGGGATGAATCACATAGGTTAGTTTATCATTAACTAA
ACGTTGCCTTAAATTAATAAATGCGCAGTTATTCATCGACATACTCATGTACCATTTTAA
TAGTTTTCAAAAATACTTCTTGATTATTACTATCATCTGCTTTTAGAATAACAGGATGAC
ACATAAATTCATTTTCCAATGATACTCGATAATATTCATTAATTGTCTGAATGAAATCAA
GCGGGGGATAAATAATAATATCCTTATCTGTTTCGGCGTAATTAACTACATTTGGTTCAT
GTTTAAATTTGGATTTATTTAATTTATAAACAAAGTATTTTATATCATTTTTATCTACTT
GTGATACAAATACAATTCGTTCATACATTGATAAATCAATATCTTTACCAATATTGATAG
ACAGTGGCATACCAATAAATGAGCGTTTAATATTTTCATTCATTTTTTAATTACCTATTT
AATAGTTTAATGTTGTATTAGTGTAATATAGATTTCAAAAAAAATTTAATGTAAAAGCCC
TCTCCTTTGGGAGAGGGTTTATGACTTTATTTATATTTTTTCTTATGAGTGTGATAAATA
TAGCTAAATAGCATACCGATTGACATTGATACAGCTACCATACCCACATAGAAAAGTTCA
TTACTAAGTTGCATTAGATTTCCTCAAATAGTTTAATTTATCCCACCTAGTTTTAACCGT
CCAGTCGGTTAAAAAGAGGACCCGAAGGTCCTCTAATTATTTCTTATAACTCTCAGGGCA
TCCCATTTTGAGTTTGCCATCCTTTGGGTCTTCAGCGAATAATACTTCATCTGGACACTT
CTTAACAGGAGTGTCCTTCGCCTTATCTTCCCATTCTACAACAGGCATTTCTAATTTCTT
ACGAAATTGATACGTATCATAAAGAACATACGTAATCATTCCCATAAGAGAGATTACCCA
TACCCATGCAACAATTAGGATGATTCTAGTTATCATACAACTCCTCGCCGACTATATTGA
AACACCCATTACTGAGTTTTTCAGTCAGCATCTCACCAAGATCACTTCCCTCGCTCTTTG
CCAAAAGCTTAAGTGCGGGATCAGTGAGATTTTGGTATATTACATCGACATTATCCAATG
CGATATTAATAGCGAGTGCCTTATCACTCTGGTTTTTATCTATGGCAATGGATAGTTCAT
CTTGCAGTATTGCATACATCTCCAATGGCTCACCGCCATTAGTGTAGAATTGAACCATAT
TCTTTGCCAAGCTGTGCAGCACGTAGCAAGATGACACGGTTACGGGTTGTGCATTAACCG
ACATTGCTACCATAGTGATAATGAGCGAGAAGACGTATTTCATCCTATTTTCCTTTTGAA
AGTATTCGATATGAATTAAATGAGTTCAACAATTACCATGTGAGTGAATTTCTCACCAAT
ATGCTTCATGCAGTAATTGCCATAATACCCGCTGATAAAAGCTGCCAGATTAGGAGTAGT
CACATTGTAACCTTGACTACGGATATAATCATGGATCTCTTTACTGTTAAGGTCATTATT
GATTTTATTAAGACTATTGAATACGAATGTTAACGCAATCCAATTATTGGTATCCAACTC
ATCTTTGAGTTTAGCAGAGTTGTTGAGCATAAGCACACCAACTTCATCTGCGCTATGACC
TTCACTCATTCGAAATACAGCTTGTTTAGTAATGGTTTCAACCATTGCACACGACTGCAC
AGTGAGTTGAGCATCTTTTTTACCAATCTTGATTTCAGCCATTGCGGTATTGAACATGAT
ACCGGTAATGGCAATGAGACCAGCGAAAGCTGCTGCAATTACATTTTTCATTTTAAATCC
TTCTTCATTTATTTAATGGTAAGAATAGTAATTTTTTCAGGATTTACTGGAACTTTAATT
TTAGATTTATGTTGGAGAAACTCAACAACCACCATAGACTTATCCATTTTATACACTTCA
CATACTTTGACAAGCCTATCTACTACGCAACCAATTTTACCGGCATTTTGAGAAAAGAAA
GATTTTGCTTTTCTAATAGCCTCGCGTTTCTCAAGCATTTCCATATGCATATTTTCAATA
TGTTTATCGCGTTGAACACGATTAAACTTACGCATATGTCGTTCGATCTTACTAATTTCA
GAAGAGTGTAATGAATAAGCAGCAGCTTCTTTCAGTTTCTCATATACTTCCACTGCCATT
ACCACGTGATCATCTTCAAAATTTCTTTTCATATCTATGCCTTTTTTACTGTTTGATTAA
ATTTGACACTGCTTCTTGTTTACATTGAGTATTCATCCATAATGCAATGTCTTTGGGTTC
TTGTCCAGTTTCCACCATATCGATAATGATACGGGTATTACGTTGTGCTTTCTCACGGGC
ATTTAACATATCAGGATCATTAATAATGAATTCCCTACCCATAACTGGATCTAATCCAAT
ATAAGCTTTAGATGCAATAGTTCTCACCATTGCTTCATATTGGTCACATCCACGTTCAGT
TAATACAAGGTTATCTGCATTGGCACTACCGCCAAATATCAAACCTAGGAATCCATAGAA
AAAAGTGTGACGTATTGTCTTCCAACAAATACGCATCTCTTCATTTTTTGTATAAAGCTT
TTCCCAATCAAACATTAAATAGAAACTTTCTTTTTGGATAGAAGGGTGTAACCAAATAGG
TTTAATACTTACTTCAAGAAGTTTACTATTTGGATTCTTACCGATAAAGATAACTTCAAC
AATGGCTCGTGCTAAAGCATCTTTTTCTTTACCATTCCATCCAAATTTTATTTCATCAGC
CGTAATGTAAAGACGTATTCCATCACCCACGTATTTGGGTAACCAAACAGCTTTACCTAG
TTGCACTGGAACATCATTAGGGATTCCCCCAACCATCCAGGTGGCCTTGGTGAAATGAAT
AGCAACATCATCATTCAACCATTTTAGAATAGCTGGCCTTACCCAACTATCTACCAAATT
ACCACATGTCAATGCAGCTAGCATAGCCATGAGCATAATGACAATATAGATACTAATCAT
AGTCTACTCCAAGTTAAATTTAGTACCAATTGCTTCAACACAATTTTCAGCTAACCTATC
TAGGATAGCTCCATTGGTAAATCCTTTTCGTTTATTTACTCGAATATCAACTAAGTTTAA
CTTGGCATATACCGCACCTGCATAGAACTCCAAGTCATCCATATCCTTACGAGAGATCAT
GTCTAACTGCATCATTATCTCAAATTGGGATAGGTTCTTATCATAAAGCTCAGTTGCTTT
TTGTGAAAGATTTACTGCCACATTACATGATTTCTTAGTAATACCCACTTCTACAGCGTG
GGCAGGCTGACATGCAATGGACAGGATTGGCAGGAAAAGGAATAATAGCCAATTCTTAAG
CATGTTGTACCTCCATTATTTTAGAGTAAGTGGTTTTGCTTCAAACGCACCTGCCGCTAC
ACAACGCTGGAAATAACCATTAATGATGAATTTCTCAGGAGTGGTCTTATAGACTTTAGC
AGCATTTGTTGCACGTGGCAAACTTGCCTCAATTGCCATTTTATCTACCTTAGACCATAG
GTAAAATAGACCAGTGAGTTCTTCAACTTTAGACTGGTTGATCTTTAGATCTTTAGTGTT
ATTAAGGATATAATGAATCCTTTCATAAGTCTTCATTTGCACTTCAGTTACAGATGCACC
TTTTACAAACAATTCATCTGCCTGTTTTACAAACTCGATGCATGAATCACGATTAGTGTA
CATGACAGCCGAGTTAGCAGTGATAGTTACAATAGACAACATAAATGCAATTACATATTT
CATAATGAATTACCTCAAAATTAATTTTATTAACTATTGGTTTCACCACGAGTATTGAAT
TCTAAATCCAATACAACTTTAGTAAATTCTTCCAGTGCACCACCCTCGTAGATGAGTGGG
TCACTGTCACCCCGGTACATGCTACCTACCGGTACTTGACCACGAAACACCATCAGCATA
TCGTTTTTTACTATGACATGATGTTCATCCCCGACAGCAATGTCTTGGATGTGTCTCCAG
CGTTCACGCAGTAAGCTGCAAGCGCACCATACGGATTTCAAACGTTCAGTCATTGTATTG
CCCTCTTGGTTATTAAATTCATATTTGTAATATAGCTTTTTAAATAGTTTAAATACAAAA
AAAGATAAATAAAACCCTCCCCGAAGGGAGGGTGTATATTAAGTAATTATTTTAACATAC
AATTTCATTATCAGAAAATAGTTTATTATATTCTTTTAGTGCATCCCCACCAACCATAGT
ACACCTGCCATAGAGAACAGATATAGCCAGATCTTTAATAGCGGGGTGACAATTATTTAA
CTTACTGATTAGTTGAGCTTTCTCAGTCAGATACAGTTCAGCAAAATCAGGCTTATCATT
AACAATCGACCACATGTTTGAAATGGAATCTAGTAACTTAAGAGATTGACCACTCCATGA
AATGCGAGAAAGTCTTTCATGTTGTAAACTAATCCTAGTTTTACGATTACCTTCGTAAGT
TACATTTGTTAGTTCAGTTACTAAATTAACAACAGGGATTGAGAATAGTTTAGTTAGATC
AGAAGCAGTTACAGCAGTATCCTCAATTACATCATGTAACCATGCTGCTTTATAAGCAGC
GTGAGATAGGTCGAATAATTGCGCCATCTCAGCTACTTGTAATAAATGATGCCAGTAAGG
TTTTCCTGAACCATCTCGCAATTGACCAACAGCAGTATGTGCCGCAATGGCATATGATGC
AGCCATTGCATTACCCGCATTGGAATATTTGCCATTACCTAGATGGTTAGTTAAGAGAAT
ATTCTCTTTCCCTCCTTCTAGAATATCGATAATTTCATTCATTAGCATAGCTATATTCCT
ATTTAAATTATTGGAAACCTAATATAGGTCTTCACTAAATAAATATTTAGTTACTAATCT
ATTTTCTAATTCAGCTCGATATAACTGATTATTATTCTTAGCGATAATTACTGCTTCTTC
CCTAGAGTGGAAGTTTTCATACTGATCAATAAAACCTTGTTCATGATCATCTCCTGCATA
TTCATGCAATACCTTAAGACCACCATACATTAGCTGTTGTTGAGTCATTATGATTGATGA
ATGCCTCGCTGCAATGAAATAAACATCCTTCCATCTATTGCAGGCGGCAACTATCCTTAA
TTTCACATCGGGATGTTGTTCCCACCACCATAGACCAGTTTCCTCATTCCAATACCTTTC
TTTCATTTGAGTTTTTCTAAACTCACCTTGTATGTCTAAAAGTCTAAATGCCTCTTCTTT
AGACATAGCTTGTAGAATAGGATACTTATCCATTTAATACAGATACCTAATTGCGAAATA
GAAAGAGCCCCGAAGGGCTCTTATTATACAAGTAGCTTTTCAATAGTGAAGCTTGTCCAG
ACCATTGCCCTATAACCAACACTCTCTTCAGTATAAGTGATATCATCAAACTTATTAGGT
GGCATGAAACCACGTTGTGTACTAGCATCAGTCACAACAAGATTAGAATCTTTTAAAGTT
TCATTTAGAGCCTTAAGTTTATCCTTACTAATTGATCCCTTAACATGGAACTTGAAATAA
GCATATCCTTTATGATTGATACGACAACTGTCAAGAACAGTTTGTTTATCATTCATTTGG
CTCATCAGATCACTAATAACTGCATCATCTTCAGGAGTATCGTCATTGACAATATTGATT
AATTCAATATAAGTTGGCATTCTTTTTGTTTCCTTAATTAGATTGACTACATAAGATAAT
TTTTTAATTAATATTCTATTAAATTTTTAATAGGAGCCCACTGTGATTAAATGAGATAAT
ACAGTTATGTCCCATCATGGCAATATGATAAGATATTATATTATCACGTGTATCATTTGA
AATCTTGTTCACCTTAAATTCATTCATGATCGCATTATGAATGGCTAAGTCTTTTTCTCG
ATACTGCTTTGAGAAAAACATAATATCATTATGATTAATATTGATAGTATCCATTGTATT
AAGAAAATCTTCAACATCAAACTTTTTAATAGTTTCAGATTTTCCAACACAACGCTCGGT
TTTATCAATTAATGAAAAACCAATAGTCCTAATTGGTTCATCCTTATTATGGAAGCTATA
ATTGGTAATACTCATACCTACCAATAGTCCATTTTTATCTACATTAACTACTTTAGAATC
AGTGTACTTATAAATATCATTGATTGCATAACCAGCTGAATATAATACATCTTTAAAATG
ACTAGTTACTTTATCAATAATAAAGTTTTGATAATCTGATTGATATAGTTTATCACTATA
TTCAAGCTTTTTGATAATATCACTTAGTTCATGATACACATTGGTAAAACTATTCGAAAA
ATAATTATCTTTTATTCCTAACCTAGTTAACAGATCTAGCTGGATTTCTTTTTTAGATAG
CTTCGTAGAATTACTAAGTTTTTCAATGACGGATGTAATCGTACGTAGATCAATTGCTAG
TGAAAGTGATTTAAAGATATTATTAATTGGTGTATCAGATAGCTTTGAAATAGCTATTAG
TAGATTATCTAATTCATCATTAGTAATTTTCAGTTCTTTCACAATGTCATTATATTCAAT
TAGTTTACCATCAATAATATTACAGATTAGAAGTTTATGTAATTCTTTAATATTGGTATT
AACTTGTAGATTATTCATTTTTTTACCTTTTAGTTAATTTAAAATTTATTTACAGTTCTA
AGAAAATATTCAGATGGATCGTCGAAGAAGACAATACTATCAACAACACTATTTTGTCGA
GTACACCTTACTTTGATAAGATTATATTCTCTGAATTTATTAAGACCCCAAGCTTCTTTA
GCACGATGGCGTAATCCACTACCAACAATAGCCCCATACCTAGTTTGTTCAACAAATAAA
TAAACATCCCAGCCATGATGATTATCATGGTATTTTGCGTAGTATTTATTGTCTTTAGTT
TTGTTTAAACTAAGACTATACCTTTCTGTCTGTAGTTGATTAATATTCGATTTAATCATT
TCATTTAATTTGGGTTCCACTATATGAATGACATCGCCAGCAGTAGTGGCCATTACCTTT
AGTTTGTGATGCACGTTCGTAAGAACGTCCTCCCAAATGTTAGTAACTACGTCCATCTAT
TAAAACCTCGACAAATTAATTTGATTTTGTAATACACACATGTAATATATATCTCAAATA
AAATTTAGTGCAATAGCCCTCCCCGAAGGGAGGGCCATATGCTCTTATTATCGATTAACT
ACACGATAATTATCAATGATAAACTCGATGTACTGCTCGACATCATGTAAGAAGCAGTTG
TAACTATACCGATCAAGTTTATTTAAAGCTTCAGTTAGAACTGGTTCGATATAGATATTT
ATTTCAGCTATTGATGGAATCTCAACATACTTGTTTTCATATTCGGTAAGCTGCTCCTTT
ACCTTAGCCATTTGCTTTTTGTAAATGTATTCCATCGACCATTCTTTATAAATGGAGCGT
GCCCCATCAAAGAGATGGTAACCAAATGCGATGCCACCTAGTACCAGAACACCAGTGGAA
ATAGTTGACACATTCATGATATATCTCCTTTTTTCAAGATTGAATTCATATTAGTAATAT
ACTGTTTAAATATGTTTGAATACAAAAAAAACACAATATAAAGGCCTCCCCGAAGGGAGG
CCTTTATGGTAACTTTGTAAAAGACTTATTATAGTTGAAAGTCTTTATCTTCTTCAATGA
TTTCATAACCTGGTAAATTAACTATATTTTTATTTAAACGGACTCGTTCATCTACTAGGT
ATTTAACTACTTTAAGTAATTGACTTATCGACAGGTCATTATTTTCATCAGTATCTGATT
TAAAAATACGACCACTGGTAGGTGAAGCATTCGTAAAACAAATACCTTCATTATCTTTAT
AAATATCATAATACCATACGACATATGGATTATTGGTATTACTTATGACAAATACTAAAA
ACAGATCTTCATCATCACCTTGACCACTCAGGATCCCGATATTTTTTCGATGCGTTATAC
CACCTGTAATAACTAGGCCGTTGACATCATCACTGAATTTAAATATATCATACCCACCTT
CAAGTTTACCATTTTCAAAATACTGTAATAGCGCACCACCTACTACAGCACCCCATGAAA
AGAAGTTATCTTTATTTAAATGCTCAACCATCTTAAAAATCCTCTTTAGGTTCAGTGATC
CGAGAATAAAGAACAAACATATCAGTTAGGATATTTCTATCTAGAATGGTACGTGTAAGT
AAGATTCCATATTGAAATATACCTGTAGTATACAAATTATAAAACAACATAAAAAGAGAG
AGGATAAATTCCTCTCTCTTTATGCAACTAAATAGTTTTATTCTTTTTGCTTTTCTTTAG
CTTCACGTTTAGCTTTGAGTTCTGCATTATTAAGCCGCCAAGCAGCTTGCATAGTAGCTA
GATTGACAAACTTAGGCTGTTGCTTATTTTTAACTTTCATTTGCTAATTCCAAATTTATT
TCAAATGGTTAATCTAAACTATTAAATTGCTTCATATTCTTCATGCATAATTTAATCCTC
AGTCAGCGTAGTATAATCTACATAAAGATCATTGAGTTGCTCTTTTAATGAAATATTTAT
TTTTAATTCATTAAGAGTAATCCTATTCCAATGTTTACGCGGATTACCACATAGCATACA
ACGAGACCTACCGCAGTTAAACGGATTATGTTTACGCCATTTACCTTTAGCCTTTGCTGA
AGGATTAGTGTCATTATAAAGACTCGCGGCTAGTGAAACATAATAATTAACTATACGAGT
ATTGTGATGACGATTAAGTTGTACAGTTAGTTTGTTGCTTGACATATTTATACTCCACCT
TAATACCCCTACCCCAATATGGAGTAGGGTAAAGTATGTAGTAGAGTAAATTGAATACAT
TAACTTTTAACATTCTAAACTTCATTAATTTTCCACAATATCCTGGATGGTAAGTAGACG
TTCACGCATCGTCAGTAAGAAATTACGATAAGGTTCACCGGCGTCCAAAAAAGGTGGCAT
GTTTAACCTATTAGTAACCTCTTCTAGAAATTCTTTATACTTATAAAGATTAATAGTGAA
TTTATTACAATCTGGATCAGTAGTAGTTGGGATAATATAATTACGAATAAGGTAGTAAAT
ATGAAAACTGCTACCATATTCAATTAAAGTATAAGGATTATTATCAATGAATTTCTGTGC
TTCTTTTTCTCTTAAGGCGAAATCTTCTCGTTCAACGATTTCATGAAGTAGTGGTCCTAA
GAACTGCATTGGAATCACACCATACGTTTTAGTGAACTTCTTAATATCCTTATATATTAC
TTCTGGATTAGGATATACCTCACGAGTCCGACCAATATTTTTAACTAGATATAGTTTTTC
TTTTACTAAGATATTTTCGATGCATAGTTCATCTTTAAATAGCATAAAATATTTTCCTTT
TAATAAGATGGTATTAAACTTTTTTCTTTATTGACTAATATTTTCTTCGTTCGGTACCCT
GTAGTTTCGCGAATGTGTCGATCTTGTACTGGTCAACAAAATGCCAGGCTAGATCGGTAA
GTGCATAGATGTCCGGACGTTCGTATTTACCGAAGTCTGGTTTCTCACGACTCAATTGAA
AATCGATGAACTGATCTAATATAGGGCAACGATCTATCAGATCCTGTTCAGTAGCCCCAA
CCTTATCATTAACCAGTTCTTGGATACGTTTATAAAGGATAGGATCTGTTAGAAGAGGCA
GTAGATCATGGAATACCATCGGTGGATGTTCCAGACTTTCACGGACCCACATTGCAGCCA
ACAGAGGACGAAGAGAATAGAAGTATTTCTTCATCCGGACCTTCTCATCTGACAACCAAC
GCATTTTGGTTTGTTTGGCCATCGAGATATAATGCATGTAACTCGATTCAGGGATGAAGT
GCTTTAGCGCAGCATCACGGATTAACTTGTAGTCCCGATCAACCTTACGGTAAACGATTG
GGGAGTTTAGCCATTCCAAGAGAGTGGGGTTAGACTTGTAAGCAAGTTGAAGAGTCTTAG
TGATACTCCAACCAGCCAGGTCTAGTTCTTTAGACACCATCTCTTCAATAGTATCACGTG
CTTCATTATCCACACGAACATAATGACTCGGATGGTTAATGTAAATGAAACGAACGTCAT
AGTCACTATTGGTTGAAGCAAAGCCCCATCCACGACTACCGGACTCACAGGCATAGATAA
CCTTTACACCATATTTCTTTTCGATGCGATTAAGTTCAGCATCGATGATTGCGCGCATCT
CATCGCTAACTGGATGTCGTGGATCAATCATGTGGTCACCTTAATCATTCGAAATTTCTC
TTCTTTACCGATATCCAGATACATGAACATCGAATTTCTCCAAGGGAAATAAAGCCTCCC
CGAAGGGAGGCATTTATGTTAGACAGCAACTTTGCCAGCAATGTGTGGATGATATTCGTA
GTTCTCGATAACAAAATCATCTACACCAATTTCCCGAATATCTTTACCAATAGCTTCTTC
TTTAAAACGAATGGTAGGTAGAACCTTCGGTTCACGAGTTAATTGAAGATCGGTTTGTTC
TTGGTGGTTAGAGTAAATATGTACATCACCACCAGTCCAGATAAACTCTTCAGCTACCAT
ATTCATTTGGTTAGCTAACATATGGGTCAGCAGACTGTAGAACGTGATATTAAAGGGTTT
TCCTAAGAAAGTATCGACGCTCTCTTATGTTCACCCAGGGTCGTTAATCCTGAGCCGTTT
ACTTAAATGACTTTATAACCAGAATACTTTGGATTCTTGCTGTTAATTCGGTATGTTATT
GTACCCTGTGATACTCCGAGAGCCTTAGCTGCATCGGCCTGGGATAAATAAACAACACCG
TCCACTTCAAGTTTGTTTGAGTTAGTTGGCTTTATACCGCGTTTGTTATCCGTCAACTTT
TTTCTGGTTTCTTCGGAATGTGTTTTACCGTAGAATGGATTACGTTCGCCTGTTCTCTGA
GAAGCTATCTCCGACATCCTGGCTCTTGTCTCATCACTAGCTTTAATGCCAAGACGGTAA
GTGTTACCCGTGTGTAACTCGGATAGAGCTACCTTAACTTCTTCTGTGTGAGTACGACCA
TACATCCCATTCTGCTCACCTAGTCGACCATACTTTTCCTGACGAGCCTCGGCTCCAATC
TCATCAAGTCTGATACGTATTGTATCACTCCGCTTCTCGATGATTTGTTCTTTGAGGTTA
TGCCTGGTTAAGTTATCACCACCCTTGGAGTGTCTACCAATATTAAGAAGGTTACCTTCT
TCTTCATGCTTGGTTATCCACATCTGTTCGAGTGTAAATGCTGATTCCCGACTTTCACAA
CGATAGTACTTTAACGAGAATCTTTCACCGTTATCGTATTCTTGTTGTAATGGGTAGTTA
TGGTGCTTGGAATTACTAAGGTCTCTGAAATGTCGTTGAACGCGCTTAACTAAATCTCGC
GCACTTCCGACATATACCTTTCCTTCTTTGGTGAATAGGCAATACACATAAGCTACGTCA
TTAATAACACCCTCCTTATCTGGCGGAGTCATTAAGTAAACCGCTGCATGTCTCCATGCA
GGACAGACTATATCACGATCTCTTAAAAAGAGACCCCTACCTTTTCGGACCACTTGGTCC
TACTCTACTCCCTTCCTCTTCTCAGAGTGGTTTCGATAGTCGTTAGGCATTTATGACCGT
AGTCAATTTAGCACGGGATTGTCTCATAGAGAGTTTCCCCGTTTAGATAGGTTATTCGAC
TAGGATTGCTCCTAGAAGGCGCTAGTATTTAACGCTGGTAGAGTTGGCAACTCAATGCAC
GTTTAGGAACACCAAGTTTATCCCACAGTGCGTGATCAGTTTCCGGTTGCGCACCTTCAA
GGAAAATACGTTGAGCTTCGGTGTCATTAAGTTGGGCCCAGTCATACCGTTCTTCTAACG
TCAGTTCACGAGTCCAGAACTGGAAAAAGCTATGGCACGGTGGGAGTGACTGTTCATCGA
CAAGTTGTGGTGCCCATGCACAAACGATGATCCGACGAGAATCAGGGTTAGTCTTAAGTT
GATTAATCACGTCTTGAATCTGATCGATACGTCTAGTAACAACACACCGATCATTCTCCA
TGCAAGTACCTGGAATATCAACTACGAAGTCAAAGCCACGTGCCTCGTAATCAACCCACT
CGTGTTTTGGGATCACACGAGTATCTTCAAGATCACGCCAAGTCTTACCGTAAACAGCAC
CTAGATCGCCGCCGACCAGGCGTGCTGGTTCTTTATGCGTCAAAGCACGATACAGCCGTT
TGTTATATTCAGTATGAATACCTTCAGGATTTTTGGCTTCATCGAATCCTTCAGTAGCGA
GCCTATTCCACGACTTTTCACTAACTCCAATGACGTATTGGATTTCCTCACGGTTAACTG
GATGTTCATCCCAGAAAGCCTGAATAGTCTCTGGGGCCATACCCGACTCGAACTCCACTA
CAGTCTCGATGATTGGAGTAGAGTCATCGTTCATGCAATGGACGTACATTACGAATGGGG
CACCAATGAGGGTAGTTACTGCTTTGAGAACGGCCTCATCAGTCATCGGCGCATATAACG
CGGTATTTGGTTTAACCCATTCATTCCAAATGCGTACACCATTTTCAATTAAATAATCTA
CACGAGTATCACCAGAAAGCATCCAGAATAATTCATGGATAACGGATGGAAGATGAATTT
TCTTAGTGGTTACTACGGGTAGAACGTTGTTACGTAAACTATAACGTTCTTGTTGACCAA
ACATGCTTTGGGTGCCAGTACCAGTACGATCACCTTTATGTACACCGAGTTCTTTAACTA
AACGAATTGAATTAAGATATTGTTCCATTACTTGATCCTTGGATTGTCCACTAGTCCACA
GTTGAACCAGAGATGCTTATCATGGCGGCGATCATCACTAATAGACATGATCGTACCCTT
ACCATCTTTAAAGTTAATAATCAATGCTCGAACTCGGCCATTGGCAAGAGCATTGAAAAT
TTTGTACGACCTTACACTGAATGCGATTCTTTCATCAAGACGATCCATACTTTATTCCTC
TAGTCTTACTGATAATCACAGATCAACCTCTATTCGTTTGTATTTGATTTCAACCGGAAT
ACCTAATTCATTTTTTACAAGATTAAATGAGTTTTTTGATGGAGTGTATGTAGCAACTAT
AACGGCTTGACTATCAGCTACAGCTACGTCTCGCCATTCCATGTGCATGTTATCGAAATC
ATCTTTACCCATGATCAAGTAATAAGACGTATCATTATGCGTAATGGTATTTTCAAACGG
TCTAATTACAAAAGCACTTAAACTAGACGGTATACGGTGTCCTACTTGTTCAAGTGTAAC
TGTATACATAAAACCTCCTAGACGGTATACGGGAGTCCCGAAGGACTCCCTAAGCGCAAC
TAACCAATCGGCTAGTATCTTACCTATATTATTAGTCTATCAGAAGTATTTTTATTATAG
ACCAATACGAGTCAAAATTTCAGCCCAACCTTTCTCTTTGGCATATCGCAATAGGCTATT
TTCAATATGGGTTTCACTATAGACAATAGGTTCATGGCCACCTTGCACATGATACATTGT
TAATGGTTCCACCACATGTTGACTAGACCAAGCATCGTATAAACGATCATTGATTTTAAT
CACCACATATACCATCAATTTATCGTCGATGTCAAGATCAATACCTGCTACAAATGCATT
AACATTGGAACGCACTTGGTCAGCAGTTAGTTGCACTTGCAACCCGCCATGTACTTCAAA
TTCGATATTACAGATATTCTTATTTAACCAAGTATACACTGCCTGATTAGCATATGTCTC
AATTGGATCACTACTACGTAAATCTAATAATGGTCCATATGTTTCTAATGATGAGACACT
GGTATCAACTAGGTCATTCAATGAGTATTCGGTACTAGAACAACTATCTAAAACACAGAT
AGTGTTATCCTCGATATGGATAGGTAATACCTTGAATACCACATTAGCAACATTAGGTAA
TGACGTATCTGGTTCAGAACTATTGAATGGAGTATAAAATAATCGATCAGCCACTTCAGT
ATCAATAGTTGATACATCCATTGGAATGAATCCATTAAGATCTTGTTTGATTACGTCATT
GTGTCCAATTCCAGAAAAAGATAAATACATTTTCTCAGACATATCCGTACCTATTTATTT
ACACAGATTAGAGTATGTTCTACTTTACTGGTACTAGAAGAAAAATAACGTAATAGAACA
CCATCGCTGATTTTTACAGTCTCTACATTATTACGAATAGCACTTGCTTTAGCTAGTTTT
TGAATACGCTCAATCGCGCTAAAACAAGTAGTCATGTCAGAGAACTCAGTGGTTGACTGC
GATGCACCATTGGCTTGATAACCAGCGATACTGATACTACTAAAAAGAATTGCTAAAGTT
GCATTCATTTCTTACCACCTTTAATAACAGTGAGTTTTGGTGGACCAGTAGGACGAGAAG
GTTTATTAATAATAATCTGCGAATTGGAAGAATTATTGAAATCCTCAACCATCTTATTTA
CATCATTGTCAAATGAATTAGATGTATTATCACCCGAGTCCACAGTTGATTCACTAACCA
CATTTGAAATAGGGTAACTGAGGAGTTCCATCATAAGTACATTGATGTTATCCTGATAGT
TTTCATTACGTGTACAATTAATAACCCGCTCACACCAATCCATAATTAATTCTGGTGCAT
TCTGTTTAATTGCAGTTACCGCTACTCTAATATGTGCATCTAATTCTGGATTACTAAATT
CAGTTACTCTGTTAATGGCGCTTTCAATCATCTGATCATGCTCATTCTCAGATGTATTCC
TTACAACTAACTTACCATTAGTGGTATCGGCTTTATTTTTAAAATTAACCTCAGTGACAT
TACCTACGGTAGTTAATACTGGGTTTTTGTCAACTACATTATTAACAGTTCCTTCTAATG
TTGCACGAATAGTATCTGCATTGAGATATCTATCTACTAGCGGCATTTCAAAGAATGCGT
TAGAATTATCATCAATAGGTGTAACTACACCCAATACTGCATAAAGAGGAAGTTTAATAC
TGACCCCAACTCCATTTACTGTTACATTGAAAGAGATATATTCGTCACTGATATAAAAAT
TCTTTGCACAGCGTGGATGGATATTGAAAGTGATAGTGTGATCTTCTTTCGCATGCTTTA
GAGCTACCTCAGATAAATCAGGTACTAATTGAGTATGTGCTACAATTAGAATATCTCTGA
AGTTATTCTCAAGAAACCAATCATAGGTAGCTCGAAGAATATGGCCAGTAAGTAATGATT
TTACCTTTAGCATATTTGTATTACCTTTAAATAAATTATAGGAAGATATCTTCTACTGAG
GGCACTATATTCTTTTCTTTTACAAGTTCAGTAGATTTGGTATAATGTGCATTAAATAGT
TTCTTTAAATCTGCTTTTTCATATTTTACAGTATCTGCTAATTTCCAAATAGTAAGACCT
AGATGAATACTAACTGAATTAACATGTTTTACGCATAGATCAATTAATTTGTTAAACTCT
TCTAATTCATTTTTAATCAACGATGCATCTAAAGCCTGGTGCAAACGATTAGATAATTTA
ACTTTATCTTTGTCAATTGTAAAGTTATTTTCAATATCCTTAGCACTCATCGGTGGTTCA
ACTTTATACCACACATTGGTTAGTTTACCGTCCACACGCGTCGTGATGGGATGTTTATAA
TCAGTCCAACTTCTATGTAGATTATGTTTATCATCAAGAACATCTACAGTAACTTTCTCA
TTACCTGTAAAGAATGGATACATTAGGTTGCCTTTATTTTATCAATGAGTAATTTTAATA
GTTCATCATTAGTTAAATTGTCTTTATTTTTAATAATGTCTTTTAGTTTAAACATATTGA
AAGTATACCACAACCACTTATGAATTATATAACAAATCACTATAACTAATAATAGTAGTG
AATGTAATGCTAGCATTATAACTACCTATTTTGATATGACTTGACCAAATATGTAATATA
GATTTCAAAAAAAATTTAATGCAATAAAGGAGAGCTAAATAGCTCTCCTATTTATGCTTA
TTTATTTTTCTTTCTTGACTTATCTTTAATAACTAAGTCTAATGCTTCAAACATTTTAAC
AGCAGTTAAATGGTCGATAGAGTATGCCTTTTTACGTAAACGTCCAATAGCTACTGTATA
CTGGTATTCAGATAAACCATCACTCATATTGTCAATAATTGATAGTGCTTCTTTATAAAG
CCTGTTACACTTTATCGTGTGTTTGATGGCATAATAACCCCAGTTAATTAAAGCCATCAT
TATAATCAGAAACAAAATACCTATAATTACTGTCATGATATCATTCATTTGCTGTTTCCC
TATTATTACATTTTAATATAATCAATGAGTTGATATCGTAAATAAAAGATGTAAAAATAT
GTTGATTTGTTATTTTAGATGATTCTTTATCTATAATGTCTTGGACAGCATTTTGATAGA
AAAAATAACTTATGCCATTGGGCATTTTATCTAATACATATCTAACCTTATAAACACCCA
TCCAGTGAATATAATGATTTTTTATATTAATAATGAAAGTTACACATGTTGATATAGCCG
TTAGTGTTATCATTGATATAACAAATACTTTATACATTTGCAACCCACAGATTCTCATCT
AGATGAAATAAACCAGCCCCGAAGGGCTGGTATTTATTTTACAACCACAGCTTTACCGTA
GTTGTTATCCATACAGGTTTTAAATGATGTAACGTATGCATCACGTGGGCTTTGTCTACG
TGAATACACAACGTGCACCTCTTTAATTGCTGCTGGGAGAACATTGTAAAGAACGTTATC
TTTGTTCTTCACGCCGTACCCTTTTAGGGATCGTAGGTTTTCTTCCCATTGTAAAATGGG
TGTTTTACGCTGACGTGCTTCTGCTGTGGCATGTGCTATAAGTGCAACACCATTACAGTA
ATTCTCGTCAACTACCAACGATGCAGCTAGTGGGTTTGATACGTATAACAACGTACTTAA
TACGGCCACTAACTTCATTACGTGTGTTAAACATTGCATCACGTTGTACCTAGGTTGCTA
AGATCAGAATATAAAGCTACTAAAATAGCCTTAAATCATTCTACAACCTTAACGTTACCA
TCTTCAATAACTAGATCTTTACCTACAACATCGGCAAGATCTAACTTATCCTTTACTTCC
AGTTTCTTGATACTGTGTACAAAACGGAATACAGATAGACGAAGAATTAGTTCTTCTGGT
ACATCAACAACATCAATAAAGTATTCTGATGGGTTGATATCACAATTGACATATTCCCAA
CTTTGTCTTAGTTCAGTTTCATTCTCAGTTACTTGTGCATCAAGAACTTCTTCAAAGTTA
ATATTGGCAATATTAGTATCATTATCATTCAGATAAGTAAATTGAAGACTAGCATTATTA
ATGAATTCTTCTTCAACTACAGTTAGTGCACGTTGAGCGTGAATGGGTAGATGATATCGA
ATACACCCATTAATAATAACCTCATTTGCCTTTTCAATATAACGTTCTTCTTTGAATTTT
ACATTAGATACGACGTAATCTAGGATTGCCTTGTAATATTCTTTATGATCTGGGTGGCTC
TTTTCAATCCACTGTCGGCTACTTACGCTAATTTTTTTCTCGGCTAGAAAATCTCGGAAT
TTAGCACGATCGATATAAGCGGTACGTTTTTTCATCAGTAGTTCCTATTATTTAACATTT
CTAGGTGTTAGTTCGATATGTGAACAGATCACATAAGATGCACATGCCAGTACATCTAAA
CCATAATACTCATCATAATGGAAATATCCTCTGAGATTACCTTGTTTAGTAAAGGTGTAT
TCATCAGCTAAATCTAACTCGTTACTTGTCTCTAGCACATTGATTAATTTATCATATTCA
ACTTTTAGTGCTATATCAGTACAGATTATTTGCTTGATATATTTATCAGAGTTTGGATCA
TTTTTATAATCTAAAGTATCAGTTAATACAGTGGTTAATGCTAGAATAACATAGTCATGG
TAACTTTCCGGTTGTTTAATCTCACCTTCAGGTATTTCAATCCATTCCCAACCATGTCGT
AATATATTTAGCATTACATGCCACTTACTGGCTTCATTACTAACCACAGCTATTGGTGAA
TCACTATAAGGTTTATACAAACCTGTTGTTTTTAAAAGATCTTTTTTAATAGCAGCTATA
TATAACGGGCGGTTTTCTGACATTTTTATAACTCACATATATTTCAAATGTTTGCCAATT
GGTTTATTAGGGTTATTCATATAACCACGACCTGCTGCTGCCCTAATTACTACTTTCTGT
ATATCTGTTAATTTTCTATAATTATCACCAATTAATTTAAGTATGATACTTTCTATAGAA
TCATTAGTTAATTCAGAAGGATCTGTTACTTTGAAATAATTATATACTAATTCTCTTTTA
ACTAGAAAATCAGCTCTTTGTTTTTCTTTAATTCGTTTATAACGTTGAGATACATGGATA
AATGAAAATAAAACAACTATCCAGAATAAGGTCAAAAGTAGGTACTCATAATCTACATTC
ATTTTTAATCCCTATCTTTTTTTCAAATTATCTTGTAACTCAACTAGTGTTCTGTTTAAT
AAACTAATTTGTTTCTGTTGTTCACATACAAGTTCACTTAACGTATTAATCTGCGCCTGT
AGTTCTTTAGTATTAGTATCAATAACATCAAGAATATATTCTTTATTTTTCTTAGGCATT
CTTTGCTTCCTCAACGTTAATTCACCGAACGGCAGAAAAGATGACTGGGCAGCCAACACT
CTTTTAGAATGTCTTACGAAGTTTAATTGGTATAAGCATTAAATAATATCTCTTGATGCC
CATGTACCATCTACAGAGTCATTTACAAATGGTGCACGATCACCAGGTATTACTTGAGCC
CATAAATCCACCTCAAGTAATATCCGACGACATGTATAAAAAGGCTCTACTTCTACCCTG
TATGAATTATCTTTAGGATCAATATACACAGTAGCAACTAGCTTAGGCTGGGCTCTTCGC
CATTTATCCCATACTTTAAGAATTACTTCGCCTTCCATTCTGGCTATACGTGGAGTTATC
TTTACCTCACTAATGATTAGCCCATCTGGACCTACCACTCGTTTAGGGGATAGCCATTTA
TGATAACCAATATCATTAATCCCATTCTTTGAAAATACCGAGTCTTCAAGATATCCTCTC
ACACCAGGGTATAACGGAACCATTGTAAGCATATGACACCTATAGTGATCCATTGGATGC
CCATAAAACTGAATAAGGATTTTGAGTTAATTGGAATCTAATTGCAAAGTTTTCGATTTC
CCAAAAACGATCAGTCTTATTCCACTCTAATTCCTTTTTCGCCAGATCAACATTAATTGT
TGATATAATACGATTACGCTCTTCTTCAAATACAGTAAACCTGACGATTGCTGGAAATAA
GCAATCTCTTTCTTTATAAAAGTTTAAAGTATTCTTATCGATATAACCTGGTCCTGGAAT
AATTTCAAGGATATTAAAATCAGTCCATCCTAAGTCTGGTGTACCTAGATCAGGTAAATG
TTTTAAAACCCCATTGCGTATAAAGGGTTTTCCATATTCTAGTGTGACTTCATGAAAAGA
AGAACCATAGATTTTCATACAACCACCATGCGTTTTAATTCATAGGGTTAGTATGTTTAG
TACTGTTTGAATTTTATTTCATTACAGACGATCGCTTTGTTATGCCTGGTGTTTGAATAT
TTTAGACTAGTTTCAATAAATGCTTTCTTTTTCATATATACACTTACGCAAAATAAATAG
GGACTCTCATTAAGAGTCCCTTAATATTAAACGAATAATAACTCCAGTACTAATACTGGA
AATTTATGCCGATATTGTGGATGTACATACGTATGAAATTTATGTGTGCCTAAATGGAAT
TCAACGTACAGTACAATAAAATCTTTAGCTGCATTTCGATCATGTACGTAAACAGTGAGT
ATTTCACCATCATCATCTTTCTTACGTCCATAATCAAAATAGTAATTTTTGTTATCAGCT
ATCCCTTCAGCATTTAATTGAATGCCTCTTACATCGACAACATTTAAACTAGAATCTTCA
TCAAATAAAGATCTAGTACTACCATGGTAAACCATTAATGGATCTAATTGAATCTGCATG
TGTTAGTCCTCTACTATGTAGTGAGGCACATGCCTCACTTATATTGTTTTAATTTTCATA
TTAATGATCAATTAAAGTTAACAGTGCTATAAGCTTTGCCTAAAGCTGTAAATAGTTCTT
CATTAAGTTCATCAAATTCTAACCAACCATTCATTTCACCTAAGATAGTTTTAACAATCG
TAAGATTAACAATCTCAGAGCTAGGAATGATATCTCGAATTCGCTCATGGAAATTAACTA
CTTGTTGAATACTTACTTTAGTATCATTGACTGAGATATCATCATCAGTTAACTTATTAA
TAGCCATCATCGCTATACGTGAGAATAGATCAGTATGTTCTTCCTTAACAATTTCCCATG
CTGCATTAAAGGAGTCAAGAACATCTAGATCATCAGAATTTAGTTGCTTTTGCATTTTAA
CCTCTTAAACATTATAACACATATACCCCACAACATAAGTCATGGAGTATATGCCTCGAA
GGGTACGTAATAGAAATACTACTACATAGTATTGTATTTACTCATTAATAACAGATACTT
TGTTATTCTCAGCTTTACTTTTAGCCGATAGCGCTAAATAGAGACAACTATACCAAGTGA
AGTAGTCTCTTGGGAAATAGCCCTTTAAAAAAGTAGCCATATTTTTAGCACACGCTTTAT
TAATATTCTTATTAATGATTTTCCTCTCATTCATTATTTTACAAGCTAACAATGAATAAT
GTAGTTGATTATTAGTACTTAGGTCTTCAAGGAATAGTTCTTTCACTGCTTGTGGCTTAG
AACTTAGACACATTATAATTTCTTGAACAATATAGTCATTCGTCACTGAATGAATAAGTT
CAAGATAGAGTGAAAGATTAATCGAATACAGATCTTGTTTATTATTGAAAATGTATCCAT
TTCTATCTAATGTAACTAATTTCTTATATGTGGGTGACATCTTTTCATTAACTATTTTAT
AAAAAAGACTAATCACTAATTTAATCATTTTAATAAACTTCCATCTACTCTATAAAAACC
ATGGACATCACGTTTACCATTTAGACTAGGTATCTCATATGGATCAGTTGATGGATTTAT
CAGTTTGATTTTGCATTTATCTAAACGATCACGCAAGCTGATATTACCAGATAATGTTAA
ACCACGATACTGAATATCGACATTATCTAAATCAACAATGAGCGTACTAAGCTCCCCATT
TGTTAAGTATGGTACCACAACCGAGTCAATTACTTTTGCAATTGTTTTAGCTTCAATATG
TATCCAGTTTCCAATATGATTAACAATCTCTGGAAACTTATCTAGATTTAATGTGATGCT
ATAGTCACACCTAATTTTGATAATTCCATTACTTGACCAATAATGCATTGCACTATTGAT
GCCACCTAGATGATTCTCCATAGGTGTGAACTTTAGCCGTCCATTGAAATCTATAAGCAC
TTTTGAGTTATCACACGCATCAACTATTCTTGACCGATACATAAACATATTAAGTAGTTT
TCTATTGATGGCCACAGTTGTACCATTAGTTAGTTCAACTACGACGATATCACCATCTGC
TTCATAAGACTCTACAATTAGAGTTATTGGGTTACTATCAAATTTGGAATTATCAGATAA
CCCATCCATCACAATCTTGTAATTACTATTAACTGATTTAACTTGATCTATTAAAGATGG
ATCAATGAAATCCTTAGTGAGTGATTTTGATGTGAAAATTACAGCCACATTTAGATCACT
ATTGATTGGTGTATTTAAAGGTAAGTATTGTTCATTAGAAAAATAGAATAATTTAAGATC
TTCTATATCAGTTAGATTAATAATATCTAATGAATTATTAGTTACTTTATACATGAATGA
ATCAAAATTTTGTTCAACAAAATAAATCATCCATGTCTTAGTTTCTTTGGTATAATAACC
CCATGCTAAACTTCGATCATGTAATTTACCAGATAGCATTCCTGTGAAGTAACCTGACAA
AATATCAATTTTATCAACATCTACATTTTCTCTGATGTATTTATCATTTAGATCAGCTAT
CTTTTGTTCTAATGTATCTACCTTTTTTGGTTTGTTAAAACTATCAATAACATTTTTTAA
GTACTTAAACATAATCATAAATTACCTTTTGAGTATAAACACGGAATAAAAGCGGTGTAC
ACACCGCTTATTGTTCAAATTTGATTTTGATATATCCACCACCAACATTAGGCTGCTTAG
GTCTTAGCCATCCTAGATTAAGATCCATATTCAAAACAAACGTATACGCTGTTACTCCAT
TTTCATCATCAACACTAATGGAGTGCCATCCATCATGATTTTGATCTTTAAGAGAATGGA
TTTTGGGATATAGTTGATTATGATTCAAATCAAATACTGTAACATCTCCAATTGATCTAA
TTGGATAACCGCGAGATCCTAAATGATGGGCTCCTCTGCGGTCCAGTGAAATAATAGCTT
CGTTCACGATAATTACCTCATGTAGATGTTTCCATTAGTATATGCTAATCTATAATGTAG
ATCTCAAATAAAATTTAGTGCAATAGCCCTCCCCGAAGGGAGGGCTTTATGACAACATTA
CCGCTTACTCATTATCGCAACTAGTTCAACTTTAAATAATGCTTCTTCGACTTTACGAGA
AATAGCATTTATTTGAACACGTTTATTATTTTCACGATCTAATGCAATTGTATTTTTTCG
TGTACAATAATCGTGTAAACCCAGTTGTCGCCTAACATAGAAAATAACAATTAATTTCAA
AACACGAATATATCTCATAACGCGCTTGAACATTTTATAAATCCTCAATAATTTAAGGAA
TTGCTTTTAAAGCTTCTTCGCGTTCAGCTAAAAGCTTATCATATTGTATTTGTAATCGGT
TAATTTCCGCACGAGTTAATTTTGTCTTAGCATTAGGTTTCAACTTATGGTTAATATCAA
CGGTAATACCATGGTACCTAAATAGAGCTTCCATTTTGGCTATTTTCTTTTCAATATCAT
CCATAGCTAAAATCCAAAAAAATAATAATGACTAAGGGGACCAGAAGGTCCCCTATATCG
TTAGGCAGTAATAGCGCGGCGGAAGACTGAATCAAACTCTTCCTGGTATGCTTTAATCAG
CTTTGCAGTTTCTTCACAAATGGTATTATTACCATAAAATGCATCTGCAAAAGATTCTTG
CTTACGTACTTCACAACCGAATAGCTCAAGACCATTTTTTGCTAGCTCAACTTTGAACTT
AGCTAATTCGGTCATACCAATTGGTTTGGCCCGCCCTTCTTCGATACCATTTTCTTTTAG
TTTAATATTATCACATACACTGCAATGACGAACATCTTTTTGTTTGTTCTTACGGAAGTT
AGGACTTGATTTAGTTTGTTTTGCAGCAATGTCCATAAAGGTTTCCCTAGAATTTTTACG
AACCGCAGCTTCATGATTCTTTTTAGCTCGATTTTTCTGTTTCTTCTGAACCGGCTTCGG
CTGTACACCCAGCATTGAACCAAGTTCACTCCAGGAAGAAATAGTATTGCGTGACATGTA
TTAGAATCTCCTATATATGTTGATTATATCACATTTGTGATATACTGTTTAAAATGGTTC
GAATATATGAACCACTATGATGGTCAATCATAGATAGAATGGTTCATGAATAACAACCCG
ATAACGAGTGTTATATTGGTTAATTGGAAACATATGAACAATCTTAAAATGCAGTTCAGA
AACCAAATTAAAGAATTCAGCACGCATGTTATCAGTTGAAATATCAAATGAGATTGTATC
ATTAACTGCACAAAGTTCTAAATCAGATGCCTTTGTAATTTCAGTTAACCGACTGACAAA
CTTTTCTTGGTTAGGACTAAGCATTATTAAAGTCTCGCTGTTGTGATACCAATTTGATTT
TGATATTTACCATTACGTTTTGCATAACTAACTTCACATGGGGCATCACCTCTAAAGAAC
ATAAACTGGGCAATACCCATATCAGCATAAATTTTTAGAGGTAGTGTAGTGCAGTTTGCA
ATCTCAATAACGACTTGTCCTTTGAAACCTGGTTCAATAGGAGTGACATTAACAATTGCA
CCTAGTCGTGCATAGGTTGACTTACCTGTGCAAATAGCTAGGACATCATCTGGAATATTA
AATGATTCTACAGTATGACCAAGAATATAACTGTTAGGTGGAATAATACAATAATCACCA
GTCCAATCTACTAAGAATCCATCACTAGGATCTAATGGGTCAATAACTGCACTTGTTACA
TTAGAAAAGATCTTAAAATTACGGGCTAGCCTCACATCGTACCCATATGAACTAAGCCCA
TAACTAATAATCTTTTTACCATCTTTTTCACGGACCTGATGACCAATGAAATCCGTAATC
ATTGGTTCACGACCTTTAGATAAGTCAGTGATTGTTTTATCAGATAGAATAGCCATTTTT
AACTTTTCCTGTTAAGTAATCATCCCCAGAATCGGGCGATGAAGTGAACACACTCCATCT
TTTTAGTTTCTTCCAGGAACTTGAAATAACCATCATCCACACCATTGCTCAAAAATAGCT
GGCGATAGGTTTTTTCCGAAATGACTTCACCATTAACATCTTGATCGAACATCGTTGGCT
TCTGATCATAATCGAAGTTCCAGAGGTCTTCCATATTGAAGATCATTGTCAGTGGGTACC
AACCATCTTCACTATAATAGGCATATGGTGTTAGATTGTCCTGTTTGGAATTGACAATTT
GTGAAAGGCGTCCTTCAAAGTTGTTCCATACTGGATGCGAGTCATCACTGACGAGTGTAC
CAAATCCACAGCCTTTAAGGGTCGGTCGACAGAATCGGTTGGTATACTCGTTATTATCGG
TTAACCAATCCCAAAGATAATAGCAACGGCTAAAGTTAAGAGCCTCGCATGTATGCATGT
CAATGAATTTAAGCACACGTGCACCATCTGAGACACGTGTAGAACGTTTGGTAACTACAG
GGAAAACATCAATACCCATTTTAATCATCCAGTTAACAGAATTTTTCTTGACCAGGGATT
TTACCGTCCATAATCTCTAGTACCCAACGGCCAGTCATCAACTCACGTGCAACATCACAT
GCCACGCCGCCAATCTTCTCAGCTACTTTGTCTAACAGAATTGGATGATAGTTGTGATCA
CCCATTACTGCGAACTTGCTTTCCCGTTCTATTTCAGCAAGTAAATCAGTGTCAACCCAT
TCAACACGCCCATCTGGATAGACGATATTAAGACCATACCACTTACAATAGTTTTCGATG
GTTACAACTGGAATGTCATAAACACCTTTAAAACACAGCGGTAATTTACGATCTGAGTAA
TGAATACGTTCAGTCATTTGCCATTCACCAATTCAAAATAATTTTTCAGTAGATTTTCAG
TTATTGGACGAGTATGTTCTTTAATCGATAATTCCTTACTGTCCATTTCAATTTCATATT
CAGAAATTTGAAATTGCTTATGTGGCACTGAACCATCTAACATAATGACCACATCTGCTA
AGGCTTGATCCACTGCACATTGCAACAAATTATTAACTTGTTGATTATCAGTAAGTGAGT
AATCATTGATGGCTTTATTACGAATGTCGTATAGCCTTTTACTTAAAGGAGTGTTACGTT
CAATATGTTCTGTTCGCCACTCTTCTAAAATCTGATCTGTACTTAGTTTGGATAATGAAG
ATCCGTCAAGTTTCTTCCTAACTTCATTTTCTGAAAATGGTTTATCATGCCAGAATTGAT
GATCTTGTTTCATAGTAAATCCTTTTTTATAATTTAGAAATAGGTTTTAATACCGTATCT
TTTTCATTAAATGGATTATAAACTTTATGTGGATTAATCATCTTTAGTTGCTCATTCTTT
CTTTCTAAATAAGCATCCGATGGTTTAATTGTTTTAGTTTTCCAAAAGTCATCGATTGGT
TTTAACTTATCCATTTCTGACTGTTCGTTATCAAAAGGAGTTTCCCGATTTCTTAGTCGG
GTCGAATTGAATAGGAGTCGTAAACTCCCGTCGTAATTCCTCATCTAAATTCTTCTCTTG
AATTAATTTAGGAAAATGTTTTCTAACTGTTTTAATTGAAGCTATTAAATTGGAATAGGC
TTTTTCTATGGACATTTTTATAACTCAAAATACATTATAAAGACAGTGGCTAAAACCACT
GTCTAATTATTTCCCATAATGATCCACCTATAACTGCACTTAGAAAAAGCATTTTGAATA
TGGGTGGTTCTTCTTGTTCATGTTGCATATCTGATTTATTATTTTCGCTAGCCATTTTCT
TTTACTCTAATGCCCACCATATTCTCTAATTTTCTCACCATCCCAAAACTCATAACCAGT
CATATTGTGATTAAATGGCTTTATTTTAGTAAACCCACTACGATAAATCCAGAAATGACC
AGTGCCTCTTTTTAAGCGGCACTTATACATTTCTTTTTTCTCATATTCCGTGGGAGGGCT
AATTTCTAGAACTTCAAGTTCATCACCCCGTATACAGAATAGCGCTGGTGGATGCTCACA
GGATGCTTTCATACCGAGAACACCTGTTGACCAAACTGTATCACCTGGCTTAATAACAGT
GATGTCATTTGATATAGGTATTACAGGAATTGCACACATATTAGATGCTCCAGAGTAATT
ACCTCCAAAGAGCAAACACTGATATATTCATAGTCTGCTCTTTAGTAATATTTAAGAAGT
TGGAATACTCATACTGGAGATAAACTAATGTCCATTTATACTAATCTCATTGTGTATAAT
AATTCTTTTTGAGATTATCCATATCGTAAGAATCATGTTTGAACTCAAACTTCTTAGCTA
TCTCACTCGAAAAAGCTTGTTTACGTTTTTCTTCTTGTTCACGGATATCGTAAGGACCAT
TCTCTTTAACAAGATATTTTTTATACGGCCCAGTTCCTTGGATATATCCATCAGGAATAA
TGGTTGTGAGATATTTAGCCTCTACCAACCGGATGCACCGTCCATAACCAACTTCATTGG
CATGACGAACTTGGATTAGTTGTCTATTCTTGGCAATACGTTCAGATATGCATGGGAAGT
AAACCGGATCATCTCCTTTTTTACAGTTACCCATATCAACCTTTGCGTACAGAATTTTTC
TATGATTGGCTTCGAAGAAAGCCCGAGCTTCACGAATACGTTGGGACCGAATAGCTTCCT
TAGTTCTGACATTCTTTAGATGTGCAGGTTGTAAAAAAGGATTCATCTTTCGCACGTGAC
GTTGGATAAGTTTTGTCGTGTAATGAGGTGAATCATTAGCCATAGCCAGTAGGCTATTGT
ACATCTCAATCGACATGATTACTTGCTGCGGGTCATTATTGCGCTGCATGCTGATCTCCG
TATGTGAAATAATGCTTTACTTTAAGGTCATCAGGATTATAAATAACACGTTGGAATTCA
TGTTTCTTCGCTAGTTTAAAAGCAGCTTACTTTTCCTTAGAAACCTACACGACTTGCTTT
GCGTGGGCTACTGCAAGAACTAGTATTCAATGCTTCAGCTAAAGTAAGATTATTACCGAC
AAACTCAACTGGATCTAGACCATTAGCTAAACGAGCTGCAATCGCTTGTTCAGCAGTAAG
TGTTTTGAAGGTAAGAATATCGAAAGCACGGCCAGGTCGAACTAAAGCTTCATCAACATC
ACGAAGAGTCGGAAGATTAGTAGAAATGATAATCTTGGTCTTAGTAGATACTAGACCAGC
TGTAGCATTTAATAGCCCTGACATATTACTATTACCATCTACACGTTTAGCCACCATTTT
ATCAGAGTCTTCTGTAATAATGAGTGAATTATCCTCAACACCACGAATAAAATTAGTCAA
ACCGGCGTGGCCAAGTACATCATCTTGATCAGCTAGATACACATTACGATCATTATAACC
ACGAGCCCGAATAATCTCATTGATATAATTAGACTTACCAGTACCAGGAGGACCAATCAA
TAGTAGAACATTAGATTCAGATGCAGCGAATTCAGTCCAGATTTCAGCTGGAGATCGATC
TAGGAATGGATACATTTCCATCATATTTGGATTGTAGTTACGAACAGAAATAACTTCACT
AAAGCTATATAGTTCATTATTTTGATAGTTAACCCGAATTCTTTTAATACTAGGTGGACG
AGTCTGATCAAATACTTCTTCAAAACGTAATTTAAATACTTTGATCAGTTCTTCATTGGA
GTATAATCTAAAGTTCTGACTAGTGGTACCTTCCATTCCATTCATTAGGAAACCAATGAT
TCCTTCATCATCTAGTAATGCAAAACCACCACTAATTCTGAATGCTTTCAGATTTAAAGG
GCTTATAACTTCATCACATAGTTTGTAAATTTGTTCTTTGATGAATTCTTTTCTATCAAC
TCCAAAAGGATAGTGAATACGTAGATCTTCACTATCTGAACTAATTCCCTGTTCATTAAG
AGTATAGCGATATGCATTGGAAATTGCACGGCCATTATCAACCTCCATAGCAATGGAGAT
AAAACGATCAATCCACTTCTGCTGGACTAACGTAAGTTTGCTATTACGATAATTCATTTG
ATGTTCCTTTTCTAATTGATAATCTAATTTGAGACGATATAAACCCTCCTACTAAGAGGA
GGGTTTATTTTGGCTATTATAACTAATTCATTTGAGAAAATTAATTATTATATTCATCCA
TCAATTCAGGTAGACGGCTATCTCTAGGATCTAAGATTTCAGACCAATCAATTGGCATAT
ATGGCTCATCAGATTCATTTTTATTTAACCATTCTTCTAGTCTCTTTACATCATCGGACC
AGTATAGGTTATACATAGTTGGCACATTTGCATCTAATGCCAACTGCCATGCTGTATTGG
TGCCGCCACTAATTACAGAGGTTGGTGTTTTCTGTTCGCCATAAGCAATAATAGTTGAAA
CAGGTTCACGTAAAGTATGACCATGAATTTGAAACACATTACGAGTATGTAGTTCAATAC
CTGTTCTACCTAAACCATTGAAACTTCCCCGAGCTGCACAGGCCATTGCCATAGCTGTGG
GAATGGTATCAGTATATACAGAGGCATCATGGAACCAGGCTAGGTTTTCGATACGTCTAC
CTAAAAAACCATTTCTGATAATGTAAATACGACTTTCTACAGTGTCCCATTTATCAGACT
GAATTGCACCATACCAACCAGCTCTATCTGATCCATATGCATCACCTGATGAAATACCTA
TACCTAGATCAACAAATGTTCTTCCTGAGCGTATCATCAATTCTAGGGCCCATGTAGGGG
CATAGCGACTACCGACAATAGCTGTCATTGCCATTACCTAACCCTCATTAGAAGACGGAT
ATCACCGTACTTAAGAACGGCATTCCGGACTTGATCAATAAACGGTTTAAATTCTTTTCG
CTGTTGATCAGCCGTGAGTGTATAAGTTACTTTGATAGGTTCATTAGGAACATTGCAGAA
AGATAGATAACGCGATACTCGACGTAGATTACGTAGGTGATTCTTACCACATTTAGGCCC
GACTCGTTGTAACCGACCGTCGATGACCTTCCAATCATAATTAGCTTTGAGGTTTAGAGA
ATAAAAACTTTCAGTTAGATTCTTATAATACTGTAATTGTTTTTGAGAGATTTTATTAAT
TTTTGATTCATCTGTTACAAGACGTGGGCTATACCGTGAATAGCAATCTGGTTCTGACAT
ACGATCCCAGGACATAAAAGCATATAGACTCATATATACCGTTTTAGTAACTGGTTTAAG
CTCACTCATACCTTTTAGAATAGCTTCACCACTAATCCATGCATCACAGCGTGGATCATC
ATCATAACTACACCACCATTCTGGTTTCTTTTTCAGGTCATCAGGAACACCATTATGGTA
AGCAAATGGTTTTACATCCCAATAATTGCGAATATCAAGTAGATATGCATAAAGATCATA
ATTCTGTGTTAGTTCAATATCTTCGATACCGATCCATTCATCGTTTACTTTAGCTTGAGT
TTCTGAATATACATAATCACCCATTTTCTTTATTTCCTATATTAGATTAATATAAATGTT
TTATAACAACTATTTCAATATTAAATAACGTATTATTGATTGTTTTAATTTACTACTCAA
CCTGATAATGTGTAATACGTCTATCTATATATCTCTTTTCTCTGGTGAAGAGCATTAGCA
TTATTCCAAGGTAGAGTCCTTATTCTATTAAACATATAAGTAAATAATCCCTCCCCAATA
AAGGGGAGGGTATATGTTATCTTAATTCATGCTTTTGAAAGATCATATTTAACAGCTTCA
TCTTTCATAGGAGTCAATACAATAGTTACTTTCTCAAAACCATGTGTATCCCTACCATTA
TAAGAAATATCAATATTCTCCCAATCCTGATTAACTACTTCAGTTTGTAGAATATTTTTA
ATATTGATAGCATCTGTCTTATCAAACCATTTAAAAACCTTTGGGTTAAATACAAGTTCG
AAAGTAGTTTGATATGGATAGCTTTTCTGTTTAACAAGCCTACTAGATGCTAGTGATGTA
TTCTCAACGTTTCGAATAACATCAATCATTGCTTTACGGATAGTAAGTAATTTACTTTTC
AGAACCAAATCAATAAATGCTGGATCAGTTGTCATTACTTCTTTTACAGATGGAAATGTG
ATTTCCATAGCATCCTCTTATAGGTTAATTATTAAAAGATAAATCATAATCACTTTGTCT
GCGATTCGGATTAACAGGATCAGGATATTTTCCAGTTTTGATAACTTCTTTTATAGCTCT
AAAATCACGTTCTAGAAAATCTAGTTTTTTAACTAACTCTTTTTCTAATTCTTTATTGAG
TAGTCTTCTTAATTTGCTCATCTACGTATACTCTTACAATGAACCAATTGATTAGGCCAA
AACCTTTTGGTGTGATGGTAATGTCATCTTTATATCCATTTTTAGTGATTACATTACGTA
ATACTTTAATTGCTTCAGGTGGAATAAGATTAGCATTACCGGTAACACTATACTCGAAAT
AATAACCTACACCTGGTAAATAACCTGATGCAATCTGGTTAGTACCTGTGATATTACTAA
CGTGTTGGAAGTCACTAAAAGCATTCTTGTAGAATAACAAAATATTAGGAATTACTTCAT
CCCTAATAGTAGAACTAGTAATGGCATCCGCCGATGGAAAATAAGGTACTAATTCATCTG
TTACATTGGTGCTATTAATATCGGACATAATCTTTTCCTCATTATAAAAGGATAAATATC
TTTATGGTAATCCTGTAATATAGATTTAAATTAATTTATAATGAATGGCATAAAGGAGCC
CCTGGTGGGCTCCTTTAATGTAATAGGTCCGACCCCTATCTAGAGGTCGGTGAGTAGCAA
GGCACCGTAGTTGGGGTTCGTGTCGTTCCTGACGATACTTTAGTACCCCGGTTTATTTAC
GACTGGATCACCCCCTTAAAGTGCAGTGCGTTTTACGCAAACTGCCTTGCTCTATATCAT
TGCACTGTGCGTATTTTTATTCGTTAGCTAATCTTATGACTTAGAGTTATATTTACATAC
CCCTTAAGGAAAAATGCAATGATAGACTCATTTAGGAAGCTAATGGGCTCGCTATCAATT
ACTGAAACTGATCAAGAAATTATCATCAGTGGTTTTGATGGTGCTGCATTCATTAGAGAT
ATTAACAAGTATTGGCGAACCACTAAATTAGCTACGCAGTTATTTAACACGGTTAGTCGT
CGTAGTATTTCATTTTATAAATTCTTTGCTCCTGAAATATATTACATGCTAGAAGCAGTA
AAGAATTATAGAAGTAGATACATCTCTATTAAAACTGTTAATGCCATCCGTGAAGCAATG
CTTCAATATACCTGGTTAAAAAATACTCGTCCTGTAGATACCAACTCTGTACCAGGTAGA
CTCAATTTCAAGATGTTAGACAAATTGACATTTACACCAGATGAGTCTCAAAAAGCTTAT
TTTGAAAATTATAATTATCGAATTGACCAGTATGGTTTACGTGGTGATATTGTTGCAGGT
AAACCTGGTACTGGTAAGACATTCATGACGATGGCTATTGCTGAAATGGTTGAGTCGGAT
ATCATTATAGTTGTTTGTGAAAAGAAGTCTATTGATCTAATATGGAAGCCATCTATTATT
GAGATGTATAAGAAAAGACAAAAAGTATGGTCGACCATTGATGATAAAGCCTACAACGGT
CAAAGAATACTTATATCCCATTACCAGGCGCAAGATAAAATAATTGATCTATTAAGAAGC
GGTATATTCAAAGGTAAGAACATTACGGTGATTCTGGATGAATCACACAATATGAACGAT
CCTAATTCTGCACAATCTCTTAAGTTCCAGCAAATATGTTTTATGTCTAACTCTAATAAC
AGATTATTAGCGTCAGGTACCCCTGTTAAAGCACTTGGTTCTGAATTAGTAAGTGCATTA
AGAGTATTAGACGATCTCTTCACCAATGAGGTTGAAGAACGTTTTAAGAAAGCATTTGGA
AAAGAGACACAGAAAGGATTAGATATTGTCCAACATCGCTTTGGGTTAATTGCGTACGTC
ATTGAAAAGAAAGATACTGAGGTTTTACCACCGAGGATAAAAGCGTATCGTATCAAGATA
CCAAATGGATCACAGTATACTCTTAATGCCATTAAACGTGATTGTGAAGCTTTTATTAGA
GAACGTGTAAAGTTCTATGCTGCGCGCCGACCAGAAGATGAGAAGTATTGGGCTAAACTA
ATGGCGATACACGAGAACTCTCTTAAGACCCAGGCGCAGAAAGATGGTTTCGCTCGCTAT
AAGAATTTGATTAAAATAATTCAGAAGAATCAAGACCCGCGATACATTGGTGAAGAAATT
AAAGAATCTAACCAATATGAAAAAATGTTTATAGAGCCAACTTTACCTCGTAATGAAATA
GCTGCTTTTAGAGATATTAAATCAGTTATAAAATACGTTATGCTAAAGATACAAGGTGAA
TGTTTGGGAAGGGTTTTAGGTGCTAAACGCATTCAGTGCCATGTGGACATGGTACCGTAT
ATTGACTGGGTTGGTATCACTGAATCAACTATGAAGAAAACGATTGCATTTACATCGTTT
GTTGAGGTTGTTGATACTGTTGATAAGTACACCAATAAATTAGGTATGCATCCGGCGGTG
GTGTATGGTAAAACCAATGACAATTTACCTCAAATAATCAGTAGATTTGAGAAAGACCCT
AAATTAAATCCATTGGTAGCTACATATGCTTCCCTTTCAACAGCGGTCCGTATGACGATG
GCTGATACTATGGTGACAATTAATTCACCGTTTAGGCATTACATTCTAGAACAAGCTATT
GCTCGAATTTACCGTAAAGGTCAGGATTCACAAACAGTCGTATATCAATGTACTCTCGAT
ACAGAAGATGAACCGAATATCTCAACAAGGTCAGATGACATTCTAAAATGGAGTCAGGCA
ATGGTTGAAGCTATTATGGGTATTAAATCTCCATTTGAGATCACAGAGTCATTAGAAAGT
TATGTTGATAAAAATAATAATTTTGATGAAAATAAAATCATTTATCAGATGCTAAAAGAA
TCATTTGAGAAGTATGATATCGCAATTGATTTTAATGACTTTGATACACGTATGTATAAA
CCATATCAGCCCGCATATATGCGGTTTTAAAGGAGACAGAAATGTCTGATCCACATTCAT
CTAATACTGGTGAAGATCTTATTCTTGGGCCTGAAGCCACCAGTGAAGAAATGTATAATG
CGATTTTAAGGTGGGTTGACAAAGTAACAACCATCCTAGAATCTGGTGGTGGCCCTGGTC
CAGGTCCTAGTACTGGTTTAAAACCAATTCTATTTCAAACTGGTACATTAAACCCAGGAG
ATGTAGTTACTTATGATCTTTCCAAAGTTATTACTTCTATGGGTGATTATACTCTGGCTA
CAGCCATCGTTGATCTCAAGATTATCGACCCTGAAACTACTAGTCCTACTAGTGGTAAGC
TTATTAGCGCTTCTGCTAGTATTGGTTGGGATCTCGATTCATCTACAGGGATTTTAAATA
TCCGTGGGTATAGCCTGTCTGTACCAATCACTTATTATATTCGAGTTGACTCACCTATTA
AGACGGCTGATATTCCCGTGTATACCCCGTAAGGAGTGAGAAATGCCTTCTATTGTCCCG
TCGCAAGTGCCGGGTCCTGTGGCACTAAACTCTAAAGTTAAATTTAACTTTAGTTCAGAT
ATTCAGAAGGTGTATTATACAGTGAGCCCGGAGTTACCTCCGGTGCTCTCTGAATACATT
GCTTATGATGGTGACCCTGCAACAGGTGGTAGTCCATTTATTGCTGTTGTGCAAGATGGC
ACTGGTAATGTTCTTTATGATTGTAGTTTTCCAAAATTCTATAATTTAAACTATGATACT
TACCAAATTCCGGCTAATACAACAAACCCTCAAGATCTATGGGGATGGGTAAGATATTTT
TATAATGCTATTGGGTTTATTAGGAATGGTAGTAAGTACGAATCAACTGGAAAGAAATTC
TTAGTAATCACAGATAGTAATCCTAGTGAACCTTATTCAGTCCTCAATACGTCAGGTAAT
GGTTTTAAAAAGATACTAGATACGGCTGCTCGTGTACAAGATTCTACCTATGATGTTTAT
TACCCAGAAATGATGGGTGGCACAGTAGACCTTACTTTAACAGATCTTAATAAGTATTAT
GCATGTATTCTATTCTCTACTAAAGATCATAATACTGGTGCATTAACTCCTGAAAGAGTG
AGTCAGGCGACTATTGATAATCTAGCTACTTGGCGTAAATCGGGTAATGGTATCTTTGTT
ATAACTGATTCTGCTTCAAGAGATTACACTAATATTGAAGATGCTAAAGAAAATAATGGT
AGTTTTGCATTTACCGCTAATAGACTAGCCTTTAATTTTGGTTCTTATTTCTCTGGTGTT
GTTGATAGGTCAGATGTTCAATATACTGTAAATCAGATGCTAAGCTGGTCACCAAAAGCT
GCATCATCTGGTTTGTTTACAGGTATGAATAAATCTATTGGTAATGGTCAAGTAACTGAC
TTTGTTATCAAAGGTGATTCAAGTGAAAGTGAGATTAAGCTTGTTACTTTCCCAGCGTAT
AACAAAGAAGATATTCCTGAATTTACCTTCGATCATACTGGCGAGTACATTTACAATTTT
CTTTGTACGACATCTGAAAATCCTAATAAACCGTATGCTATTTCATTTAGATTCCAAGTT
GGTGTAGATGATGGTATCTTTGTTGCACGTGATAATGGCCAAGCTATTGATACTACTCAG
ATACTAACAGCTAAGCGTTATTTTGATCTTAATCTAGGTTACTCAAATGGTACTGACCAT
CAGGATTATCTAGGCGATATTCAAATAAATGGCTATTTAGTTGGATCATTCTTATTTAGT
CAGGGCATTACTCAGTGGGATCTGATAACTCATGGATCAACTCTTTTAATCCATGATAAT
GATCAGATACGTATTAACGTACGTGTACCTTATACTTACACAATGCAGCATCAAGTGGTA
CTTAGTTCAAAACCTGCTTCTCTTTATAATGAAGCATCCCTTATAGGTACAATGGCATGG
GATGATTATAAAGGGATAAGTAAAGCTAAAATTTATGAATATATTAATCTTAGCATGACC
AAGTATATGTATCGTGTAGCGAATGCATATAAGAATAACATTAATATAAAACCAATAGTA
TTGACTGCATTACGCCGTACATTCCTTGGTGAGACATTAAATACAGCTAATGTATATGTT
TATGATAATAACTCCACATGGGGTAAACTATCACAACGTGTCCAGAACGGACGACATGGT
GATATTGTTATCTTTGCAGATACTTCTAAAGTTGTCCAGTATGATGAACTGGCTTCAACA
CCTGGCTGGTATGTAATGAAAGATCCAGGATTAGCTGATGTAACAGTAGCTAAACTAGTT
CCATTCTTTGGAAATAACCGAGCTATTAAAAATAGGTTAAAGACTGGTGACATTCTTGAT
GAGACCACTGGTCAACCAATTTCTTTCCATGCTAATTGGAAAATAGAAAATGATAAACTT
GTAAAAGTTTAACGGCATAAGCCCTCCCGCAATGGGAGGGCATTATGTTGTTTTAACCAC
GCGTTATATTAAATAACCGTCTTTTCTGATCAAGTAATAAAATAGCGCTTGTGGTAATTT
TAATGTTAAACCTACGTTTAGCTAAACTCTGAGCTACTAGTTCAATAGCATCAACTAGAT
CGATTGATTCTATATCACCTGTATTTTTAGATTTACTAATTGGTTTACTAAGAATTTTCC
ATCCCTTAGTAAAATTACTAGCTGATGGCTTTTGACCTATCTTGCTACGAAAAAATAGTC
CAACTAATTTACTAGCCAGTTCACGTGGATCATTAAAATCTGCTTCTGGTGAATGTAAGG
TAATATTACTGTTTGCCAGGAATTCATGGTTCTCCGCACGATCCTCGATAGTTTTAGCAC
GTGGATCAAAATCCCAACAATTAACAGTTATATTTACGTCATTACCATTACGACGTAGAT
CAATACATCTAACGAAATCAGTCATGTCAAACTTACGTTCAACATCACGCATGCCATTAG
CAATCTTCTCTAATTCATCGTTATCAGTAATACCAACTTGCTTAGTAATATCAAAAGTCA
AATCGGCTAAAACGGATTGAGGAAAACTGGTTGCGATCAGCAAACGCAGTACGATTTCTG
GACGACTTTTTCTATATTTGTCGCCTGACATCTTCTCAAAGGTGTTAGTCATGATGGCTA
TCCCAAAAAGGTTAGTTCACACCATTTAAACGCTCCCAGTCATCTAGAGTTGCACGAGCA
TCAAATAGTGCGTTGTGAAGCATTTTAGAACCTTTTCCACTTAGCTCATGATTTAATTCA
AATATAGTTGGTAACTCAACAACTTGTTTACCTTTACCCATATCCATAGCTTTACCAGTG
TAAACCATATCGTTAACATGATTAGCTATAAAATGTAATCGAGCAAACTGACCAAGAAAC
TTGGCTAGTCTATCATGGAATTCTTCTAAAGAGATTGGTTCTTTTTGAAGAATAGGAATA
ACGTTTTCTTTAACCCATTCATCTTCAATATTGTCATATGGTAGAACTTCGTAGAATTCA
CAACGTCGATCTTCACTAACAATACCGAGTGAAATAAGAGTACCAGTAGGCGTATCAAAT
TCTGTATCAACAAAAAGTAACATAGTAGTTTTCCTTGTACGAAAGTCTTATCATAACAAT
AATGCACTTACGTCAAAAAGAGAGAACCATCATGGTTCTCTCCTATAAAAGTATTAGACT
TTTAGTCCACGAATATTGAAGATTATTTGACAAGCTGCAATTATTCTATTTCTAGAAATC
TTTACAGGAATTTTATAGTGATTGAGTACAGCTTTAGGATTCTCAACACTCATCAATTCT
TTAAGTAATTCGTCGCTAATTTTATTATGTGTTAGGACAAAGGTTGCGACATCGTGGTCC
CAGCATCGTTTTATTGCACTACAAGCACGAATATACTTCTCGGCTAATTCGGGGCTAAAA
TCTAATGCTTCTAGCCATTTCTTACGACCAGCAGTGTAAATCACTCGTGTACGAGTATTC
GATGGGACAGCTACAATATAACCTGTACCTAGTGTCCTACGCTCTTCAATGGGTCTGATG
TTCCAATCACCAATCATCCTAATTAATGTAGATAGATCATCATTAGCACCATAGTAACCA
ATAGGTAAACCTAAACTCACTTGTGTATCTATCTGGTCTACAGTTTGATGTGTAATAACC
ATTGTAGTTCTCTTCCCAATAGGGTTTTATAAACTTCCACAAGACTAAACTCCATTATAG
CCCTATCAGATTGGGTAATAAAACTTAACAAAAAAAATATTAAACATAAACCCTCTCCCG
AAGGAGAGGGTAATATATAACTTTAGCCGTACATTACAAAAGGTACTTCATAAACAATTA
GATAAGTATACATCAGTTTAAAACCAATGTGTAACCACTGATCTTGATTAAATGTAATTT
TATTATCACATTTTAAATAATCAATAATGCAATGAGCAATTGTTTCAATAAGTCCTAAAA
CTAATGAACCAGTGATGAAATAAACTGCACCGCCATGCATAAAACTATGCGCGGGTAATA
CCCATTTCCAATATAGAGAACCTAGTTCAGTGGTATGATCTTTAGCCTTTGCAATAAAAT
CATTTTGCAATGAAAAATCAAAGATGAAGTGTGCTACAATTAAACCAAAGAATAATGCCA
TTGAGCTGACACTGATTAATTCCATTTTATTTCCGCCTAGAAAGGTATTTCATCTTCAAC
AATGTGTGAATAGTCGATATTATGTTTTTTACATAATTCTTTAAACTTATTTAATTTAGT
TTCAGCTTCTAATAGATCAGAATGTAACTTTGTCTTATAGTTTTTACCGAAGTCAGCTGG
GTTGAATACGGAATTGTAATAAGCGTGTATCTCAGAATATTCTTTCTTTATAAAATCAAT
AAATTTTGGATCATTGCCATCACCAAGATAACTAATTAAATGGCCTAGATCATAATTCTG
TCGCCTAGCTGCTTTTAATATAAGTTCATTAATCTCAATTAATTCAGACGTATTACACCG
CCTTCTTTTAAAATATCGGATAACTTTATTAAATAGCATATTAAGTAATCCCTAGCCATT
GTAAATATCCACTATCACTTAATCCACGATAATAATCATCTTTATTTTTACGTAAATAAC
AATAAACTATTTTACCCATTAATTGATAACTAGTTTCATTATCAAAGGTAAATTCTTTTT
CTAATCTATTATTACTATCCACTAATGAGATTACTACATTACCGTAACGTACTGTTAATT
TCACAGTTCTAGTGGAATCAGCATCATGAAAGATATAAGTCAACCCATAATTCAATTCAT
TATTTAATACTTGAATACTAGTAGACCTATCAGATTTAATCTGAAGTGGATGTTCGACAA
TCGCCTTGAATGCTTTATTGCATAAGAGAATGTTTTGTATTTTTAATGAATCCATGACAT
TACCTGATTTAGTATTTATAATTTACCTATATCGAATTAGAATTAGGTAATAGTGGGTTG
ACTCAGTAGTCTTCAATCTAATCAGATCAGTGTTTAGACTGAGATTGAGTATTAAGCTGT
AGTGACACTTTAATCAATGACGTATTATGGATTCCCGGCAAGCCAGTTTACTGCACATGT
TGCTGCTTCATCAAATTGATTCAATGAGAATTTGGTTATCCGAACAGCCTGTGCCATATT
AAGAACTTTAAATTCACTATCACCAGACTCAATATAAGATATCATGGCATGATGATCATT
ACTAGTATCATAAACTGCAATGCGGATATCCTTGCCCCTTTCAACCACATATGCGATAGA
TCGTTTTGTTACAGGGTTATCGATGACATTAACTGTTTCACGTAATGTAGCGTCAATCTG
GGATGCATTAATATGGGTACTAATAGCATTCAGCAAATAATGCTCAATCTGTCGCCCTGT
TTCAAGAGTTAGAGAACCCATTGTAATCTCCTTTTAGAATCCAATATAATCTAGGAACCC
ATGGTAATCGAATGTTCGTGTTGGGATACTTGTATCCGAAAAGAACGTATTTATTTGTTT
AGCTAATTCAGTATGGTGATGTGAATTATCTTTGTTAATCTTAGTAACCACTTTCTCATC
AAAGAAATAGGTTACGCACATATTTAGTGGTTTATCTATATTGATTTCAACAACTACCTT
ACGAACCGTATCCTCAGACAAGAGTGTACACTTAGCGCCCCACGGTGAAACCTCTATTTT
AATATCTACATGAGGCTTGAGGTTATCATGATATTTCGTGAGTTCCTTCAATACATCATC
CATCGTTTGGATGAGCTTTATATTGGTAATATTCATTATAACCCCTCATAAATATCCTTT
CGTTTTGGATTTATGCCTGCAACCTTGCCTTTACTATTATCGATGTAACAAAGGTATTCA
TCACAAATGGTAGTCTTTACAAAAGGAATCAATTGGTTTAGTTCCAATAGAGTGTACTCT
TTACCCAAATATTTACACATCTGGGTCAATGGACTACACATCACATTATAAATTCCCTTA
GTATTTTTTAGAGAGAGGTATTCGCCATCAATATCTCTATCATTATTTATCATGTAAATA
TCACGAATAGGATAATTATCTTTTAATGGTCCGTTACCAAACTTAACACCATGTACACCA
TTGGGTCCATTTAGTAGATAATAACCAGTTGGCACAGACCAATATGTGGTGCCTTTAAAT
CCTGAAAGTAAACCATACGGCTCATGATAATCAGAAGTAAAGCATTGTTCATCATTACAG
ATGACTTCTTGATACATCGAATAATTAACAAGAATCTGTTTAGTTGGATCACTTGGTTTA
ACTAATGGAATAACTGAATATTCTGGATAACTAGTCCATCCGCAACTACCAAGTCCAGAT
TGTTGGTCGAAGTTACATGGAGCAATTCGCGGAGTATGATTAGAGTAGAATAGTGGTACA
CCATAAAAAGCAAGTGGTTCGTAATTAACACTAGCTTTAGTACACATGCCGATACTAATC
AGAAATACCGCACAAAATACACGCATCGATAATTTAAACATCAGTGCATCCACCCTCGGT
TTCCTTAATTGCCAATTTTACTAATACATTAACCCATGCACCTTCATCGAGCAGCCAACC
AGCAGCGCCTGTACCATGCTCGGCAAATCCAAGACTATCTAGATAATGTAGCATGAATGT
AGTTGGACCAAACCCATATTTCTTATTACATTCATTACGTTTAGAAGTATTCCGACCTTG
GCGATATATATCCAATACATCATCAATATAACGCAACTCCGCTTCTGGATAACCACAGCC
ACACAGGTTAAATAATTTGCGTGTAATGGTATTGTATGTATCACTATATTCTTTTTCATT
ATAATCAATGAAAGAGCCTACCCGTTTGAATAGTTGCTTATCGGATGCTAAATCATCAAA
ATGACCAGGGTAATCTTGAGATGGAAGTGCACCTAGCGCCATTAGTATAATAACGCGCGG
GTCTTTACGTTCAACTGATTCAATGAGTACTTCAAAGTTAAGTTCTCGTTGCACCACATT
GTTATTGCTGTTGATATTATTCAGCAGAATGTCCATAGCTTCTTGACCATGCCAACTACG
GATGTTAGGTTGGTTATTAGTATAACCAGTAATGGTCAATTGGTTAGCTGTATTTGATTC
ACCAACAGTAACATGTAGGTAATAAGGACATTGTTCTAATTTCTTAGTAATGCCAGTTGA
AGATTTATTACCCTCAAGTAGTCCAATATCGCCATGACCGATATACAAACAGATACCTTC
AGTAGAAGGTTGAGTGGTGTAGTTAAAGTTCAAGGATTTAAACATACTCTTTCCTCTATT
ATAAATGATTAGCTATTTACCGTTTATATAAAGATTAAATGGACATTGACACATGAATTC
CGCATTTAGAATACTTTCGATATTGTAACTAATTGATTTATCAGTGATGATGTTGATATC
TAAATGCCATGTCTTAGTATTTTGAGTAACTAACCTGTATTCAATGTCAATACTAAAACC
TGGTGCATCAACTGGATCATCATCTCCTTCATTCTGATGGATAAAGTATGAAGATAAAGT
ATACCTGGCTTTAATATATTCATCTGGTTTTATAACTTTTAAAGGGGCATTGATATGTGA
AATAAAACCATGATAATTAAATTCTTTATCCCTAATATCGATAACTTTAGGAGTAACCGA
TACATAGGCTGGCCATTGTGGTAGATCTAGTTCACCATGTTTAGATTGGTCTTTATCGAT
AATGTGAAAAGCTCTAACAATTCTATTGAACACTTGATATACCTTTTAACAAAAAAATTA
TAAAGAAGAGTCCCCGTAATGGGGACTCTATTATATCGTATTTTATTTTTTATCGCGATT
AGATGGTGCTAGTTTATAAAACTTCCGGAATTTATTAATAGACAATGTAAATGAATCTTC
CCTACCATCCGGATAACCAAGATAAACATCTCGGCGAGAGAGTTTAATTAGCTTATGCGC
TGTAGACACGCCATTTCGTTCGACTAGAAAAGTACGACCAATATAATCTTCTAGGTTATC
TAGATTAGTTGCAGGGATGTATTTAGATTCTTTCAGAGTCAGGGTAGTGCTCATTTAATT
TCTTCACCAATTACGAAATAATAAATTAATTTTATTTCCAGAGTGTTTTACCAATTAGAT
CATTTTCTGCAATGAATGCATCTAATTGATGTCCATAGTAAAGTAAACTATGAATTTGTT
GATTTAGACGTTCTTTATTTGAACCTAAGAACATCTTGTGCTTTTCACTATCAGGTAGCT
GATCGTAAACTCGTTGGCAGTACTTCTGTGCCACAACCTTACCAGATGCAAGGAAACGAT
CATCACCTTCGAATAACTGAGGGATAATATTTTCATCAAGATACTTACTGATTTCAGCAT
CTAGATCAAAATTAATAGTGTCATCGGTTGTTGCGACAGTATCTTCTTGCTGTTCATCAT
TCCATGGTATTTCAGAACTTACACTATCATCAAACTGATCACTAGTTGTAGTTTTAGCTA
GTTGTTCATCAAATGATGATTGTTTATTTTTTTGTTTATCACGCAGGAAAATAATTGATT
CAACAATCTCATTAACAATGATGTCTAGATCGCGATTGGTATCTACAACAATTGAACTAG
GTTGATTAATTAAGCGTCCATAACCTTCATCTACTTTATTAAAGTAACTGGAACCCTTAG
ACTCATAATAGTCAAGACCTCGGTCGCGCATTTCAATTCGTTTTTTACGAACTTCTTCAG
GAGCAGTTAAAAAGAAAGTAGCCGGTTCTGGAATAGAATGTAGTGTTCCTTGAAGAATAT
CCATAAATAGTTTTGATAGGTATGGATTAGTTTCTTCAAAAGGTACTACATTAAGAGCAT
AAGTAGATGCAATGAAACGTTCAGTGATAACGATTTTATCATCTTTTAAAGCAGGTCGAA
TAATGTTTTCTACATTAAGCATCCTACCTGCACTATGCATCAATACATCGAATTCTGGCG
GACGAACTTCATCTTTAAATTCTGGCCAAATTAACATTTGTCGAATCTTTTCCGATGTAG
CTGTACCACCTGGTTCACGCATTGCTACTACATCGTAATTGCGCTTACGTAGTTCCTCAA
CAACCATCTTTGTAACAGTTGTTTTACCAACACCTTCAGTTCCTTCGATACATACAAATA
AACCATTCATTACTAATCCCTCATCTTAAGTTTAATTACTGCTTCAACATTATCTTCTAA
ATCTTGTTGCGATAATTCTAATGAAGCTCTATAACCTAAGCTATATAGAACATCAACTAA
TACATCAATGCTTAAAGCTGGTAAATTAAACATTTTAATATTCTCACTAAGTTCATCAGA
GATGCCTAGTTTAGTGAAAACATCATCAATCAATACTTTTTGAGAAATGGCTTTTTGACG
GGCAGTTTGTACAATTGCAATAACTAGATTATATTTGATATTGTCAGAATGTGATTTTTT
ATTATCACCATGAACTTCTTTAAATAAATTCTGATCCGCCATAATACTCAGTTCCTTAAA
TTATTAAAATGTACTATTTAGCCATTAAACTTTTTTTAATATAAAAAATGACCAGTGGGC
AATGCACCCACTGATCTTATTATATTGAAATAGCTAGTATATATTAGCTATTGACATCTT
CAAAGAAGCTGGCTACACTTTCAACAACGTCAGTCATAGCGCTACTCTTATATTTGGTAT
CTACAACTGTTACAAGAGCACCACTGCGATCAATGATACCAGAAACAGTTGCACCGCCTG
CATTATAAGAATAACCAAGCTCAGCAATGCTTTCATTTTCTTTCATGTACGGTGCGGCTT
TTTCAGCAAATACATAACTTACAGCCGCTGCTAGTTGACCTGCACCTTCATGTACCTGCG
CATACTGCTCGGCAGTAACGCCTGCTGGTTGAAGAACAACTTCTTCAAATAGACCGTCAG
GGATCTCAAATACCCCGGCATCAGACATGCTTACTTTTTCATTTAGGTTGTGGGTTTCGA
TAAACTTCTTGGTGGTTTCGATGGACATTTTAGTACTCTCTCTATTTACGGTGGTGGTTT
AATTTACATCTTTTATCACAAAGCAACTACCATCATTAAAGACAACCTTAATTAGATTAT
CAGTTAATGGTCGTTTATATACAACACATTTTACATCGGGGAGTTTAACTACTTCTTTTA
AAGCATCTGGCATACCAATTAGATTAATGGTAGTTAATACTTTATTCAGTGGGCCAAGAT
GTGAAGTCAGTTCTTGCGCTGACTTAATCAAATCTACCATTGTTTTGTCTTTATCTACCA
TGCTAGTTACTCGATTTGATATATGAAGTACATACGTCACCCAGGTCTTCACCAGAGTCG
ATCATCTCACGAGCATCACCGATGGGAGTACCAGGGTGCTCACGCTCGGTTGCTTTAGCC
ACGTGTTCAATTGCAACTGGAGACCATCGAGCGGCAACAGCCTCACATACACCGATCGAA
TTCACTCTACGGATCATATGTGCACCAGTATCAATTACACTGAAACTGAGTTCACTAATA
ATTTCCACTCCTTTTAGTTTATCGATACTATCAATAACCTGCGTACTAATTAGATAATTA
GCTGTATCGTTATTATACGCAAGCACTAGTTTGAAACTCATTAGGGAGTTATCTTTATCG
GTGTCCCCAGCGATTAACTCATGATTTGAAGTGAGTGTATAGATACAACTACTCTCCTGA
GCAGTAATTGGTGATCCTGGTGAAGAACTATATACACTAGGTGCATTAGCTGTATTTAGT
GCAAACTTATTTACAGTGGAATTAGCGCCAGGAACTTTATAACCAATAGGTCTGGCAGTG
AAAATTACAACGCTCATTGTGATTCCTCTTTACTAGATAGATGGTTTCCTAATTACACAC
TAGTAATATAAATCTCAAATTTTTTTTAATACGAAATAAAGCCTCCCCGAAGGGAGGCAT
TTATGTCAATTACCACTATAGGTACCTTCAGTACCTTGTTCTTTACGTCTTACGAGGCGT
TGATGAATTGCACTAAGAGCACGGTCCATTGAATTAATCACTACCTGATTCTCTTCACAT
GCAAATGGGCCTGCTTGATAACCTTCAAATAAATCTTTAACGATTTTAAGTAGACAGTCA
GCAGTTAGGCCATTTACACCAACTTCTGGAACAAGTCCATTCTGCATTAGGATAACACAT
TCAGTCAGATTATCACCAGGCATAGCAGCTGGGTTAGTCTGAGCATTATAACCAGTTACC
ACATAACGTTTAGTTGCACCTGATTTCTGATCAATACCACTTGCTTCAATATTTAGACCA
TTTTCATCAAAATGTTCATGGCCATAAATACCTTGCATAGTTACCCATCCACCATCTTCT
TGATAAATCCAATCTACCCCATTTACATGATAAGTATCACCTGGTTCAGGGTCAGTTGGA
AGATCTTTAGTAGTGGTTAATGCACGGATACGCGCATATTCTTCAATTGCAATTTGTACA
TCAGTTGCAGTAATTTTCTTCTCAGGTTCAGTAGCTTCATCTTGTTGAGACTTATCGCTA
CCTTCCTTTTGATCATTATCCATATCGGAAGAATCTACTGTACTTTTAGCTTCTTTACTT
TCTAAGGAAGCTAACCACTCAAGATTAGGTTTAGACATACTTACCTCAATAAATGAAACC
ACCAATGTAAAGTGACACTACTACATCGGCAACCCGAGGGTCTTGTGAATATTTAGATTT
GACTAGTTTAATAAGTTCGGCTCGATTTTTAATGAAGCCTAGTTTCTTATTATCAATTTC
TTCAGCTTTAATTAGGAAGTCATCTAACTTCTTCTTACTACCCAGTAAATTAATCACCAT
TTGATCAATAACTGCATTAGAATTTGATAGTTTAGTTAATTCTTGTTCAAAAACTTCCTT
ACGTCCTTCTGATCCAATTAAAGCTAGACCGATCTTTTTAAGTAGAGACATGTTAATTAC
CTATTACATTGGTTTAAGAATGGTTACAATAAATAACTATTCCAAGTATTTAGAAGCGAC
CAGTGGTGTTAGCAAATGCGGATAGTGCACGTGCTGGTTCACCATCAAGAACCCAAGATA
AGAAGTTAGATGGGCTTCTCCAGTTCTTAAAGGATTGCGTAGCTCGTGTTATATTTAGGT
TCATACGTTTTCCAACATAATAGAAATCAGACCATGACTGAGATGTCAATGTGGCTGTAT
AATCTTGGAATAAACTTTGTTCATCCCATACTGAACCATCAGTTAATGCTAGACCTACAC
CAATACCACGATCACCATCTGCACCAATCCCTTCTGCAACTGCTTCACCAATTGTTGCAC
CAGCTGCTTTAAAAGCAGTGTCAATAATCGAACCGTCAGCAAAACCTGCCTTTAGTGGGA
TGTGCATTATCTTAGATAGATCTTTAACGTTTATTTGAACTTCACAGTTAAGCATGTGAT
TTTCAGCATTCCAACCAATATTACCAGTACCCCTTCTAATGGTAATTGAATCAACAATAC
CTAGTTGACGCTGTACCCGTCCTTGATGGAATATCTGACAAATAAATGGTGATGTATATG
CTGACCTACCAGCTGAACGAGGAAGCCCCATCGGTAAGATCATGGCTAATGGGATAAAAA
TATCCAAGAAGCGCGACATCACATTGCCATAAGGACATACTAAAGGAATTGTGTAAGATG
CTGTTGGCAATGAAGCAACTGAATTTTCCCAATGCTCGGGTACATCAACAAATGCGGAAC
CCGCTAATGTAGCCAACCCAGCCATGTTAACTGAATCTAAAGCACCACCAATGAAATCCA
TTACGCCTCTAGTAACATTACCCATCATTTCAGTAACATTACCTTGCATAAAGTTAAATT
GAGCAGCTCGTCCTTCTTGTACTTTACTATTTAAAGTTTGAGCTACACCAATGTCTGTTG
TGGTATTGGTAAATGATTCAGATACTTCTCCATTATGTTCAACCCGGAAAGTTACAAATT
GTGAACCATCCCGCTGAGCGCCAACTACGAAATCATAAACATTTTTCAACTTAGACCATG
ATGAAAAGTTTTCAGAATCAATTACACCAGCACCAGGTTTTCTATCAACTTCAATATAAC
TTAATAGATAATCCCGCGCAGAAACTTTTGAGTCGCCATTATCTTTAAAAGAGCTACGAA
GATAGTTATCTACCACATTATGTAAATCATCTTGGTTGCGTGCTTTCTCAACCAATGTAT
CCCATATCTTTTTGGCTTCATCGGATTTACGCTGTGTTCTACCTGATAAAGACATTATAT
CAAAAGAACCATCTTCCCTTATTAATCCAGGGAACATTCGATGGAAGTTAGCTAGATCGG
CAGGGGTTACTGTTTGACCAGGTATTTCTAGGTCTTTCTGAATACCATCGAAAACACGTG
GTCTAATACCTAAATTAATAGCAAATTCGTTAGCTAATGTATTCACAGCTGACCAGTAAG
CATGCATAGTCGGTTTAAAATAATACCATTTAGAAGGCTGTGTTTTGGCTAGAAAGTTAA
TAACCCTATTTGCTGCCGTGACTCCAATGATAAATGGCTGTAATGGCAATGATACTAAAT
AACCGGCAGCATTACCTAACTCGTACCAAGCTCTTGATGTTGTACCAGAGTTAGCGAATT
GTGCAGCTGACCGATCATAGAAGTTTGTAAAGAAACTAGCCCAACTACTAAAACGAGGAA
CACCGAATGACATATGGATTAATTGGGCTGTGTCGTCATGCGCCTCACTATAATATCGAC
CCATTCCTAAATGTCGTTCATCATAAGTCCTGCCAATTCCTGGTAAGCGTATATCTGCAT
AACGGGTATACTGGGGTAATGGATTAATTGCCCAGTTACCGCCAGGAGATGTGTTAGTGA
ATTTAAAAGCAGCTGAGGCAGCATTACGTCTTTTTGATCTTGAACCAAAACCAACTTGGC
GTTCATCTGGAGTAGGCAATAAAAATGCTTGCCTTAACCAAATTGGTTTACTATCTGTCG
CCATAGGAATCTCCTTGACAAAATAAGGAACCTCCCAATAGGGAGGCTCCTTTAATAGAT
TAACGTAGTCTAATTGGCAATGGACGGTTATCCACTACCCGACCAGGACGTTGAGAGGGA
GCTATAGTATTAGCTTGCTCTTGTCCAGTTTGTGCAGATGGATTAGCCGCTTTGTTTTTG
ATGTAATTAAGCATATCGGCATGGAATTGCTTCAGTACACTTAATTGCTCACTTGCTATA
TCTAACATGGCTTTATCTTGACTGGTAACTACTTTGCGCTGTTCCTCTATTTGAGAGGCG
CGCACTGTAGCCTGTGTTGCCGCACCGGTATCTACAACTGGCTGTTGACCAGAAGACACA
TCAGTCGCAGATGAAGGTGCACCAGGTAGCATCATTGATGGAGCATTCGTCCTTAATGGT
GATGCCATACCAGACATTATCTTCCCAAGTCCAATTTTATTATTAGAACTATCTGTTATT
GATGTATCAGCAGCACCACCGATAAGCTCCTTATCAGTAGCCATATCTTTTTGTTTAGCA
GTTGCTGCATCATTCATCAACTCTTCTGTTGATTTAGGTTTACCAAGTGATTGACTATTG
GCATTCTTACCGCCGCCAGTTCTAAACTTAGCAACCTTATTCTCCATGACCTGATAGATT
TCACCTAAGGTTCTAGCGCTACCATCCGTTTTAAAGAAGATAGATCTATTAGCCCTAGCT
TGGTCAGGGAATATCTCAGCACCAATAGAGTTCTGGTCACGTGTAAGGAACTTACGTGCA
CCAGCTGGACCCATGAAGTGCGCTAGATAAAGATCCACATCAGTGGGTGCCCTACCTAAT
GCATTTTCTAAATACTCATAATTGTCACGAAGGAACATCGCGCCCATAAGAGCATTTATA
CGTGGGTCAAACCGTAGTGAACCATTTTCATCATCAGCAGGTATACCAAACTTAGCTCCA
TATTTAGCAAGCATCCCTTTCCAGGTACTCTTAATAAATTGGAACCAGCCAGCTGCTGAT
GAGGTTGGTGCCTTGGCATTATAGTTGAATGATGATTCAATGCCACAGAAAATATTTAAT
AGTTCCACTGGTACACCAGTCATTTCTGATACAGCTTTAAATGTAGCTTGAGCTGCATCT
CTAGACTTATTAGATTGCGGCATTGGGATATTCTCCCATACACCACCATTCCCAGTTGCT
AATTGACCATAAGTCTGACCAGTTGGTGTTAATTCACCACCTGCCCCTAACTTATACTTA
GCCGTATAGTAAGTATCAGTTATCCCTTCTTGGGCTCTACCAATAACTTGACTAACTCGT
GCTGATGTATTTTCCATCCAGTTAGTTACTTTGGTCGTGGCACTATTGAATGTTGATTTA
ACATTATCAATAATCCGACTAGCAAAACTACGTCCTGAAGCTGCATCATTCTTACCTGCT
ATCTGTGCAGATTTAGATTTACCTGGAGCTTCAGCTACCTCAGTTTCAGCTTCTTTCTTT
ATCTCATCAAGACTTATTTTAGCTAGATCTTCTACTGAATCCATATCGCCAACAATATTA
AATATTGATGGTGCTTTCCATATTGAAATACCTTCATCATCAGTTGCACCCATTATCGCA
TTAGCAATCTGGACGCGCTGAGTTGCTGTTAATGTTTCTATTTGGCTAAGCGTTATCGAT
GTAGATACTGATCGAGCAGTAACAATAAATGCTTTAAATACAGGTAGGAATCGACGATAT
AACCAATCGACCACTTTAACACGGTCAGGGCCATCGCTAGTTGTAACCATACCAAATGCT
TGGCCAGTCCACTTAATTAATTCCTCTATATCACCTGTATAAGTAGCTTTACCATTAGCT
ACTCGCATTTTATCATTAACAAGACTTTCAATTGATAATAATCCATTTACAGCAGCTAAG
TCTAAACCTTGCATTCCATAAGCATGTACACGTAATGCTTGCAGTGAAGTTAATGAATCA
CTTGCATTTGCTTTAGGAATAATTGTGTCTACTGTTGTAGTTACCATTTTACGTATAGAT
TCAACTGGACTAACCGCTTTAATTGCTTTTCCAATAGTTGAATCCCTAAACCAATTAGTA
ATATCAGTTGACTTAGACTTAATCGTAGTAATAGTATCATTTATCACATCAGTAGTACTT
TCCTTAAAACTACTGGAAGTTGCTTTAGGTGCGACAGATGTTTTCTCTGTAGCGCTATAC
TTGTTTAATAATTCCTTTTCTTTCATCTGTATAGAAGCAACATCAATTGATAAGTCCTCT
TCACCAAATGGGTTATTAAGAACTAGATAAGGTGTATTACCTTCGTATGGGAATGATACT
GATCTAATGAGCTGTCCTTTTAGTTCATTAGGTACTTTACTATCAACCTCACTGATATCT
ACATCACTACGATTAATTTTGGATAGTCCTTTAAGCCATGCCTCAAAGATCGGTTTAAAT
CTGAAGTCGATCCAATTGGCTAAACGCATGATAGCTGGGCCATCATCAGCACCATATCCA
AATATCTTAATAATGTCACGTGCATTAAGAGCCCTTACATCAAAGGAGGCATCTCCACCA
CGTGTAGCTACACTAGATACAAGTTGTTCTAATTCAGTAACCTTGTTCATCTGATCAGTT
GTTGTAGCACCGTACTGCATCATTCGATAACTGATTAAGTCATCTTTGAATTTCTGACTT
CCTCTCCAACCTAATACAGGTTTTATTAAGAAATCTTTAAGTGCCCACATAATCGGATTA
CTGGTTACAATAGCTGCACCAGCTAATTTATCATTTGTTGATGCACCAGTACCACCAAAA
CTAGCATATGCAGCAGCTGTTGATAATGCTCCACCACCAATAGCTAAAGCACCTCTACCA
AGTATTTGGCGGGCAGCAGCCCATTTCCCACCTTTCTTACCACCAAGACCTAGGTCTTCC
AATAATCCTTCATCTTCCTCATCGCCTTTCTTCTTACCAAAGATATTCTTTAAGGTATCA
CCAAGTTTACCAAAAAGACCTTTTGATTCAGTGGTTTCTTCATCACTGTTATTTTTACCA
TTTAAAGTATCGCTAACACGTGATGTTAGATCTTGCCAGGAACCACGGCGAGGTTTATTA
GCATCTGGTTTCTGATTACGCAGTTCTTCCCATATACCTGCTAATAATTGATCAGTGGTG
GTATCTAGAGCTTTCTTATCTATCTGTGTTTCTACTTTACCAGTAAATGCACTAAAACGT
TTCTTGAAAGGTGATCCAAGTAATTTATATCCTAAACCCGCCATTCCTTTAGCAGTATCT
ACAGATTTCTTACCTAACCACTTCCAATAACGCATTGACATATTAGCATAACCACGGGCT
AGATTACCTAAACCAGTTCGGAATAAACCCTTATTCTTAGCAGCAGTATGCTTAGACCCA
TCAGAGTTAATAAGTTCAGGTATTTGTTCTTCATCAACAACAATGTTACCATCCCTATCT
AAAACTGGTCCATTAATCTCATCGAATGATTTTAATAGGTTACCAGCAGTTGTATAATAC
TCACCTGCTTTTAGTTTAACTTTCTGTAATACTGGTTTTAACATACCAGGTAAATATGCA
TCCCGATTACTTAGAATATCCTTACCTAATCCAATAGTAAAGTCTTTTGCTTTATTAGCA
ACTGTACCCATTGCATTAAAGATTTTCTGAGTAGTTGATCCACCACCTAGTACATTTCGT
TGTATCCAGTTAGATGCATCTGCTACATTCCTTCGCAGATTAAAACCATCTGACCGTATT
AAACCTTTAGCCAGTTCTTGAGCAGTTACGACTACATCACCAGCCCTGTTAATAATAGTA
CCTTTGGCATCTTTCAAATTAGTTATAATTTGATTAGTTGCTGTATCGATATACTCACCG
GCTAGTAGATCACGTCCAAGAATAACAGCTTCTTCACGGCCAGGTATATACCAATCTTTA
GCCATATCAGAAACATTATCTAAACCTTGAGTTAACCGTTCTCTAGCATCACCAGCGATC
TGTGCTGCTTTATCACGTAATTGACTAGCAATATCAGTTGCCTTGGTTAATAAATCACCA
CGTTGATTATAGAGACCAGTAGCTACTTCTTGAGCAGTTACTACAGTTATACCAGCTTGG
TTTTTAATTTCACCAGTAATATCAGATATTTTCTCTACTATCTTACCAGTATTAATATCA
ATTAAATTTCCATTTAAAAAATCCATTCCTTTGATAACTGGAGTAAAAGTATTAGCTTTG
GTATATAGATCAGCTATTGATTGATTGACTATATCAGAATATCCATTGAGCTGATTACTA
TAGTTAACAGTACGGCTATACATATCGCCAGCTTGGCCGTATAGTTGATCTCTTAAATCA
CCAAAGTTCATTGACGCTGGAATGTTTATATTCCTACGTAATTCGCTAAATTGATTAGGT
ACATTATCCCTTACATAATCCGTAGCTAGTGATACTTTTTGTTGTGCGTAATTATAGCCT
TTATTAGCTTGCTCTTGGGCCAGTTTAGAGGCACGAATAACTTGCTCTTGAGCTTGACGC
ATTTTTCGTTCAGTTTGTGACTGATACATTGGGCCAATAAAGTGCGGGTTATTCTGATCA
CCTAGTGGGGAGAGTTGCTCTGGACCACCATTATCAGAAGGTGGTGTATCACTATAACGA
TCAAATGGATTATCATTACCCCATCCTTCGTATTTTACTTCTGAACTCATTAGTTCCCAA
ATACGTGGGTAATTAATACGATCAATACCCTGCTCGGTTATGATAATACCCATTTCACGT
AATTGATCAGTTTTACCAGCATTGGTTAAACGCTCAATTTCTTTAATAGGATCACGTGAG
AAGTTTCTAACGTCTAAGAATAATGTAGATATTTCTTGACGCCTAGCAAAGTTTTCATTA
GTGCTTGCCATCCTACCATCAGCGCCAATATTGTATTGCCGTTTAATATATTCCGTTAAT
TCTTTAATCGCCTCACCGGACACTTTAGAACGATCATACCCACCAGCACGAGCATATGCT
TCGGGGTCAAAACGTTTATTCATATTGGCATCACGAATTAAACGTTCAGTTAGCGCTTTC
CTAGCATCTATTGATAGTTCTTTATTTGGGTCAAATGCTTCAAGAACATCGGTAAGAGCA
CCACTCACACCTCGTACAGTAGAACGACTAACTAGACGACGTTCTGTATTTGCAGCTGAA
TCCTCTACAGACATGAATGAACCAGTTGAGAGATCAAACACTTCACGTGTAATATCATCA
CGACCAGTCCGGATCATTCTTGTTTCTTGTAGTAACCTAGATAGATATCCAGGAATAGCT
TCAACTATAGTACGTTGTGTTAGTTGATTAAAGCCACTGTCCTGACCAATTGTTTGATAG
GAGCCAGTCTTTAATCGATCTTGTAATGTGAACTGTGGAATAAATGGAGCCATAATGTCA
CGAAGAATACCACGAGCACCATAAGTGTTTTGGTAATTATTCATGTATTCTTGTGTCCAG
GCAGGGAAGTTATCAAGTAAATAAGATGCTTGATTGTGTCGACCACCTAGATAGTTATTT
GAAAAACGTTCCACACCAGGACGAACCATTCTACCTAATACAGGTATAACTGAATTCCTT
GTCCAATCACCAAGATAAGAGCCAGCGAATTGACCAGCTATATTGTATCTATTCTCCCAT
GCATCCGCGCCAAACATGTTTCCAGCGCGAGCTGCATCTGCAAAGTTACGGATATTTTCA
TTCGCAAAGCGAGTAGCATTATTAGTTACGGCTGATCCAAAATTACCTAAGAAATTTGGT
AATGTTTGAATAGCGTTGTCAACAAAACTATTCGATACCCGTTGAGCTGCATTAAAGCCA
ACAAGATCCTTCATTGATGACTTTTTATGATCGGGAATCCCTGTGTTTCTAACAAGTGCT
GCAAAACCATTATTTAATAATTCCATGGTAGCTTCGGTTTGCTGTGCAATTTTCCGAAGA
TGCAGCATAGAACGAAACTGGATTTCTAATCCTTTCTTTTGAATACTGTAATTAACTTGT
TCATTATAACTAGCTAATTTAGATAAATTATCAACTGTTTGACCCATAGCCTTAGCCATC
CAGTCAAATCTATCAGCTGATACCTTATCGCGTATTCCACGTTCAGCTTGTCCAATAGCG
AATCGTTTAACTTCACCCTGTTCAGCTTTTATAGCTAAATCCCGTTGAACAAGAGTTACT
TGATCTATAGCAGATTTAAGTTCATCCTCGTCACGTTCAGCTTCCATGCGACGACGGATT
TCTTTATAATTTCTATTTGAATCTTCAGCGTACTTATAGTTTTCGATTTGACTTTCTAAT
CGATTATTAAGTCTGTCAAAAACAGAAGCTGGAACTTTATCTTTTAACTTAACTGCTAAA
TCTTGTGCTTCTCTTGTTAAAAAGAGTAAATCACTAGCACTCGTACGTTCTACAGAATCT
TTGACATCCCGAATAGTTGACATCGTATCTTCATATACACCGAACATACGTGAAAAGCCA
TCTGGTGCCGCAGACCGCATGAATGCTTTTAAAGCTTGTTGTGGTTTAACAGAGTCAAAG
AGTCCTTGTTTAATACCATTAAAAAATTCAGTGACAGGTGATCCCTTTTTAGCTTTCGGT
GTATCACCAAAAATATCATCGATATCACTTAAGTCAAGAATATTACCGGCTTGCCCTAAT
GTTGTACCGGTTGCACCAGTTTGACCTTTGGGCAATGTTACCTTCTTGGCCATATTAAAC
TCCATTGACGATTAGTAAAGTATCATATCGTTGTTTAACTTAGTATTACCAAAATAGGAA
AATAGAAAATGAAGAAGGCATTAGTTCCTTTTAATATTTCTTTACTTATTCCCACTAAAG
AACAATTAAAGTTCTTAGGTCAAGTAAAGAGTCATGAGATATTTGAAGGTTTAGGTGGTA
ACTTTCATGAAGATGGTTTGTTCTCTGTTTCCATTTTTGGAAGAGTTGGATCAACTGATC
GTGAGAGTTTATTTGGATATATCCATTTAGGTTTAGAACTTATCCATCCAGCTGTATATC
GAAACTTAATTAAATTAAAAGCTTTCTATGAAGAAATTATTCTTGGTAAGGCATTTGCAG
TATTTGACGAATCTATTAAAGATTTTATCCGCGCCGATGAACTAACTGGTAAAACTGGTT
ATACATTCTTTTTTGATAACTGGAAACGAATTGACTTTGGGTCCACTAAGTCAGGGGTTC
GGCTATCAAGGTTACAATTAATCGAAAAATATAAAGATAACTGTATTTTTAAAGACATGC
TTGTAACACCAGCCGCTTATCGTGATGCAGAGATTGATGAGAATAATCGTGTTGAGATGG
ATGAGATCAATGAACACTATAGGTATCTATTAAATCAGTCGTTTGGTGTACCTGATAGCT
TTGGACCAAATGATGACTTGAGTATCTATGATCGCAAACGAGTAGCAATGCAAAACACCG
TATTAGCTATTTATGAACATTATGAACGACTGCTATCCGGTAAACGTGGATACATTCAAT
CTAAATGGGCATCCCGTCGTATTGCCAATGGTACACGTAATGTCATTAGTTCGCTAGATA
CTAATGCTGCTGATCTTGATTCACCTAATCGACCAACATTCAAAGATGCCGTAGTTGGCT
TACATCAAGCAGCTCGTTCAGTTGCACCGCGTACAATCTTTGCACTAAGGCAAGGTGTAG
TTGGTGAAGTGTTTGATACAGTTACTAACACTGTACAGCTCATCAATAAGAAAACACTAC
GTTTAGAATGGGTCGATATCTCTAACGAAGATATGGATTTATGGGGAACTCCTGAAGGGC
AAGAACAAATCATCAATGAGCTAGATGTCATTGAAAAACGCTCACGTGCAATTGAAATTG
CTGATCATTATTTAGCACTTATCTACGTCGATGATAAACAAAATTTCAGGATATTCCGCA
ATATTGACGAATTACCTACAAACCTAAATAAGAAGTTTGTAAGACCTATCACATACGCTG
AGTTAGTTTACCTCAGTGGATTAAATATGTGGCGAACCAATTCAGCATTCGTTACACGTT
ACCCTGTAGAAAACTATAATAGTTCTATTCCTTGTAAAATGTACGTTAAAACTACTGTAG
TAGGTGAACTACGTTACCCATTAAATGAACAATGGGAACGGGACGATGCATTGGAACCAG
CGCTAGAGTTCCCAGTATTTGAACTAAATAAACCTGCACAGTGGCATGATTCTGTATCCA
TATCACCATCTATTCTAGCGCCATTAGGTGCGGATTAACTGTAGTACTGTATATCTGGTT
ATCCTATAGAAAATTAATAGGGTAATAACCATGTTAAATAAATCTATTGAAAATCTTTGA
TTTAAGAAAGTTCCCTACTCTGAACATGGTTATATTTTTAGAGATTATGCAGTAAAATAC
ATAAGTCCACATATTCCGAAATGAATATGTTTTACTCTTCTAATTGCTGGAAACTCCTGT
TAGACTTAAGTGCTACAATTATCACGAAAGTAGATAATGAATGCTTGACAAACTTAAGGT
AGGGCCAATCAGCAGCGAAGCCGCTAAGTTACTTAACTGTAATATGTGGAACGTTCAACG
ACTAGGGGGTTGCGCCCCGTAGGATCAAGTGATCCGAAATGGAGAGCACCTAAACAGATA
ATGCTGTAGGTGAAGATATAGTCTGGTCTTCTAGCGAGAGCTAGAGCTGCACGTAATGGT
GCGGGTATCAATTAACGACTGATACTGAACATAACGTTTGACGGGGACACTGTATCATTT
AACGCTGTTTATTCAGAGGAAGCTATCGCTGAAACAGATGCTTTCTTTAAGAAACGTATT
GCATATATACATGCCGATGGGCGACTGGCATTTAGTGTTGGTGTCCATACACTCAATTTA
ACTCTTCGGTACATGACTGGGGAACCCAAACAAAGGGATTAATCATGCGCTTAAATATTA
CACAGTTTCTGAAAAATTATAGTGTACGCGAATATGCTAAACTTCAGTCACCTAAGTTGC
ATGCTCTAAATAAACTTGATCTACCTTTCGAATCCATTTATCAGTTCTTCGATGGCAATA
ATGCAGTAATGGGTCCTAGTCAAACAGACCCATTATTCTCCAAACATCAAGGTAAAGTAT
ATATTGAGCATGTTACTGATATGCTTACATTTGAAGGTAATCCACGTAGGACTTCAAATA
TCCCAGCAACAATGATTCAAGAGTTTCGTCGCCAGAACCGTTTCTTTAAACCTTTACGCA
GTGATACCGGTTTTAAATTATCAAACCAGAACATTCTGGTAATGAACTATAATTTAATTA
ACCCTCAATGGAATTATATGGCTTCTTATAAAGCCACATGGTTCCGTTGGTCCAATGACA
TGCGTACATTCTGGAGTGGCGTAGCGGCTGCATGTGAACGCTTTCCTGGCTGGAACCAGT
TCATTGATGTACACTTACCTGAGTTAGTTCCACCTCCTTCTTCTTTTAATAAACTACGAG
GGGGTTTAACTCAAGATCTAGCTAACCAATTCAATACACCTGATATTCTAAATATATTTG
ATTTAGTTCGCTGGGTTTCTGATGATCGTGAAAGTTCTTTCATGAATGTCATCGATGCTA
AGTATTACGGTAACATTAATCTTTTATTCCGTGTACAAAGCTCATTCTTTGTTATTAACT
TAGGGATGCTTGATCAATGGCGTCGTGATCCAGAAATTAAAGATGATAAAGGTTATGATA
CCCAGCAAATAGCTAGGCGCCTTATTTCACTAGTATCAGCGATGGTTGAATATAACCAAG
GTAATACTTCATTAATTAAAGAGGATACGCCTATCTTTAATGAAGATATTATTGTTGATG
AAGAAACTCCGGTTAGCTATGAAGAAGGTGAAGTAGAAGAGGTTGAGGATGTTGAGTCTA
ATAACGTTGAAGAAGAAGTAACTGAAGTTGATGTTATCGATGATGTTCAGTTTGACCCAA
CTAACTTAACTAACTTAATTGATATTGGTGCAATTGAGGTAACATATACCCCACCACCAG
AAAGTGATCTTGAGGTAACAAAGCTTATCATTGAAAAAGATCCACTGGAATCTTCACCTT
CTCGCCAAATTAAAGAAGAGAAGGAACTCATCGTAGCAGATGTACCAGAAGATGAGTTAT
TTATCAATACCGAAGTTGATGAAGAAGATAAACTAATCGATGCCATTAGAGCTAAAGCAT
ACGACATGTATCGCGTGAATATGATTTCTGCGAATACATTCGAGCAAGCTCAAGAAGATT
CGATTATGTATCGTCGTCTACCTGATCCATTTACCGATCCTAATGATGAATCAGTAGAGC
CGATGACGATCGCTGAGGCGATGGAATATCATCCAGATGATCTTAAGATTCCAGAAGACA
CCACTTTTGAAGATAAGCCAACCATTGTTGATAAATCAATGTTGGGTAGTAAGTTAAAAG
CCATCCAACGCAAATATAACAAGGTCTTATTAAAGAAAGATATTTTAAACAGTGTTTTAT
CTGTTCAGAAACAAGGCGTATCAGTAACTAATTACAAAATTGAAACTGTGCGCGATTCTG
GTAACCATTACCAAATCCACAAAGTTACATTAAAGCCTATTCGTGGTAGAAGTTCACAAG
TGATGTTCCGTATCCCCGTCATTGATAATGACGGTAGGTTCATGTCTAATGGAGTAACAT
ATCGCCAACGTTTACAACGTGCTGATATTCCAATTCGTAAAGTTAATCCACGTAAAGTTG
CATTGACCTCTTATTACAATAAGACCTTTGTGACTAGATCTGAACGTGCTGAAAACAACT
TTGATAACTGGTTAATCAGAGCGATTACCAACCGTGCATTAGATGGAAGTGATATGTCTG
TACATTCAGTTACCTATGCTGAATTAGATCAATCCAACTATGTTCTACCAAGGGTGTACA
CTACTTTAGGAACAGCTTTCAAAGGCTTCCATAATTATCGTAATGTGTTCTATTTTAATT
TCAAAGATCGTAATGAATTCTTTGCAAAGCAAGGACTACATATCGAAGATTATGAAACTG
ATGATTTGATAATGGTGGGGTTCAATGGCACTGATGCTATCTTGTTAGATAAGAATTCCA
TCTTTTACATGAAAACAGGTAATGAGCTAGAACCTATTGGTACTATTACAGATATACTTG
GCTTAGATTTAACCAAAGCACCGTTAGAAGCTATTCTAATGTCAATTGGTGGTAAAGAGC
TACCATTAGGTTTCATTTTAGCTTATCACCATGGCTTAAACAATCTACTTAAGAAGTTGA
ATGTTAATTATCAGCGTCATCAGCGTGGCACTAGGATTGTTGTCAATAGTACGGATTATA
CATTAGCGTTCGCTGATGAGATCCTAGTATTTGATCGAGCTGATTATAAAGCAATGCTTG
TATTAAGTGGACTCAAACGTTATCATAAATCACTGCGGCGTTATTCTGTTTATGATTTCA
ATAAACGAGATGTTTACTTCAGGGTTCTTGAAGAAGCTGGATTAAGTAACAGATTTACAC
GTGATATTGACACATTCTTCTCAGCATGGGTCGATCCAATCACTGAGGGTCTACTTAAGG
AGATGGGTGAACCAACTACTTTTGAAGGATTGCTTTATCGGTCTGTCGAATTATTAACGA
ACGACTGGAGTCCAGCGGAAGTAGATGGTGCGTATATGCGCTATCGTGGTTATGAGCGCA
TGGCA

[0131] In another aspect, the invention provides an TIVP-H6 bacteriophage targeting Pseudomonas aeruginosa. In certain embodiments, TIVP-H6 binds a molecule of type IV pilus. In certain embodiments, the TIVP-H6 bacteriophage has a genome comprising a nucleic acid sequence comprising SEQ ID NO: 3.

TIVP-H6
(SEQ ID NO: 3)
GTGGCGGCCTGGACAGTGTGGTCGCTGCCACTTATGTCAAGAAGGTCATCGGGGTCGAGA
CCGAGCTCATTCACTTCTGCTACGGTAGCCGAGCGGAAGGCCCTGAGGTGATTGCTGTGC
AAGCTGCACCGGCCCAGCAGCCCTGGCAGCAGCCCGCAGCGGCCCAGCAGCCCTGGCAGC
AGCCCGCAGCGGCCCAGCCCTGGCAGCAAGCGCCCCAGCAGCAAGCTCCGGTTCAGCAAC
CTGCTCCGCAGCAAGCCGCTCCGGCACCCCAGCAGGCAGCGCCGGCGGGTTTCAATCCGC
AGACCGCCACCCCGCCCTGGGCTCAACCTCAGCAGTAAGCTGACCAGCATGGAGGGCGCA
TTCGAAAGAGTGCGCCCTCTTTTTCCGAGGAGATGTGATAATGGCAGATGATGCTGACCG
CGCACTCAAAGACGCGGAAGTGCTGGATGAGGCGCATATTCGGGAGATAAGCGCAAGAGC
GGCAAACATGCCCAAGGGTGTGCCTGGTATCTGCAAGCACTGTGACGAACACTTCGAACG
ACTGGTTGGCGGGCACTGCGGACGGTGCCGGGACTTGCTCAAGCTCCCCTAAGCCCTCTG
AGTCATATAAGGAGGCGTGATGCCTAATGTAATTCTCGCGACGCACACTGTCGCAAAGAT
CGACGCAATGGTGAAGGCGGATCAAGGGTCTGCCTTCCGTGAGTGGCTCGGAAAGGTGAT
CGGGCACATCGGTGACGCATACCGCACGGGTAACGAGGGGCACCGCTCGCACATGGGCGC
ATCGCTCATTGGCGGGGAATGTGCTCGCGCGATCTGGTATAACTTCCGCTGGGCAACGAA
ATCAAACTTCGAGGGCCGTCTGCTGCGCTTGTTCAATCGCGGACACCTGGAGGAAGCACG
TTTCATCGCAATGCTGCTGATGATCGGTTGCGACATCTACCAGCAAGACGAGAACGGGAA
CCAGTTCCGTATCTCTCACGCAGAAGGACATTTCGGTGGGAGTGGAGACGGTGTCGCTGT
GGGGATCCCAGACCTGCCTCCGGGCACTGCTGCACTGACCGAGTTCAAGACTCACAACGA
CAAATCCTTCACCGAGCTGAAGGCCAAGGGTGTGCGTGACGCCAAGTTCGAGCACTACGT
TCAGATGAACGTGTATATGCGCAAGATGGGCCTGGCTGTTGCGCTCTACCTTGCAGTGAA
TAAGAACACCGACGAACTCTACGGCGAGATCATTCCGCTCGACAGTGCTGTCGCTGATCA
GTTCCTGGACAGGGGCGACAAGATCGTTTGGATGTCCGAGCCCCCGAACAAGCTGAACGA
GTCGCCTGGATTCTTCAAGTGCAGATGGTGTGACCACAGGCCTGTCTGCCACCTCAAGGC
TGCTCCCGATAAGAACTGCCGGACGTGCGCCTACAGCGAACCCGTCGAAGGTGCCAAGTG
GATCTGCCGCTTGCATGATCAGCACATCGACAAGGAAGTGCAGCTGACCGGCTGCAAGGA
CTACACGCCCCGGAAGGTGTTCGGATGATCCAAGCTCGAAGCTATCAGGTCGAAGCGGTC
AGCGCGATCTATACTTACTTCGGGAACAACACGGGGAACCCTGTTGTCGCTATGCCCACG
GGTACGGGTAAGAGCGTCGTGATCGCGATGTTCCTGGAATCGGTGTTCAAGTATTACCCG
AACCAGCGGGTGATGATCCTTACTCACGTCAAGGAGCTGATTCAACAGAACTACGAGAAG
CTGATGGGCTTGTGGGCGTTCGCGCCCGCTGGTGTGTATAGCGCAGGCCTGAACCGACGG
GACGTGCATGCGCCCATCACCTTTGCTGGTATCGGTTCGGTCGCCAAGAAGTGGGCCATG
TTCGGCCATGTGGATCTTGTCATCATTGACGAAGCGCACCTCGTAAGCCCCAGCGAAGCG
ACCATGTATCAGACATTCCTGTCGGGCCTGATGAGCATCAACCCGAACTTGAAGGTGATC
GGTCTGACTGCTACACCGTGGAGGCTTGGGCATGGCAAGCTGACCGACCCTGTGAAGAAC
GACAAGGGTGAAGAAGTCCCAGGCCTATTCACGGACATCTGTTTCGACATCACAGGCATC
GAGGCGTTCAACCGACTCATCGCCGAGGGCTTCCTTGCGCCGCTGGTGCCCAAGAGCACC
GTGACGAAGCTGGAAGTAGATGGCGTTCATATGCGCGGCGGCGAGTTCATAGCGAGCGAG
CTGCAAACTGCTGTCGATAAGATGGACATCACAGTCGCAGCAGTCAAGGAGGCTCTAGAG
CTAGGTTGGAACCGGAATCACTGGCTGGTGTTCGCTGCCGGTGTGGAACATGCTATCCAC
ACCGCTGAGATCATGAATGACATGGGGATCCCGACTGTTGCGATTCACTCCAAGATGGGT
GACAAGGAACGCGACAATGCGATCAGGGACTTCAAGGCTGGGAAGTACCGCGCGGCAGTC
AATAACAACGTGCTGACCACAGGGTTCGACTTCCCTGCCATCGACCTGATCTTGTGTCTG
CGCCCGACAGCTTCGGCGGTGCTGTGGGTGCAGATGCTAGGACGAGGAACGCGCCCAAGC
CCTTGGACAGGGAAAGAGAATTGCCTGGTGCTTGACTTCGCGAACAACACACGCAGGCTC
GGACCGATCAATGATCCTGTGGTTCCTCGTCGTAAGGGTGAGAAGGGTGGAGACGCACCC
GTCAAGGAATGCCCGTGCTGCCGCACATGGGTTCATGCCAGCCTGCGCTGGTGTAATGGA
CTGATGCCCGACGGTTCGAACTGCACTTACGAATTCAAGTTCCAGACCAAGCTGAAGCAG
GGCGCCAGCACCGCGGAGCTGATCAAGGGTGACATGCCCGTCGTTGAAGTGTTCAAGGTG
GATCACATCACCTATATCGAGCACAAGAAGGACGGCAGGCCTCCAATGATGAAGGCCACC
TACTATTGCGGGTATCGGATGTTCGAAGAGTTCGTCTGTGTCGAACATACGAACTATGCA
GGCAAGAAGGCGCGCGACTGGTGGCGTGCGCGTAGCGACGAGCCTATGCCCAGCACTACG
GCGGAGGCGCTGGAGCGTGCTGACAGGGTACGCACGCCAACGCACCTGAGAGTCTGGATC
AACAAGAAGTATCCGGAAATCCTTGCGACGTGCTTTGATGGCACCGCGTTCGGCACTCAG
GAAGCAAGTGACGGTGACGAAGGCCCCAGCGTGCAGACGCACCACAGCGCACCGCTTGAG
GATCAACGTGCAAGCGAACCGACCAGCTATGCGGATCTGGACGATGATATTCCGTTCTAA
TCGATTTTTGGATGCCGATAAAAATCTTTTTTACGGGCAAGCCTGAAAAAGGGCTTGCAT
CTTTGTCCAGTTCGTCTATAGTACGATTCATGGATGCAGCGGTGCATCAAACAACGGTCG
CAAGACCATCAACCTCTAGGAGCTTAAAATGATCAACTTCAACGAAATGGGCAAAGTGGA
ACTCCGTCAGGCTTGCAAAGAAGCTGGCATCAAGAACTATGGCAAGATGAATAATGACGG
CATGCGTGCCGCGCTGGAAGCGCACTACGCAGAGGCCAAGGGTGCGGAAGAAGCTGCGCC
GGAAGCTGTGGTCACCGAGGAAGTGCAGGAAGAAGCACCTGTCAGCGCCCCGAGCGGTTT
GGCGACACTGGTTCAACAGATGATCGGTGCCAACGAGAAGAAGGAAGAGGAGCGCAGCGC
TCCCGCCGCTGCCAAGCGCACCAGCAGCGGCCTCAAGATTGAGAAGGCACGCGAAGAACG
CAACGGCATCAAGAAGCCCTCCGTGGGCGGTCAGTGCCGCGCTGTGTGGGACGCGCTGGA
CGACATGGTGGCAGCAGGCACCCAGCCCACCGCCAAGCAAGTGAAAGCGTTGGCGGAAGA
ACGCGGCTGGAATCCGAACAATGCGTCCATCGAGTTCTACCAGTGGCGCAAGTTCAACGG
CATCCGCGGCCGTCAGTAATAACAGCAACGAGGGGCGAAAGCCCCTCCGGAGGCATGTCA
TGATTCGGTTTCTGTTAGTGCTTGCAGCCATTATCCTTGTGCTCTATCTGATCTTCTCCG
AGGTGTTCGCTACCGCTGAGCGCTTCAAGCACAAGGCAGAATGCCGACAGCCGCTTGCGG
CATACATGCACGGAGGGGCGCCCTTCAGATGTGAGGTGAAAGATGTACGTTAGTCTCGAC
ATGCAGAACATGAGGATCGTCCATAAGCATTCGTCCGTGAATGCGGTGTGCGGCCTGGTG
CATATTGAACTCCCCGACGTCGCAGTGAATGTCTGTCCGATCGACATGACAGTCAAGCAC
AGGACCGACATGGAGATCAAGATGCTCTTCCGATCGTGCTTCCCAGGGCAAGCTGACCAC
ATGCCCGTCGCGGAGATGAAGTCCAAGATCCTCCAGTTCGCTGAGGAGTTTCCGGTCACA
GACTTGGACGAGCTTGAAGTCAAGCGCCAAGCTGACAGCATTCGGGATGGCGACAAGAAG
GCCTACAAGTATGTGAAGGGTTCGTTTCGTGCGTCTCGACCTGCTGAGCTGTTTGCCGAC
GCTACGGGCGACGCTGCGCGTGCTAGTGCTACCGTACCGGCCAGCAGTGCTGCGCGGCCT
GTGCGGCCCGCTGCCGCCCCGCGCGCTGCAACTGGTTCCCCAAGGGCCAGCGGTGTGCGC
GAGAAGATCTGGGCAGTCGCTGACCGCATGTGGGAGGAAGCTGGAAAACCGATCGAAAAG
AGCACAGTCCTGGCGCTGCGCAAGGATATCATGAACGCTTTGGAGCAGGATGGGGTGAAG
CGCACCAGTAGCTCCAATGAGTTGGGCAACTGGCAGAAAGCGAGGATCACGTAAGATATC
CGATTTGCCCGCTTGCACTCATGCTCCCGGAGTGTTACATTGCAATCCCGTCCATCAACG
GACTTTATTCACTTTCACTGGAGAAAGACCATGACCGAGAAGACCGCCGAACAGATCGCT
GCCGAGCAGGCCGAAGCCCAGCGCAAGGCTGACGAAAAAGCTGCCGAGAAGGCCCGCAAG
GAAGCCGAGAAGGCTGAAGCCAAGGCCAAGCGTGAAGCCGAAGCTGCCGAGAAAAAGGCT
GCCAAGGAAGCGCAGAAGGCTCAGGAAAAAGCCGACCGCGAGGCCAAGAAGGCTGCCGAG
AAGGCTGCGAAGGAACAGGCCAAGGCCGACGCCAAGGCTGCCCGCGAAGCCAACCGCATG
CCGGAGCAGAACGGTATCCGCCGTCCGAAGCCCGACACCCTCTGCGGCAAGGCCTGGGGC
ATCTTCGACAGCGTGTCGCAGAAGAACGGCGCTCCCGCGTCCATCGGCGAGTCCATGGAA
CTGGCCAAGGCCGACGGTCTGAACGAAGCCAACGTCCGTGCCGAATACGCCCGCTGGCGC
AAGTTCCACGGCATCACCGGCCGTATCGAGTCCCCGAAGGCCGAAACGACCTCCGCTGGC
GCCGAGCGGGCCTAACCTGCTACAATAAAGCGCCCTGGGCATCCGCCCAGCGGGAAACCT
GCAAAGGGGCAGAGATGCCCCTTTGCTATCTACCCCGGAGGTTCCATGAACTTACAACCA
ATTGAGAAGCGCACCAAGAGCGCTGACGGCCTGCTGTCCTTACACAGCATCTTTCACACC
ATCCAGGGCGAAGGCCCTTTCTGCGGAACCCCTTCCGTATTCGTTCGACTCGCAGGGTGC
AATCTCCAATGCCCCGCATGCGACACCGACTACACCCAAGGCCGGCGCGCTGCAAGCGCC
CAAGAGATCCTCGACAAGGTGCAGGAATACCAGTCGAGCGGCCTTGTGGTCATCACCGGA
GGCGAACCCTTTCGTCAGGACATCACACGACTCCTCAACGTACTGACCGACGCGGGCTTC
TACGTCCAGATCGAGACTAACGGTACGCTGGAACCTGTCGAGTACCCTTACAGCACCATG
CCCGACATTCGAACGGGCGTCTATGTGGTGTGCAGCCCCAAGGCGGGCAAGGTGCATCCT
CGCATCAACGACGTCGCATGCTGCTTCAAATACGTGATCGCACATGACAGCATCCATGAT
GATGACGGTCTGCCCTTGCGTGCTCTGGAACATCGCGCGAGTCCGTATGTGGCCCGACCG
CCCAAGAACTGGGCACGCCCAATCTACCTGCAACCGATGGACTCCAAGGATGAAGAGCTC
AACCGCCTCAACCTGCAAGCGGCCATCGACTCCTGCATGAAATTCGGTTACATCCTTCAA
CTACAGATCCACAAGATCATCAACATGGAGTGAGCTATGTGCGCAATCATTGGCGCCTTG
GTGTGGGGCTTGACCACACCTGAAGCACGGTCACAGGCCAACAGCCTGCTGAACCATATT
GTGGCACACAGCCATGAACGCGGTCGCGACGGTCGGGGCTTCCTGACGAACTACGGTGAC
GACATCGTTATCGAGAAGAGCACCGACCGCAAGGACGCGAAGGACTGGGCGCCTGTCGAG
TTCTTCAAGGGCGACGTGTCGTCCGCTACCTTTATCAGCAACCTGCGAGCCGAACCGACA
ACCGAGTACGTCGCTGACAAGTCCCAGGACGATCAGCAACCCTACAGCGCGGGGCACTGG
TCCATCGTGCATAACGGCACCATCGCCAACGATAAGGCGCTGCGCACTGGCAAGGTGCCC
ACCCGCATCGACAGCGCGGCGATCGCGGAAGTCCTGGACGCCAACCGCTGTGACGGTTCC
AATGCGTACCGGACCGCTCTTCACTTCATAGAAGGTGTGAAGAAACTCAAGGGCAGCTAT
GCGATCCTGGCGACACATAGCGAGCAGAAGAATCATCTGCTGGTGGCAGCAAACTACCGC
CCAATCTGGTTCGTCGTAACCGAAGTCGGCGTCTTCTTTGCAAGCGCGCGCCACTACTTT
CCCGACAACATGACTCCGCGCATGGTCGATCCGTATTCGGTCATGAGTTTCTACTTCAGC
GATCATCTTGAGATCCGCGGCGAGTCCCTGTACGACGTGGGCGCTCGTTCCAAGGCGCTC
GTCGTGTGTAGTGGCGGCCTGGACAGTGTGGTCGCTGCCACTTATGTCAAGAAGGTCATC
GGGGTCGAGACCGAGCTCATTCACTTCTGCTACGGTAGCCGAGCGGAAGGCCCTGAGGTG
ATTGCTGTGCAAGCTGCCGCTGACGCGCTGGGCGTGCCCTGCACCGTGTTCCCGCTCCCC
GTGTATAAGCCAAGCGACTCCCCGCTGCTGCAAGCTGACAGCAAGATCGCTGGCGGGGAG
GAAGGCGCCGAATTCGCTCACGAATGGGTGCCTGCGCGGAACCTTCTGCTGCTCAGTGTG
GCTACTGCCTACGCGGAAGCGAACGGATTCGACACTATCGTCCTCGGTAACAACCTCGAG
GAAGCTGGTGCGTATCCTGACAACGAACCCGAGTTCATTGCCAAGTTCAACGACCTGCTG
CCTTTCGCAGTTGGCGATGGAAAGCGCATGCGAGTCATGATGCCTGTGGGCAACCTGATG
AAGCATGAGATCGTGGCGCTGGGGCACCGCATTGGCGCACCGCTCGACAAGACCTGGAGC
TGCTACCGTGCGGGCGAGCAGCATTGCGGGACGTGCGGTCCGTGCTACATGCGACGCACC
GCGTTTGACATCAACGGCCTCGAAGAGGTCATTTCTTACAGTAACGACAAGGAGTAACCA
CATGCCCTGGCAAGCCAAACGATATCACGACATCAGCTGCGGACACCGCGTCTTCCAGCA
CGAGTCGAAGTGCGCGCATCTGCACGGCCACAACTATCGAGTCCATTTCACCTGCGAAGC
GGAAGAACTGGACAACATCGGCCGCGTGATCGATTTCAGCGACATGAAGTCTCGCCTGTG
CATGTGGCTGGAAGATAATTGGGATCACAAGACGCTCATCTGGGAGAACGACCCGTGGGC
CAAGGTGCTACCCGAAATCGACCCGACGATCGTGATCGTTCCCTTCAACCCTACCGCCGA
GAACATTGCTCAACATCTCGTTGAAGTGATCGGCCCGCAGCAGCTCGCAGGCACCGGCAT
CAAACTCGTACATTGTGACGTCGAAGAGACGCGCAAGTGCTCCGCTTCTTTTCACGCTCA
CTGAGGACACACCATGCAACTGACTCTGAATCATAACGACGTGCAAGCGCTCGCGCAGCG
GGCGGCACAGGCCATTCTGGCCTTCGGTGCTACCATTGGCCGCACCCTGCTGGCTTACCC
CGTACCGCGCGGCGGTGTGCCCGTTGCGTACCTGCTGCAAGGGCTCGCGGGGTTCAGCAT
CACCGACGACCCCGAGAAAGCCGATTTCTTCATCGACGATCTGATCGACAGCGGCAGCAC
GATGGAACACTGGTGCGACCAGTTCCCAGGCAAGCCCTTCTTCGTGCTCATCGACAAGAA
GACGGACGAAGAGTTCAAGGGCCGCTGGATCGTGTTCCCGTGGGAAGGCGACGCTGAGTC
AGGCATCGAGGACAACATCCGCCGTCTGCTCCAGTACGTCGGGGACGATCCTGCCCGCGA
AGGGCTGCTCGAAACTCCGCATCGCGTCGCAAAAGCGTGGCGTCACTGGTGCGGTGGCTA
CGGTAAGGATCCGAAGGCGATCCTGAAGGTGTTCGAAGACGGTGCTGAGAAGCACGACCA
GATGGTGACGGTGCGCGACATCCCCATCTATTCGCATTGCGAACACCATCTGGCGCCCAT
CTTCGGCACGGTGACGATCAGCTACATCCCGAACGGTCGTATCGTCGGGCTCAGCAAGCT
GTCCCGCCTGGCGGACATGTATGCACGCCGCCTGCAAGTGCAGGAACGGCTCACCGACCA
GATTGCGGACGCTCTGTTCGAGCACCTGGAAGCGAAGGGCGTCGGTGTGGTCATCAAGGC
TCGCCACATGTGCATGGAGTCGCGTGGCATCTGCCAGCAGGGACACCACACCGTGACGAC
TGCTCTTCGCGGTGCGATGAAGGATGAGCCCGACACCCGTGCCGAGTTTCTTCGGCTTGC
CCAGTAACAGCTAGTTCGCTATAATGTAGGGACGTCTTCGGATGTCCCTACATTTTGGAG
GTCTCATGAACATATTCATGGCGGCCGTTTATACGAACGGCTATATGGAAGGTCAGGCGC
GCCATGCCAAGCTGACGGAGCACGAGCAGAACATCTGCAAGAATCTTCCTCACATTCTTG
AGTCGTACCACTACGTCGGCAAACAGCGGTATGTCGATGACATGCGCCGCGATGGTGCTC
AAGTGTTCCTGGACTCGGGAGCGTTCTCTGCTTACACGCTGGGCGTCGAAATTAGCGTCG
CTGAGTATTGCGACTATATCAACCGCAACAGAGACATCATCCGCGTCGAAGATGGTGTCG
TGATGGCATCCGTGCTGGACGGCATCGGTGACCCATTGCAGACGTGGCGCAATCAGCTAG
AGATGGAGCAGCGCGGCGCCAAGCCCCTTCCCTGCTTCCACGCTGGGGAAGACGAGCGAT
ATCTTGAATGGTACGTCGCGAACTACGAATACATCACGCTCGGCGGCATGGTGGGCTCCA
GCACACAGCAGCTCTGTATCTGGCTGGACAGAATCTGGGACCGCTACCTCACCGACGGTA
GCGGCAATCCGAAGATCAAGGTGCATGGCTTCGGTATCACGGCCGTTCCAATCATGGAGC
GTTATCCGTGGTATTCCTGTGACTCGTCCTCTTGGATTCAGTCCGCTGCATTCGGTAGCA
TTATCACCCCAGGCTACAGCCAGAGCACGATGGCGCTTCCGATGAGTGTATCGGAGAAGT
CCCCCAGCAGGCATGACGCTGGCCAGCATGTGACCACACTGACACCCATCGAGCAGGATT
ACGTTCTGCAGATGCTCGAAAAGCACGGTTTCACGCTTGAGCGCCTTTCCACCGTGTATG
AGTCACGCGCCGCCTACAACCTGTGGGCGTTCGGGGTGATCAACACAATGATCAACGCTG
CGCACTCGAACACGTTCCGGGCGCGCATTCAGGAGCTCTTCTAATGCTTAAAGAACTCAA
GTTCGTGCAGGGCGCAGTCGCTAAGAAAGACCTCCTGCCCGCCATGACTCACTTTGCCAT
CGAGGGTGGGCATGTGCGCTCGTATAACGGCACGCTGGCGCTGTCCAGCCCCATCCCATT
TGACATTGACTGCAAGCCCAAGGCGGGCCCGCTGGTGCAGGCGATCGCGAACTGTAACGA
CACAGTGACGCTGAGCATGACCCCAGCGGGCAAGCTGCGCATTCAGAGCGGTAAGTTCCG
GGCGTTCGTGGATTGCATCGACGGTGAAACGCCACACGTCATGCCTGAAGGTGATCACGT
AGATCTTGACGGTGAGCAGCTTCTGAAGGCGTGCAAGACGCTTGCACCGTTCGTCGGAAA
CGATGCGTCCCGTCCTTGGACGAACGGCATCTTACTTCGGGGTCAGTCTGCGTTCGCCAC
GAATAACGTGTGCCTGGTGGAATACTGGATCGGTTCGCAGACACCCTTCACCGCCAACAT
TCCTATGGCGGCAATCAAAGAGATGATCCGTATCAACGAAGCGCCTACGCACGCACAGCG
CACCGACAACAGCATCACATTCCATTACACCGACGGGCGCTGGATCCGGAGCCAGCTGTA
TAGCACTGACTGGCCCGACCTGTCGAAAGTGCTCGACAGACAGTGCAACCCGAGTGACAT
GGACTCCCGTCTGTTCGAAGGGCTGGAAGTGATTAAGCCGTTCGCTGACAAGCTGGGACG
CGCGTTCTTCCACGGTGAAGCAGTCAAGACCCATATCGACGAAGGTGAAGGCGCATCGTT
CGACATGGTGGGCTTCCCGTTCGAGGGTGTGTATCAGATCGAGATGCTCAAGCTGCTGAA
AGATGTGGCACAGAAAATCGACTTCAGCACGTACCCGAGCCCCTGCCTGTTCTACGGTGA
CAGGCTCAGAGGTGCAATCGTAGGCATGCGCCTGTAACATGTAACCCAGCGCCACGGCCC
GCTTAATGGCCTTAGATGAGGATAGAAGATGCGAGCTGACGCTCTAGGACTGTTCTGGGA
GGATCGACCGCCACCTCCCAAAGAGAAGGCCGAGAAGGCCAAACGCACACCGCCGGACCC
TGTGTGGTTACGCCCCGACTACCTGCCGGGCCTTGAAGAAGCTCTACGCTTCCCCATGCT
GGTGATGAACGACGCGGAGGTGTTGCACGCTGCAATGACCCGCGACAGGCTGCTGTTCGA
CATCGAGTGTTATGAGAACTATTTCATCGCCTCGTTTCGATCGCTCGCTACAGGCAAAGC
GGTGTTTTTTGAGATGTACGATGGGCATCCGCTTGACGTCGGGAAACTGCGCTGGGTACT
GGAGAACACCACGACCGTCGGGTTCAACTCCCTGTCGTACGACTTACCGATCACATTCCT
TGCACTTGCGGGCAAGCCGAACGCATTGCTGAAGCACGCGACGAACCAGATCATTCTGGA
GGGTTGGCGCGGGTCCGACGTGATGAAGCAGTACAAGGTCAAGGGTGTTAAGATTGATCA
CATTGACCTGATCGAGGTGGCTCCGCTCCGCGCCAGCCTGAAGATCTACGGTGGCCGTCT
GCACGTTCCGCGAATGCAAGACTTGCCGTTCCACCCTGACACCGTACTCAGCCCTGAACA
GATTGCCTGCGTGCGCTGGTACAACATCAACAGCGACTTGACGAGCACCGCGTTCCTTCA
TGAGTGCTTGCGAGATCACCTAGATCTGCGCACTACGCTATCGAATGAGTCTGGCATTGA
CCTTCGCAGTAAGTCTGACGCGCAAATTGCTGAAGCTGTGATCGCCGAGGAGATGACCCG
TCGTATGGGCAGGCGCCCTGAGAAGCCCGTGATCGAGGTTGGCACCGCATACCGTTACAG
GGTGCCTCACTTTATTCGCTACCAGTCGCAGCTGATGAACTGGGCCCTGAGTGTCGTTGC
GAATGCGAACTTCCTTGTGGATGAGACTGGTTCCATCGGCATGCCTGAAGAGATTAAGGC
GCTCCAGCTTGATATCAACGGCAGCGTGTATCGCATGGGCATCGGCGGTCTGCACAGCAG
TGAAAGCACAGCAGCGCACCACAGCGACGAAAACTACATCCTGATCGACAAGGACGTGAC
GTCGTACTACCCGTTCATCATCTTGAACCTCGGCCTGTACCCGCATCACCTTGGCCCGAC
GTTCCTTCACGTGTATAAGAACATCGTCGATCGGCGTATTGCAGCCAAGGAACGGGGTGA
CAAGGTAACGGCTGACTCGCTCAAGATTACGATCAACGGGTCGTTCGGTAAGCTGGGCAG
CAAGTATTCGATCCTCTACTCCCCTGACCTGCTGATCCAGGTGACGGTGACTGGCCAGCT
GAGCCTGCTGATGCTGATCGAGCGGCTGGAACTGGCAGGCATCCATGTGGTTAGCGCGAA
CACTGACGGCATCGTGATTAAGTGCCCTCGCAAGGGGCAGCACATCATGGACCAGATCAT
CGCGCAATGGGAACAGGACACGGGCTTCCAAACTGAGGGAACCATTTACAAGTCGCTCTA
TTCCCGGGACGTGAATAACTACATCGCAGTCAAGGAAGACGGTTCTACGAAGTGCAAGGG
TGCCTATGCCAACCCGTGGGCCAGCAAGAAGAACATGGCCGAGCGCTTGCACAAGAACCC
GACGAATACGATCTGTGTCGAAGCTGTGGAGGCACTGCTGACGAAGAACGTACCGATCAT
GACCACAGTGCGCGGGTGCAAGGACATCACGAAGTTCGTGTCCGTGCGCAGCGTCAAGGG
TGGCGCGGTCAAGGTATGGGATCGAATTCCGCCTCCCGCGCATAGTTCGCAGGAGGAGCT
TCTGAAGCTGGCGGGGTTCGTACCGTTCTCGAAAGATAGCTGGGTCAGGGAAGGCGACAC
CATCGGACGCGCTGCAATGAACACCGAACGCGCGTACAAGGCGGCCTGGGACGAGCTGTC
CAAGCCTGGTCTGACCGAGTATCTGGGCAAGTCGATCCGCTGGTACTACGCGGTCGGGGT
GCAGGGTGAGATCGTCTATGCAACGAACGGGAACAAGGTGCCCCGCTCGGAAGGTGCTAA
GCCCATGATGGACTTGCCTGACGAATTTCCTGCTGACGTCGATTTCGAGTGGTACGAACA
GGAGTGCGAGAAGATTCTGCAGGCGATCGGATATACCTCTAAGGCCTGATAAATGGGCTT
GTCGGATTTTGCCGGCAAGCCCATTTTTGTGCTTGCATCTGCTCAAGAAGTGTCCTACAG
TTGCATCACGTACTAGGAAAGGAGGCGGATATGAACTTGATTACCTTCACAGCTCTATGC
GTCTTCGACGCCTGGATCTGGTTGCATAACCTTCACATCATTCTTGGAGCTTGAAATGGA
CGAAACCCTCGTCGAAGAGATCGTGCTGCGCTACCGCGCAATCGTGCCTATGACCACACT
GGGCGATCACCTGCTGTTCATGAAAGTGCTTCACGCGCACATGACGCACCCGCTTCAGCT
GGATGCACTGCTGATCGCGACCGACGAAGACATCGTTCATGACGTTGAAGGTATTGCGCA
ACACTTCGACACGAATGCGGGCGTTTATCGCGAGCTGTTTTGGCCGCGCTACGCTGCGCA
GTGCGGTGGCCAATGCAACCATGCGGGCCACTAGCCGATCGCGGCCTGTACCCCCGAAAG
CGCGGCCCACAGTTTAGTTCAACACGGAGAAAACAATGCAGAAAGCCAACACCCCGTTTC
GCACGCTCGCTATCCTCGTCGTGATCGTGCTTCTGGTAGGAATCGTCGGAAAAATGGATT
ACGAAGACGAGCTCCTCGAACTTGACATGTACTGCCAGAACGTGCATACTGGCGTCTGGC
CCGACTACGAGGGCAGCTATAAGGAGCAATGCCATGAAGGTCATCGCAAGACTGATCGTT
AGCGCGACGCTCGCGCTTGCTGGTGCTGCGCACGCCTGCGACAGGCAATGCACAGCAGCC
TGGTTCAACAGCGACCCGAAGACCCGCATCAGCGAGACCGGGCCAATCCTGTCCGCCTAT
GGCGAGGAAGGGAATGCAGGCATGGAAGCGGTGTCGCGCTGCAAGATGGACGTCGCTGTG
GTCATGCAGGGCAAGCCCGCCTATCAGCAGTTTATCAAGCAATGCTATCGTCTGTATCCT
GCGCGAGTACGGGATCAGATGTATCATGTCGATTATCGGTACGTTCCAACGGATCGAGTC
GATGTGTATATCCATATCGACAATAAAAAGCCCCGCTGAGCGGGGCTTCGTTTAGATGGC
AATGCCTGCGGACCATCCTCCGGACTTGTAGGCTGTGAGCTTCTGCTCGTCCTCAATATA
GGCTATCCAGCCCACTCGTGGCGTGCCGAACACCCAGGCCGACCCTGTCCAGACAGCGAC
TTTGCCGGCTTGCCCTGCCCATGCACCAGTGGGCGAAGCTGCCACGATGTATGTGTCGCC
CGATGCGGGGCTTCCAGGCGGTGTTGCGAGATCCCGATCCTTCACTGACAGCTGAGTGCC
GAAGCGCCCCAGCCACAGAAGGTTCGCGTCCATACCAGTGTTCCAGCCGTTCTCACCGAG
AGTCCAGCCGTAGCTCATTCCGCTTCGCGGTTCAGTAGATGCTGCCATTATGCGCCTCCG
TAAGAGTAACCATATCCGGCACCGTAACCGGACCGAGTGAATTCCCAATCGTGCATCTGA
AGGCTTTGAATACCATCACGCACGGCCCACAGCTGAATTCTCAGCCTTCCATAATTGGAC
CCCATCTCTGCAAGAGTGAAGGTGTCCGTAACCACACCAGTCAGCCCCGCATGCGTCACG
AGCACTGACCCCGCCTGGGTCAATAGGCGGCAAGTGTAAGTCGTGTTTGCTTCCGGGCCG
ATGCTTGCTGCCTCTGTATCAACGAGCGTCGCGGTCTGCTGCAAGCGGTCGCGATGCACC
CATGTCACAGTGATGTTCTGGTCTCCCCGAACCGTGTCCGGATAGGCCAGACTATTGATG
CGCAGCTTCTGCGGAGGGTAGGGGCGAGGCGCTCGAGCCTGGATCGTCACCGTTTGCGCT
GTAGCGGATGCTTCTGCAAGAGTACCCTTGGCCGTAGTGGGCAGAAGTTTGATCCGAGCT
ACTTCGCCTTGAGCGTACTCCACCTGATCTGTCTCAAAATACACATCAGGGAAGAACACG
CGAGCGCCTAGCGCATGTACCGCGGGCACAGAATCAAGCACCCCGCGTCCCACAGTCATA
GACGAGCTACTGATCGCGGTAACGATGACCAGTTCATTGTCGATGACTGCATAGGTGTTA
ATCTTGACAATGTCCAAGTCCATCCCGGACTGAATCGGGATCACCGTCTGGTTCGGGGTG
ATAGCAGCACTGAGGACAGCAGTAGGGCAGAAATCGACCGTGCCGGCCTCCTCGTACGCA
GTGTTCGTCGGGTTCGTATAGAGCTTGGCGTTACCCGCGTCACTCGTGGGCCGCACACCT
GTGGCCACCACGAAACCCGCTGTCGTCGGAATGCTACGCGCGTCAGTTTCACCCATGCGC
TGACACAGCTCCCAGAACGGCGCCTCGATGACGCAATGATACGGGCAAGGCGCGGGATCA
TTGTTGGGATCAGTCCAGCCGCTAGGCGGAGGAGGCGCATAGATGGCGCTCGACAGGGCG
AACACGTCTTCTACTGCGCTGATCTTGACGACGTTGCTATCGAGTGCGCCCAGCTCCACG
TTCGCCACCCGCATCACAAGCTGGCTGATCCCGTAGCGGGGCCAGCTAAGCACAAAGACG
TCACCAATGTTCAGCGATGCGGCCTTGCGGTTGGCGTAGATCGTGCCGCTGGCAAGTGGA
ACGGACAGCGCCTTGAGTGACCGTGCCGCTACCTTCGTGGCGATAGTTCCGTTCGTGAAT
CCTGGAAACTGCTTCGTCGTACTCACGACAGACTGCTGCTGTGCAGCCAGTGCGATGTCT
TGCACTGTGATCGAATTGTTCTTTCCTGTGCTTGCGTCCCAATAGACGACAGTCACCGAA
TTGACGAGCTCTCCTATGGTGTTACGTTTGAAATCCGAAATCTTATCGACAGAGGACTCG
TCCAGCACCAGCAACGAATTGACATCGTATCCACCGCGCGCGAGCTTGAGCACAAACTTT
CCTGACGTGCGATCCACGAACAAGGAACCGTCGATGTGCTTCAGTACCTCCTGAATGAAT
TCCTCAAGAGTTACTGAACGATCCCACAGGAGCGACATGCCCATGCCTTCGCTATACATC
TGATCGGCAGCAGCCTGAAACGTAGTGTCATCCACATCAGCTTCAGGATAGCCCATGCCC
CAATCGGGGTCAGTGAGGCACTCGCGGATGATGTGCGCTGGGTTCATATCCTGGCCGATC
GCTGCCTTCGCGATGTACCATTGAGCGATTCCGTTCTGGCGAACCAGTATGCGCTGGCCC
CAGAACGATGGGCGTTTCAGATACGGGTTCATGCCAAGATACACTTGACGGAACACAGCG
CTGACCACACCTCTGAAGCCAGGCACCATCGACCCCAGCTTGCTCACGAGGTAGCTGTTC
GGCGTCTGCGTGTCGCTACCCATGTCGATATCGACCGTGCCCGATACACCGCCTTCGCGT
TCCTCACCGCCGAACAATGTGTCAGCACTGATAGTGATTGCGCCGCCTGTAGCGTTACCA
GTCCAGGCAGTCTTTTCGTCGAACTCTACCTTGATGATCTTGTCGATCGGTCCATGACAG
AATACCATGTGCATGCCGAGATAATACTTATATCCGACTGTCTGCGCTTTGCTACTTCCG
CCCACGAGCCACCTCCACTGCTGCAAGCGCCATTCCGTCATTGCTGGTGGCTTCCAGCAG
CCTATCGGAATCGATGCCGTTGTTCAAGAAATCGGTATAGTCCAGGCCATACCGAGCGAA
CAGCTCCCGCACGCCCCGCGCACAGTAGCGCAGCTCGCGACAGTGTTCCATTCGGACGAT
CACACTGTTCGTCACTTCTTGCCTCCCTTCTTCTTCACAGGGACAGTTCGAAGATCTCCG
TACCACACCACATTCGGCCCGTCCATCTTACGGGTGCCAAACAGCACAGGGATTTCGCGA
CCGACTTCTGCTGTGGGCGCCTGAATCTCGTCCAGTCCGGCAGGAGGACGAGTCTCGGGC
TTGGGCATCATCGCATAGCTGACAACCAGCGCGACGATGAATACGATTGCATAGACCCAT
GCCATATCGTTCTCCTAAGCGATGGACGAACCGCTATACGGGTTCTTGGCTGGGATCCAA
GGGAACCCGCCGAAGTTGTCCAGATTGTTGAATTTGTTCTTGCACGTTTCTTTCAAGTGA
TCGCAGCCTGGGTAGATGGCCACAGTCTGTCCGCCCGCAAGGCTGGCCAGCGGTCTTGCC
ATCGTTACGGTGTCACCCGCATGGGCAGTAATGAATCGCGCGCTGCCGTCTGGGGCGACG
ATCATGCCGCCGGTGTAGTAACCGTCGGGCTGCAATGCTGCGCCCGCTACAGCGACGACC
AGCCCGCTCGCAATCGACAGCACAGCGCCCTCATGCTTGTAGAGCTCGCGATTGACGTTG
CAGCCCTTCAGGTACAGCGTGCGCCTGCACCCGTATTCGAAGCGCGCACGCAGGCCCGGG
CGCTTGATCGATGTGAAGACGGACTCGCACTGGACCTCGATCTGGTTACCGCTGGTCTTG
GCACCAACGACACGCCCTTTCCAATACACAATGAACTGAGCGTCCGGATCGCCATAGTGG
CCGCGATAGATCGTTACTGTGGTCACGTCTTCGGGCGCGAACGCGAGGTACTGTGAAGCG
AACGCATCGTCCCGAGGGAATACCAGCTTGATGGAATCCTTGAACGTGTCGGTCGTCTGT
TTCACGCTATCGCGCTTGACAGGTGACGGAGTGAAGGTCTGCCCCAGCCGGATGATCTCA
TTCACTCCGCTGACGAAGTTCCAGCGGGAAATCCCCTGCACGAATTCATAGAGCTCGATC
GGGGTTCCTGTTTCTAACGACGTCTCATAGTTTGCATATGTCATGACTCAGGTGTCTCCG
CTAGTGCGATGGAGGTCGATACCTGACCGACATCTCTGTGATTAAACGTCACCAGATCCG
TATCGAATCGGACGTGGGACATGAAGCACACAAAGTCGATATCGGTCGTTGCAAAGGCCG
TTCCGATCTGTGCGCTCAGCGACAGCGCTTCGTTCCCGTCGTTATCGGTGCTCCCGGACG
TTACTCGCGCAAAGATGCGAGTTCCGTTGAGGAGCTGGATCATGATATCCTTGACGGTGT
AGTATAGCGGATAACCGATCGGACTTACAGTGATTGAGCTTGCGGTGCTCGCCACGTCCT
GCAATATGACCAGATCACGGTTCCAGGAGGGCAACCAGAACGCGCGCTGCTTTCCGCGTC
GTGCATGGATCCATTTGCGCAGCTTCCACACGTCAGCTTTATTGTTCTTGATGAACGAGA
TCGTCTGCATGAAGCGCACCCAATTCGACGCAATGTCAATCTGGATGGGCCCTGAGCCGT
TGTCGAACATGTCGATCGTTCTGACAATCTTTTCGCTAAGGTCGCCCACCACAGCAGACC
GATCCGTCATAACGGGCTTGCCCCGATATGTGGGGAATGAACCATTATCGCCCAAGTCCT
TGTTCTGCGTCACAAGGAACTGCGCCTTAGCGGTGATATACTTGTTCGCCGCGCGGCTGT
ATTCGACCCCGCTGAGCGTCCTGGCAAAGCGAAGGGGCGCGATATAACACTTGGGCCAAT
TCTTGTCCAGGGGCAGCTTAAGATTGACGCCAGTAGGGGTCACCGTCGTGATCTCCAGCG
CTGCCAGATTGGTATCGGATGCCCACAGCATGATCAGGTCGTCGTCGCGGTAGTCAGCGT
TCGCAGTATCGAACGCAATGAACGACGAACCAGCGGTAAGACCGTTCAGTAGAGGAGTCA
CTTCATCCCAGACTGCAATGCCATAGACGCGGTGTGCCCATTGCGTGCTGATCGCTTTCG
CTCGGCTGAACTGCTGCTCGTCCAGAAGGAACTTGTGTGAGAAAGACTGGCGGGGAGCTT
CGCGCAGCGCAAGACGCTGTTCGTTGTTGAAGCTATCGAGCAGATCGGTCTTCCATTCCA
TCGTCTCGTCGTACCCTGTATCGGGCACAAAAGGCCACAGCACCACACGGCGACCAGTCA
CCGTGAGCGTAGGCGTTTCGGACGGGAAATGGAAGCTATACACAGCATCGACGATCGGAG
GGCCGTTCGTGCTAATGTTGATGGTATAGATGCGAGCTTCGACAGCCGCAAAGTAGGTGG
GCGCCGCTTCGGGTTGCGTGAGAGTAATGCCTTCAGTTCCGACCTGTGTCAAAGAGGACA
ACAGCTTAGGCGTAAAGTAGGCTGACCACACTTCCACGGTTCGAACCTGTGCAGACAATA
GGTTGCCAAGTGCGATCACGCCCGGATTCACGTGGATGCGATTGTAATAGTCGTCCAGGA
AAGACTTCTGGCGATATCCCGTTAGTGTGTCCTGGGGCTCAAGAGAGATTGGCGTATTGT
CTGTGATCGTCCCGTATGAGAAACCAGGCGCAAGCATGACAGGACGATTCGGGGGAACCG
AACCATCTACGAAGTCAAGCTCGTCATAACCCGCCGCAATCTCAGGCGGGTTCTTCTGGC
GCCATTTGTTGTAATCCTGGACCCCGTAGGTCGTGATCACTGCCATGTTACACCACCTTC
AGATAGGCGATTCCGCGCTGGAAGCTGCGCCCTCCCTTGTTGTACCACGGGAAGACCTTC
CAAGTGTCAGAGCCTAGAGTGAATTCGTCGCCGGGCAGATAGTTTGTCATATCCATGTAG
CGGATGCCCGGGACGACACCGATAGGGTGCAGATAGAGGTTCGCTCGATTGACAGATACG
ACATTCGGAGTCAGCAGACCGATATTGTTAAGAGGATTAGGGGCCAGGTCTCGAATCATG
CGGTCATGAGTCCCTCCCCCTTGGCAGGCCTGAGCAAGGTGTGTCGTGGTGGATTGTGTG
CCGGACCCTGCCCAGTTGTCGAATGCGTCAAAAGCACAGCGCACAGCTGAGCCAGATCTC
GCGGAAGAAAGAGGGACTTCAGCGGCCCGGAACGGGACTTCCTCCTGGGACCAAGGGGAG
CCAATTTCGCTCCCAAGCCACGTCGACGACGTGGTGGCATTCGTCACGTGCTCCGCGCCG
GTCGCGTAGAAGAAACGACCACCACCGGGCGTCGAGGCGTTATAAAGATCGAGCGAACCG
AACCCGAGGCGCTGAAACACACCTGTTGAAATCTCAAGCTCCAGATAAATCGTCTTGCTG
TCCGGAGCGAACAGGTAATAAGATGGAAACGGCCCGAAGTTCGTCACCATGGGCAGAAAA
GCGTGATATTGTTCGCTGCCCGCTGTCCCCGCTGGACGCACAGGGTATCCAGGCTGACGG
TCCCAGGCGCTGCCTCCCGCGTATCCATCGGAACCATTCAGAGTGATGCCATATTTGCTG
GCCTGCGTAGAGCCATTGACCAGCAATGAACCGTTCTGGCAGGAACGAAGATTGAAATAG
GCTGTACCTTTCTGCAGACAAAGCTCTTGGCCCGACGCCCACGCTACCCAGCGATTGACT
GTCCAGCCTTGTGCAATAGCGAACAGGCGCAGCTTATCCAGCAGATCTGTCGCTCCGGTT
GCGGTTCCAGTTTCGTATGCCATTCAATTCTCCTTAGGCGGGAAGGGCCAACGCCCAGTA
TTCTTGAACTTCGGTACGCGCGACGTTCTGAAAGACAATGTGGTTAGTCCCGCCTACTGT
TGTCGTGTTCTCGGAAGAGTTACTGAAGCCCGAGATAGCGAATACACCCTCGAGCTCGCC
CCATACTGCCAACGTCGGAAGTCGTTGCAATAGGATAAGCGGTTGAGTGATATAACCCCC
TCCTAGAACCTCGCGATATGGAAGTGTTCCGTCTCCGACAGTAGTGCTATGCACACAAGT
AGGCCAGACACCGATCGCAGGTCCGCCCGTAGCAAAAGGCGACGTAGGGCTCATCGTCAT
CCGCGTGATTGTATTCGGATTCGAAGACGTTGCTCGTTGCCCTGTTGAACGCCATGTCCC
GTCAGGAAGCCTTATGTAAAGAGTCGAATTGGCGAATTGGACAGTAGGTGAAGAGCATGC
GGGCGTCGGGAACACGCTGTGAGTGAAATCGTTATACGAATAACGCCATTCCACGCCCCG
AGCGCTGTTGCTCGGAATCATTGACCCGCCTACCGCTATCGGATAAGGATATTGGCCTGG
CGTTGCGTACGGCAAGAAGAACCCAAGATAGCCCCCCTCGAAACTTGTGGAGACTTTTAA
CCCGAACCTGAAAGAACGACCTGTCGCTGCAAACCAATAAGGCATTGATGTGTTCCAACA
AGGAACCATCGGGCAGATCATGGGATTGACGTCACCGTAACTAGACAACGCGCCAGGCTG
CATAAAGAAATCTAGTACGTTGGCGTCATATCCGGTATAACCCATCAAGAAGAGGTTATA
CCAGCCGTTCGAAGCGTCGTATTCGCAACGAATACCCGTGTAGATATTCTCAGTTCCGGA
ATTGCCGGGCGCTTTGAGAAGTGCCTCACTACCGAAATGATTCGCAATGGTCCCATCATT
CAACTGAAGTAACAAAGAACGCCACGACACCGTGGCGCCGGAACCACTTTGCACGCGATC
AATCAGGATACGCCAATACACATGAGCGCCCGGTGTTCCGGGCACAGCGAAATCCTTCAT
CTCGTTCTGAGCGTATGTTGGATTCGAACTTACTGTCAGTGCGGTAGTCCAAGTCGAATT
ATCGTCAGAGTATTGGAGACGGAAGTTCTGTAGCATCGTCGAGACGTCGCTACTGTTCGG
CGCCCACATACGAACATTCTTGATTTCTCGTGCTGCACGCAATGTCAATGCGATGTAGCT
GGTGCCAGAAGCGTAGCCAGTGCATTGCGTATAACCCTCAGCGGTGTTCGGGTTATTGGT
GTTGAGGGAGCGTGGCGTATAGCGAAACGAGTGGAGGATCTTCCGGGCCGTTGCGGAAGT
AGGCTCCGTCATGTTTGTCGTCATGCCTGCTACGCCATCTCGGAATTGGCGATTCACAAT
CCAATCTTGATTCGCCGCAACGAGCGCAGCATTCGTCGTGAGGAAGGAAATGATCTTACC
GAACAGATCCTCCAAGTTCGACGCGGTGCCTACTTCGTTTGCCATTTAATTCTCCTCTTA
GTAGCCCAGCGCGCGTTGATTGCGCTGAACGACGTTCATAATCAACTGTTCGCCATCGTC
AGTTCCGAGGTAATCTCCGACAATGGACGGATCCAGCACGTTGATGATCTTCGGTGTGAC
CACAGTAGGCTGAGCCGCTGCCTGGTCGCCCTGACCCTGTGCTGCTGTACCCTTGCGAAC
TTGTGTGGGCGTACTGACCGTCACCTGCTCACCGGGCGTTGCCCTAAATGCTACCATTTG
TGAGTCTGCTCCACCAGTACCCCCGACGGTGAAGTTACCGCCGGTCATAAAGCCCTGAGT
CTGCTGGGAGCGGATCGCTGCCACCTGCGCCATACCCTGCGCCACCACGACAGCAGCCAT
CGCCGCTCCGTAGATACCGCCCTGCGCCAGCGCCTTAGTTGCGCCCTCGTAGGTGTTCAT
GATCGCCTGGGTGATTGCCGCAGCCTTACCGATAGCAGCCAGCTCCTTGATGTTGGAGCT
TTGCAGGCTGGCAAGCCCGGAGAAGAAGTTCCGCATGTTCTGCGTCTTCAACTCGTTCTC
ACGCTGCGCCAGCTGAACCTTGGCGTTCGAGTAGTCCTGCTCGCTGATCAGATCGTTCTG
CCTCAGCATGTCGAGCTGGGCATAGTATGTCTGGATCAACTCCAGCTGAGCCTGCATCTG
GCCTTGCATCCCAGCGGTGTCGATACCCATGCCTCCCAGCATGCCCATCACCTGGCCTTG
TGCGTCGCCCGCAGTGAAGCCACTGCTAGGGTTGGCCAGCAGGTTGTTCATCGCTTCGAT
CTGTGTGTTGAACGCGCGGCGCTGCTCGACGCTGTTCGCAAGCATTTGATCCTGAGCTGC
CACCAGTTCGTTCTGGCGTTGCAGCATCTCGATCTTGCTGCGAAGCGCAGCGGTTTCCTC
TTGCGTGAGCGTGATGCCCTGCGAGCGCAGATCCTTCTCGATCTTCATGTACTCGGACTC
AACCTGCCGCGCACGCGAAGACATACCGAGCAGACGGATCTGTTCGTCCATCTCGCGATT
CACCTTGCCCAGCGGATCGATGATGTCCTGATAGTGGAACTTGAGGAGCTCGAGGTAACG
TGCCTGATCCTGTGTGGTTATCAAACCCTTGGCGACCGCCTTGTTGAGCGTCTCCTCAGC
CTTTGCCATTTCCAGCTTCGCACCTTCGACCGGAGCGATCGTGTTCAACAGGCTGCGCAG
TTCGTTCTTGAGCTTCTCAAGTTCTTTGCGCTGCTTCTCCAGTTCCTTCTCGTCCGGGCC
GGGGGCCTTGAAGGTGCCCATCGCTTGGTTCAGATCCACGCCGGTCTGGTTGCCCAAAGC
TGCGGCGCGTTGCTTGCCGATTGCCTGCGCACGGGTGAAGACGCCATCGACCCACTTCTC
CATGAACCCGCCTTGCTGCTGGAAGCCGTCATCGATAGACTGCGCGATGTTCTGACCGTA
GGTCTCGAAGAACTTCGTATCGACTTGCTTCCGGTCAAACTTGACGGTCTCAAGCAGATC
CATCCCGACTGCGCTGCGCATCTTATTCACACCGTTGATCACGGTATTCACAAGGTTCTC
GACAACACCGACGACCGCGTTATAGGTGCGGTTGAACATCTCCTTGATCGCGTCAGGCAC
ACCAGCGAAAGCCCTGACCACAGCGATGCCTAGTCCGGTCAGCAGCCCAGCGATCGCGTC
AATGGTGCGCGCGATACCCTTCGCCACCCCAGCAAAGCCCGAACCGACACCATCATAGAA
GCTGGTATATTGGGCAAGCCAGTTTTTCGTTTCCTGGTCGGTTGCTTGTGTGATCGACTG
ATACACGTCCGCAACGATGTCGCCCAGCCCCGAGAACGCGCTGGAAGCGAGCTCCTTCAG
ATCACTGAATACGACCGCGATGTCCTCGCCCACAGCACGGAACACATCGCCCAGCGTAGT
GACGTCGTCCAGGCCTACGTTGATCTCGTCCCGCATGAGCGTGAGGTAAGTCACGACAGC
AGTGAGCGCGATCACAACAGCGGCCAGCGGATTCGCGGCAAGCACGGCCCACAGCGCCCG
CACAGCGTTCGTTACGGCAGTGATCGCCGTAGGTACGAAGGCAACAGCGATCGCGGCCCC
TACCGACAGCGCTGCCGCTGCAACCATGTCCATATTATCAGCGATCCACTTCATCGCTTG
GCCCAGCGTGTTACTGATGCCCAGTGCAGAATCGGTCTGGCCAATCCAGCGCATGAAGGC
GTTACTGATCAGCGTGAAGCCCTGCGAGATGGTGAAGGATGCCTTGCCGAACTTGGCGTC
AATCTCTTCCGACCCAGCAAGCATGGCATCGAAGAACGCCTTGGAGGTGAGCTTGCCGTC
CAGCATCATCTTCCGGAGCTTGCCGATGCTACCCTCGGCGCCGTCAATGTGGTTCGCGAC
GACTTGCAGGATCGCAGGCGCACCTTCCAAAATGGAGTTGAATTCTTCCGCTCGAACGAT
GCCGCTTCCCAGCGCCTGGCCCATCTGCATGAGCGCGCCTTGCGCCTGCTGTGCGCTGGT
GCTGCTGGCCGCAAGCGTCTTGCCCACGTTCTCCGTGAATTTGATCAGCTGGGCCTGGGA
TGCGCCAAGCTCTTTACCCGATCGCGCGGTTCGACTGTAGAGCTCGACGATATCCGTGAA
GCCCTGGCGGGTGTTCTGTGCTGTCTTGTAGAGCTGCTCCTGCACGGCAGCAGCTTCCGC
GATGTCCTTGGTCGCGATGCGAATCTGCCCGGACGCGCTTGCCCATGCGTCGGCATACTT
GCGGATCTGATCGACTGCGATAAAAGCAGTCAGCGCGCCGAGGGCGCGCTTGAGGATATC
AACACCGCTTGCAGCTTTCTCAGCGGTGTTGCCTACGTCCTCCAGGTTCCGCTTAACGAC
CCGAGAACCGTCTTCTCGGATTCGAATGTCAATAGTTTCGGTCGCCATTACAGCTCCTCT
TTCAAAGCGTTCTGCAACAGGCTTCCGGCGCCCTGCGCAGCAGCGACCCCGACTAAGACT
GCCTTCTCAACAAAGCCCGACGGGGCTTGTGCTGACCAGCCGTCATTCAGCCGTCCGATA
TATGGAAGGTTGTTCGTGATATGGATTGCGGAACCGCCCTTGTACTTAGCGATCTCCGTC
TGACCTTCTGCGATTGCAGCTTGACCAGTTTGATCGAGTGCGTCGCGCGTCCCACTGGCA
GGCCCACCGAGATTGACCTGCCAGTTAGAACGCGCGCGACCCGTATCGACAGGGGTGGCG
ATGACCACAGCGCTATCAACAGCGAGCGCGACCTTCCGCGTCATGGCATCAGCGTTCTTT
TCGATACGCTTACCCATCACACGAATCCGTCCCGCGAACTGTCTCAAGTCGGCCATCTAT
TTGCCCGCTCCTGTTTGTTGCGTGGCGCTCTTCAACTTCTTCGCTTTGAAGTCGAGATAG
ACCTTGTCGAGTGCCTGTATGTGGTAGAACAGATCCTCGCGTTGCTCTCCCTCGATCTCG
TTTGCGTCCGCCCACTCCTTTATGGCGAGCCAGCTGATTGGACCTTCTGTGTTATAGCCA
GTTCCGCGACATGTGGTCAAGTCAAGAAAGGCCATATGGTACATCTCCAGTCCTAGCAGC
AGTTCAGGGGCATTGGCAATCTTCTCCGGTAGCGGTAAGCGTTGTTGAACGCACTGTTGA
ATGATGAACTTTTCTGTGGGGCCCTGCTCCAGGTAGTAGAGCAGGACGTCCGTTAGTTTT
TTGCGTCAGCCTCCCGCACCTCCGCGCGGAAGAGTGCAGCACGCTGGCTCTGCTCCTGGA
TGTCACGGAACAGGTCCGGCAGGTCGTCGAACAGCTTGATGCAGTTCTCGACCGAGAATT
CCATCGCGTTGCCGTTCTCGTCCTCGACGTTCTCCCAGCCAATGACGACGGTCTCGGCAT
ACACTTCTTTGACGATGCGCTCCACCAGCGCGGATTCCATCGTCTCGTTCTGGATCTGGC
GACGGTAGGGCTTCACGCGCGCTTCCATCCGTTTGGCGTAGGCGTTGTTCGAACCGCCCG
CACGCGCCACGCGAATGCAGATCGGCTTGCCCTTGCTGTTTTCACCGTACTCGAGCAGGA
TGCCGTCCTTCTCGAGGGTGTTGTCGGTCTTGAATTGTTTGTAGAGACTCATTAGATCAC
CTCATGGTGCAGTTTCAGGGCGCGGGCACCATTGCTCGCGCCCCTGTAGCTTACACGCCG
CCAGCCACGTCAGGCAAGTAGGAGAAGCTCTGGAAGAGCAGGGTGTGGCCGAATTTGGAT
TCAGCCGCGTTGTTTTCCAGAGGCAGAGTGATCGCCTGGTCTTGCTCAACCGCCAGACGA
CCATCACCCAGCGACAGCAGCGGGATATCCCACAGCAGCGCGAGGTTCTTCTTCAGCATG
ACGATATCGACCGTCACGTCGCTGTTATTGCGCACAGCCTGCACAGCGGTGACATCCGCG
AAGTAGGCCGTCGTACTGCCGCCCACCTCGAAGGTGCCCGCGCTGGTGTCGAATGCGCCC
AGCACGCCGATCGCCTTGTTCGGGCTCACGTTGTTATTCACCGACAGCGACATTTCGGTC
GCAAAGGCAAACAACGGAGTCGGAGCGGCGTCAGTGCTGCTGGCCAGCGCCAACTTGATA
CGGCTGAAGTCGCTGGAGGTGTTGAACGCGGAACCCGGAACCAGCGTGGGGCGGGTGCCT
GACTTCACGCCCTGGGTGCCAGTGCGCTGTTCGTTATCCACCGCAACGAAGGTGAGATCC
ATCGTCACCTTGTCAGCCTGTGCGATGTTGAGCGTCAGCTCGTTCGGCACAGCGCCCACA
AGGTATTCGGACATCGTACCGTTGGCGTCGGCGCCCAGCGTGCGCTCCACTTGGTAGGTC
CGGCGCTTGATCAGCGTCGGATCGCTTTCGTTCTTCAGCACAGAACCGAAGAAGATGCGA
ATCGTCTTGCCGGTGCCAACTTCCGCTTGCGGGGTCCAGGACACCTTGTCGAATTCCAGG
TATGCAGCGTTGATGACGCTCACACGAGCGAATCCACGGTTGTTCGTGAATTGCGTGCCA
ACAGCATCGCCGCCCACATACACCCATTCGCCAGCAATCAGCCCCAGCGTGGTCAGGTCG
AATACACCGCTGGAACGGGTCAGACGAACAAGCGAACCGTTCATCGTAACGTCCAGAGTC
GCGCTTGCGAACTGATAGCCCACAGCTTCCAACTTGGCAGCAGCAGGCGGGGACGCTTCG
TCGGAGATCACCTCGTTGATGACCACAGCGGTCGCAGTGCTCGCGCTGGCGACGCTCTTC
AGGCCGTTGTTGGCGGTGACACCGAAGCCCGACGCCATGATCAGCTGGTTGGCCAGGAAG
CCGGTCAGCCCTGCTGCGGCAGCGTAGGTCTTGGACGCGCCGGTGACACCAGTGATCGGC
GTTGCAGCCGTGTTCATGGGTGCAGTGGTTTTCTTCTCACGGATGTCCGCGAAGAAGAAG
CCTTGCAGCAGGCGGGTCGTGTTGTTGAAGGTCAGATCCTGGTTGAAACCGCCGGAGGCG
TCCAGGTCAGTCGTCACGCCCTTCTTGCGCTGGCGCGACGGGTTGATGGGGTTGCGGGCC
ACGGTAGCAATCTGGCCGCCGAAGTCCGCATAGGAGTTCGGTTCCAGAGGATACCAGACC
GGCGAACCGGGAAGGGTTTTGAGAGAAGCCTCTTCGGCGAACCGGAGGCCGGTTACGTTC
GAATCGATCTTGTTTGCCATGTGATCACCTCACGTCGTCATAAGAGAAGGTTGCCAGGAC
GTTCAATTGCTCAAACGCCCCACTCGTCCCAGCTTCATTCATCCGCACGTCTCGGAACCA
GACATTTGGATGTCGGGCGGCCTGGAAAGCATCCACCACGAGCTGGGCTGCATCGTATCC
GGCCTTGGAGCCATCTCCCACGGGGGCGAACACTTGGATATAGACTGTTCCAGTGCGCGA
CCAGCGCTTCGCACCTTGATCGTCGGATAACGATGCTTGACGACCAGTTGCGTGCCGGAT
TGTAGCACGAGCCCACACTGTCTCGCTAGTGGGAGCACTGCCGGGCACATCAGTCCAAAC
GGCAGGGAACCCCGTCGGATCCCATGCCGCCTTGAAAAACCCGAGGATGATATCGCGCGC
TTCATCGAATGTCATCGCTTCACCCCGAATACATACAGGACGACCAGCGGGCCAGGCTTG
AGTGCTTGCGCCCAATCGATATTCCAGCGAACACCGTCGTCAAGAATTGCGTGGAAGTCT
TCCAGCGACACGTCTGTCGGTGCAACGAGTGCGACCTGCTCAACACGATCCAGGAGCTCT
TCCTTGACAATATCGCGCCCCAGGCCCGAACCAGACGCAGGCACGAACACAGCAGGCAGC
ACCTTGGCCAGCGCTACAGCAGGGGCGCCCGGGCCCTTCCAGGGCTTGCTAGTGTCAGCG
GCGGTAGCATCCAGCTTCTGGAGTGTGACCTGCCTACCGTTCTCGGCGATCAGTTCCTGT
GCCAGCTGGACGAATTCATTGTAGTCGGTAGTCATAGATCACCTGATAACCTGGCTTGCC
GAATAAACCAGCCCCCGCAACAGCATATCCGCCGCAGGGTACGGACGGAACAGCATAGGG
GTGGCGCCAAGGCCGGTCTGCGGAACAGCGAATTCCGTCTCGATCGGGCCGACCTTCTTT
TTCGTTGCGACAACAGTGAGCCCGCTGGCATCAACCTTGAGATCAGGCGCCAGTTCAGCA
GTCAGAGCGCGCAAAGCGTATTCGCAGCACGCGCGGCGCAGCTTCACAGGGATATCCGTG
TCAGCGAAGTCGGCTGCACCAGTGCGAGGCCATGCCAGAGCCTGTGTGGTCGTCTTCTTG
CTACCGATGAAGCGCTGTCCGAAGCGCCCCTCGATGTAATCTGTGGCCTTGATCAGCGCG
GACTGCTTCACAGCATCCGCACCCGTCCAGCCTGTCATTCCGCGGTCAGCAAAGTACCCA
TCAGCTTCCGCGATAGTGACGTACGAAGTGGCGTCTGCCTTTGCAGTACCGTCTTCAACA
ACGAACGCCATTATGCACCTCCGATCTTAGAGAAGCGACCCAGGCCGGTATCGAGCAGCA
CTTCGAAGCCAGCTGCCGGAGTGACCACAGCAGCGCGCTCGACATAGTCCAGCGTCATGG
ATTCGCCTGCCGCGAGGGCCGGAGTCTTGATCGTTCGGTTGCTGGTTCCCGCGATGGTTG
CAGCGGTAGTTCCGGCAGTTGCGCCGGCTACGCTCTTGAGTGCGAGGCGCGCACCAGCAG
GCAGGGTGACCGCTCCGACGGCAGGAGTATCGATCAGCGCCGCGAATGCTGTGCGGTTCT
GACGCCCTTTCCGGTTCTTTGCGATCACCTGTGCCTGCTTCATTGCTTAGCCCCCGCGAG
TGTTGCGACGTGCGCGAGCAGCGTCGATCGGCGCCTTCAGGTTGCTTGCCAGCTCCTTCA
GGTTGATGCCGCTTTCGCGGATCATCTGCTGGCGGGCAGCACGCGCTTCCAGGTTCTTGC
GCTGGGCGGCCAGATAGTCCTGGATGTCGTTGCCGGTGCTGCGCTGCGGACGCGCTTCTT
CCAGCTTGACGCGAAGCTCGTCTTCCTTCGCACGCGCTTCTTCGAAGGCCTTATCAACCT
CGGCCTTGTGCGCGCGAATCTTGCTCACGAGCTCTTCTTGCTCGGCCAGCGTCTCTTCGA
GCGCCGCGATGTCATCGGCTGCCACGCCAGCGGAACCTTCCATCTTGGGCTGTTCGGCTT
GCCCAGCATCGAGGTCATCAGCTCGCTGGTCGGATTCGGTTGCCTGCGAGGCTTGCGGGG
CCGTTTGCGGGGCGGCAGGGGCCGCGCTTTGCTGCTGCTCACCGCTACCCCCTTGGCCTT
GTGCTTGCGGGGCCTGCTGTTCGGCGCTGGGCGCGGTGTAGCCGGTTGCAGTGGTACGGG
AAAAGCCAGGCGCCGCCGCAGCGACGGAATCGCGGGTCAGGGTCTGGTCGGATGCCAGCA
TCTTCACGGTATCCAGGCGCGGGAGACCGTCGGCTGTCCAATGGTTGTCGTTCTTGACAT
CCAGCTTGAGCAGCGCTTCAACAATCTTGTTCGTCATGAGTCATTCTCCGGTGTGTGGTT
AAGAAACGGACGCCCGCATTATACTGACCACATGCAGGCGTCCGCTACCCTTAGTCGTCG
CCGAGAACGCTATAGACGATATGGAGCTCACCGCTGGCAGTCAGGGACTGGCTGTCGGCG
CTGATGTTGGCATCGTCGATCAGCAGGTTCAGGTTGAGTTCCAGGGATCCGTCGGTGTTG
TCCAGGATCACTTGCGTGGCATTGGTGCCACGTGCGCGCGGGGACACGCCAGCGGTGGCT
GCACCCAGCGCGGTCGAAGCAATGATATCCACTTCGGAACCGCTCAGAGTGGCGTCAGCG
GTCGGCGCGCTGCCGATGCTGTAGTCACCGTCGAACGTATCCTGCACGCCAGCGGCGGTC
GCCTTGGTGATCTGCACGTACGACACCGCACCGAGGAACAGGATGTTCCCTTCCGGCAGG
TCGCCCAGGACAGCAGTGCCGAAGCCCACGCCGGTCGCGCCATTGACAGTGATCGGGAGC
TTGTTCAGCTTGACGACCTGCTTGACAACGTCTTGACGGGCAGGGGAGCCCCGGCTGGTA
GAACGAGGAAGGCCTTTCATGATCGCATCTCCTTTAGAGGGTTAAATCCGAAACAGGGGT
CTTGCGACCCCTGTTCCAGTGCAGATTAGAACTCGCGGGTGATGAGACGCGCGATCCGGA
TCTGCTTCCGCTCCGAGAAGACACGCTTCCACGAATCGGCGTGAGCCAGGTTGTTCGTGG
TGGAGGCGTTGCTCGGGCCACCGTTCGGCGGGGTGCCAGCGTAGGCGTGGCCGACCGGAT
GGATGATCCACTCGGTGCGGTTGAACAGGATGTCCTGGCCACCGCCGTTACCTGCGCTCG
GCTTGCGATCGACTTCCGTCGGCACCTTGGGCGAACCCATGCCACCGCGAACAGCACCAC
GACCGAACAGCCAGGTGTTGAACACACCGCTGGAGCGAGGCACGCCGTCATCGACGATCA
CTTCGCGGCCCAGGAAGGTCGGGATGCGAACCGCATTGCCATTGACGCTGTCCGACACGA
AGTCGATCAGGTTGTTCTTCAGCATGCGCGCATAGACAATGGAATGCACCATCACCATCG
TGAGGTCTTCCATGCTGTCGCCCATGGTAGCGGTGGCGTCGATGAACGACTCCGCGCTGA
AGTTCGTCACACCATCCACGAAGCTGGCGCCGGAAACGTCATGGGTCATGTCGTTCTGGA
CGTGCTCGGTGCCGGTGGGCGCTGCGGCGTTGTCCGCGAACACACCGTTCAGGGTCGCAA
CGAATGCGGCCTGCTGGCGGCGGGTCCAGTAGTCGGACACACGGTTGGCGATCGCTTGCA
TCGGATCCGCACCAGCGAGGTCGCCGGACAGGTCCATGGAGCTCCAGGAGTTGTTCCGCG
ACAGGCGGACCTGGATCTCGGTAGCAGTGCCGATCTTGTTGGGCGTGCTGTCGGTCGCCG
GATCATCGGTCGAGACGTTTTCGGCGTCGTTGTCCAGATCCTTGAAGGACGGCTCGTTGA
AGGTCAGACCGCCACCCGCGAGGGCGCTGTTGAGTTGGGCATCCAGGACGATCGCGCCGG
AACGGATCAGGCGGGACTTTTCCTGGGTCATTTGCTGGACGTAGGGCGAGAAGATCTCGG
GAACGACGACGTCAGCGATACGAGTTACACCGGAAGCCATATGAATTCTCCTAAAAAGGT
TCGGATCAAGTTTGCTAGACTCGAATCCAGCACCCCATGGCCTGGCGTTCGATCGTTAGT
ATGGCTCATGCCACAATGATCGCAATGTAGCATGAGCCAGTCTAGCTTGCAAGCCCCTGA
GTTTGATTATTTGCGGGGCTGCGGGCGCGGGCCCCCGATGGTAGTGCCAGCGCTCTTGGC
CATCTGCTCGGCACGGGAACGGTTCTCCTTGAGGATCCGACCCTGCTCCGTCATGTTCCA
GCCATCAGCGCTCCACGGGTTCGCACCGCCACCGCTGCCGCTACGGTTGCCACCAGCGCC
ACCTCCTTGCGACGGGCCCCACCAGTGAGTCTTCTTGGACTGCATCTCGGTCAGCCACAC
GGTGGCATCGATACCGGGAGTCACGCCCACGCCGTCACGGGTAACGACCTTGCCTTCTTC
ATTGACTTCGAGCATGCGCTCGGCGTACAGAAGGGCGTCTTCCACTGCACTGGACTGGAA
GCCCTGTGCCTTGCCCACAGCTTCGCGGACAGCGTCGTGGATGGTGCGGGTCTTTTCCTT
GGACTGGAACTGCTCGACGACGCCAGAGAGCTCCTGCACGCGCTGAGCCAGCTGGCCCTT
CTCGCGCTCGAGCGGGGCGACACGGGTCTTGATGCGGCCTTCGACCAGTTCGTTGAGCTT
GTTCTCATCCAGCTTGCCTGCGGCCGCAGCTTCCAGTTCCGGAACGCGGTCCAGGGTTGC
CAGCACGTCCTCGATCTTACGATCGCCGAGCAAGCCAAGACGCTCACGGACGGCCTTGTG
GTCATTCCGTTCCTTGGTGAGCGCACCCTGCAGACGTTCGACATCCGCCTGGGTCTTCAT
TCCTTCCACCTGGAGTTCGAACTTACCGTTCTTCTCCACATACTCTTTCTTGACGTCTTC
GGGAAGGTCGTCGATCGAATCAAGAATCGCTTTGAGAGCCATGCTCCATCTCCTAGTCAA
ATGCCACTCATGTGGCGGGTTGCTGACCACACCATTGTGATCAATACTTACTCGGGTCCA
GCCCAGCGGCACGGAATGCGTCTGCGTGCTTCTGTGCAAGCTCCCGAAGGGTTAATTCGT
CTCCGTTGCGATGAACGAACTTGTCCAGTTCCAATCCACCGTCGCGGAACAGCTTTGCCT
TCGTTACGCCCATCACTTCATCCTGGAACGCAACAGACTGACCCTTGAGCCACGTCTGGT
AGCTGGTCGAGGCAGGGATCGGCCCCACCAGTTCCCGCACCCTTCCGCGCGCCCACTTGT
CGTAATCACCTTTCGTTCCACGCGGCAGCGCGTCACGAGAGCTGATGTCGCCCAGGCCGT
TCTTGTCTGCATATTCCTTCACCAGGATCTTTTCCGTGGTAGGCTTTGCAGGACGGTCAC
CGGCGAGCGTACCATCAATCGCGGCGATACGCAAGGACCGGCAGTTGAAATGCAACGGCG
GGCGCGGACCCTTGCCCACGGGGAACGTCTTTCCATCAAGGCTGCGACAGATGGGCGTCG
TCCTGGAGTCCAGCGTCGCCACGAACTGTTCCGCGGTAAGGATGTCCGCATTGTCAGCGA
ACCATGCGTCGCGCGCACCGTTGGCAATGTGCTGCACAGCAGTCCGGGTGATCGTTTGGA
TCTGCCTACGGGTGATCTCCGTTACACCGTCAGCGCCTCTGAGCGTACCAGTCCCGACCA
CACGTCGCGCGATGGTCGCCATATCCTCGCCTGCTACCATGCCCGCCTGGATGGAGCTAT
GGATGCGCCGAATGTCGTCCGCTGCCATCGTGTCTGCCCATTCCTTGAGGATGCGGCCCT
CGAACGGGCGAGACAGTGCGATCTGGCGCAGGAACCGCGCGCTGGGCATGACGGTCTCGA
CCGCTACAGGCAGCACCGTCTTGAAGATGGCGTCAAGTTGAATCGGTTCCTGGTACGACA
GCTGAACCATTTCCTCGGTCAGGAACTTGGTTGCTTCGTCCCACGACTCTTTTCGGATTG
CGGCCAGCGTACCCTGCAAGGCTTCCAGACGCTGCCACTCCACAGGCTTCGTCAGACCTT
GCATCGTGCGCAGCTTGTCGCGAATACGACGAGCCAACTCATCCTCGCTGGCGTTCAGAA
TCGTGGTCATGCGGTTGCGGACATACCCGCTATAGCGCAGGATGTAGATCTGATGACGCA
CCAGTGCGTCCAGAAACTCCTCGTTGGCTGTCTTGGCCATGGGTTACGCTCCCGCGCCGC
CTTGCGGGGGCTGCTGTTGCTGCTGCCCACCTTGCTGGCCCTGCTGCCCCTGCATACCGG
GCTCCAGCGCTGGGTCGCCCCCTGCGCCCGTACCGCCGCCCGACGGTGCGTTGGCGTCCT
CTTCCCCGATCTCTTCCATCTCGGCATCGAAGTCCATCTTCGTTACACCGCGATCCACCA
GCATCGCATGGATGGACTTCTTGGACAGCGGTGCGCCCATGGTGCGCGCGGTCATGAAAT
CGACTAGATCCTTACCTGACATCTCGAAGTCAGCGAACTCGAGGTTCGGAGTGACTTTCA
CGTCGTCGGGGTTGGCGCCCATCCACTGAGCGCACATGCGCAACAGCGATTCCAGCGCAG
ACGCACCAGTCATCGCAATCTGGTTCAGCGTCGCAGTTTGTGCGCCAATACGGGTCTGCA
GAGCGGAGCCGCTTTCGGTGTTGTTACCGCCAGAGTTGATCAGCTGACCCGAACGGGTTT
CTGCACGCTTGCGGTCGTTCTCGAGCGCCTGGCGCTGCTCGGACAGGCCCTGCGAATTGA
CGCCGATGTACTTCGCGTCACCGCCTTGCTCCACTTCGATCATGCTGCCTGCACCAGTGC
GGAGCGGTGTGCCTTCGTCCTCAGCGGCATCGGTTTTCTTGACACCGCCCACGACGACCA
GCGTGTCCTGGCCCTGCATGAACAAGTTCTGGCGGTAGTCCGCTTCGCCCCGATACACTG
CAAGCGCAAGCCTGCCCAGGCCCAGGAGCGGAGGTTCGTCCGGCGTGCTGACGATGTCCT
TCGTATTGACGAACACGAACGGAATCTTATCCAACGTCACGCCGCGCAGTTGCGGAGGCT
GCATCTGTGTCTCGTCGTACGATGCAGACTGGCCGTCGTTGTTCGTGAAGACGCCGACTT
GATACACTGCACCAGCGCCCTCAGCTTCGTTCTCGTCCTTCGCGCCTAGCTGGAGGATGC
GATACTTGGTCTGCGACACCCATTCGAAGTCCGTGCTGCGACGGAAACCGCTTTCGTCCA
GGACCACAAGGTTCAGTCGCGCTTCACCTTCGTCCGCCTCGCCGTCGTCCCAGTTCCGAA
TGGACTCAGCCACGTACATGGCGATATAAGGCATCGGATTGGTCGGATCGGGATTCACGG
GCAGGTCAAGCAGCAGACCAAGGCGCCCGGTGACAAGCTGTTCTTCGTTGATGCGCCGCA
GCAGCAGCTCCAGGGGCTCACCGTAGGCGGTAGCCTTGTCGCGGAGCGCTTCCATGGTAG
CAGGCAGCTCGATCGTCGGGGTCTTCTGCCACATGAGGCCGATGTAGGCTTCCACACCTT
CTTTCACGTAGTCGTGGAACACCGCGCGGAGCTTGTATGCGTCATAGGCCTCGCGCCCAG
GCTTGCCCGAATCCATGCCGTCCAGTCGCATGCCCTTGGTCGGCGGCAGGTACGTCTCGC
CCTTCGCCTTTACCGCGCGCTCACCTTTGTAGAGGTCGCGCATGGTGACCCAATCCTCTT
TGAATTCCGAATACTTCGGATGAACCGAATCAAGTGCCATTTTGCGCCTCCGTCAATAAG
TGCCCGTAACTGTACCCGATTTCGTAATGATTCGTCCAGCGGGCCAGTGCCAGTCAATAA
AATACCCGATCGCTGTGGTGATATGCTGATACTGGTTCTTCTGATCCTCTTGGAAAGACG
AACCTGCCTGGAGCTGCACAGTGCTCAACCCCTTGTGGCACCACAGCGCAGTCTGAGGAT
TCACCTTCAACCTCACTTCGCCTTTCGCATTGCAGATCATCGCGCGCACAGCGTTCTGGC
GGTCCTTGATAGCAGGGTGCGCAGGACGCACGCGCCGCTCGAACTTCCAGCCGTGCAAGC
GTAGCACGTCTTCGATCTCGGTGTAGTCGGATTTGTGCCCGTGCTTCTCACCCGCGCGAC
CTGCCGGGTCGCCGTAGATATAGACTGTCTTGTTCTTGTGTTCCTTGTACTTCTCGACGA
ACTCGATTGCCGACTGACGGCTCACCGCACTCTCAAGAACGATCTCATCTAGGAAGAAGG
GAACTCCATTGCGGATGACCACAATAGCCGAGCTCAGCGGGGTGAAGTTCTGGTCGTGCG
TCCAGTGCAGCGCTTCGTGAGGGAGGATCCGCTCGGTTGTGAAATTCTCCTTGGAGTAGT
CCTCATAGATACGACCGCTGGCGGTCTCGAAGCTCGCTCGATATTCCTGATTGTACTGCT
TCCGCGACATGGTGCGCTTCGCAGCTTCAATGACGTCTGGCGGGAGAATCTCTTCCGACG
TCCAGTGGAACAGCGCCCAGTCGGGGTCGTTGGCGGTGCGTGCATATTCCGCCATGTCAT
AATAGTGGTTCAGACCGTCGGGCACGCCAATGAACCAGCACCAGGCCCGATAGTACGGGC
GCGTCGGATTCACGGTGTTGAGCGCGGGCATGATGTTCGCTTGCAGCGCCTCACCCTTCA
CGTCCGCAATTTCGTCGATCACACCGCCTGTCCAGTTGATACCTTCAATCCGCTGGGGCT
GGTCCAGACCGATGATGTGAATCTCGGTTCCGTTGGGCAGGTAGATCTTGAGTTCGGACT
CGCTAGGCTTCTTGGGGTGCATGCACGACAGCGTCAGCGCCTTGAGGTCGTCCCACCAGA
TCTTCTTGGCCTGGTTGTATGTGGGCGCGGCTGCGAAATACTTCTCGCCCGGATACCACA
TCGCCTGACGTGACAGAAAACGCTTGGCGCGTTCCGTCTTGCCTGAGCGTCGTCCTGCGG
GCACAATGGGGAAGCGCACACCGTCTTCAACGGCACGCAACAGCCGAAGCTGAACCTCGT
GGTCCTTCAGCTGATACCAGCGCGCCATCTGGCGTTCTAGAATGATCTTGCTCATACAGG
CGCCCTCGTCGCAAACTCGCGGAAGGCGTCAATGAGAGCTTGCTCACCTTCTTCACCGCC
GTCAGGACGGTCAAGGCCGTATATGCTGGCCAGCTTGGCGGCAGCTTGTACGCGGGAAGC
GTAGGGGCCATTCTGTGCAGCCTGGCGCAGCACGCTCAGGATCAGGGCACGGTCTTCCTT
AGCTTGGGCGTCTTCGTTTTCAGGGGTCGCGCGTTGCAGTTCAGTGATCCGGCGTTGGAC
ATAAGCCTCGCCCATGAACTTCTTCGCGTACTCCACGGCGAAAGCAGCCTGAAACCCTAC
GCGAAGGCAAGCCTGGAAAGGATCGAAATCCTTTATGTACTCCTGAACGAATAGATCACG
AAGGGCCTTTTCTTGACCGGACGGTTCCGGCTCCATGAGCCGAGGATCCAGATATAGACC
CGATGTGTTCTCAGCCATGTGGGAACTCCAATCGGATAGTTAAGGCGGATCACCCGCCCA
ATTTGATCGGAGTATAGCGATTCTGAGGCCGGATACGCAACCAGAATATCAGGGCGAGAT
TTTGCGGCAAGCCGGCAATTCTGCAGGCTTTTGGCCGGTGTTCCACTCAATAAGGCGGGC
CATTTTGGACGCGCATTCGCAGAAGGACGTTATCCAGTCCTGACGCGAATCAATGAGGTC
TTTTGTCACTACCAGCTGACGATCCGCTGCCTGCTGGCACTGCTGCACCAGCCCCTCGGG
AGGTACTGCCCGTTCCACCTTTGTCACTACCCGAATTTCCGGTGTCGCAGGTGTTGTTGA
GCAAGCAGGCAAGATCAGGAGGGATGCGCTGATTAAGATAATTCCGAACAGTTTCATTTG
ACTTCTCCAAGGTTGCGAGACGGTTACGCGCGCGAGCATCGTTGTCCGCCAGCACCTTGT
AATCGGTCAGCAGCCCCGTGAGGGCCTGTGCATCCTGGAGACGAAGTTCTTTCAGCTCGC
CGATGGTTTCCTGCTGCTGCTGATTGACCGATTCCACTGCGCCCAGGCGCTGCTGAACTG
TCTGAAGCTCGTTCTGTGTGGTCAGCAGCGATTTCTCCGTGCGTTCCTTGGATAACCACA
TGCTGAAGGTGAAGCCGGCCGCAGCCACTATCACCGCGATCAAGACATACTCGATGACGA
GCCTGGTCTTGTTCTTGAAGAAGCCCAAGGCACTTGCGAGCCAGGGCAGCTTAGTCAGCA
GAAGGGTGATCATCGGCGCGCTCCCGGATGGGTTCGGAGGGTTGCTTCTCGATACCGAGC
TTCTTCAGCACGATGGACTCGAGCATGCGGATCGTGGCGTTAGCCCCCAGCCAACCTGAC
ACGCCAACGATCACACCCGTCCATTGCTCGGACAGGTTCATCGCCTGGCACACCAGCAAC
ATCAGCAGGCCAACGAAACCAGCCGCGCCACCCTCCAGAGCTGCGCGACTCCACTTGATT
TTCTGACGGCTGTCGATGGTTCGCATGAGATGCCCCATCATACCTCCGAACATGGCGAAG
AGCCCGTAGGCCAACGCCTTAATCCACCAGCTATTCCACGGATCTTCCGGCAACATATTT
GGACCCCTATTCGATTGATTTCGACAGAGGCCCATGCCCTGTTTCGCGGATAGTACCACA
TGCGAAACGCATCAAGCTACAGGAATCAAACTACAGCTCAAGCGCGAACCGATCCAGCAT
GCCTTTATCAAACTTGGCGCGGACCTTGCTCGCTGCTTCAGCCTTCGTGATCTTCCCGTC
GCGATTCGCATCCAGACCAGCGTTCTGGCGGTAACTGATCTTCGGATCCAGGAACAGAAC
GGAATCCTCTGCCTGCCCCACGAACTTGGGCATCAGGATCGCCATATACATGTCGCTGAG
CGTACCGATGCGGGAAGCATAGGGGCGGAAATACTTCTGAACGTAATCCAGCTGATCCAC
AGCGCTCATGGCTGCCAGCTCCGTGGTACTGGTGCCCAGGCCTTGCGCAGTGCTGGGCAT
GAATTGGATGAGTCCGGTGGCGCCGCTGCCTGCTGCATTGCGCACGCTGGGGCTGAAGGT
CTCGCCGGATTCGAACGCCATGCAGGACATGAGCCAGCTGGCATGCGTTTCACGGTTCCA
CTTGAAGCCATCGCAGATGGCAAACACTTTGTCACGGAAGGCCTGATCGACCTTTTTGCC
CCAGGCAAGTTTCATATCCAGCTCCTGATGAGGTTGATCGCGAGGATAATCACTGCCCAG
AGTGGAATGCTCAGCAAGACGCCATTCACTACACCGCGAGCCGCATCAAGATCGTCTTCC
ATTTGTCAGACCCTCACGAAAACTGGCCCGAGTGTAGCAGGCTCGGGCCAGTAATAGCAA
GTTGATCAGCTTAGTGGGTGAGCCAATACCCCAGCGCAGCGGCAGCAGCCAGCACACACA
GCGCGATCGCATGCGCGCCAATACCCATGGGCCACCGCCAGTACGCGCGCGGCTGCTGCG
GCCCCTGCTCGTCGCGCAGTGCTGCCTCCAGTTCCTTGGCCAGCAACTTAGCTCGCTTGC
GCTCCTCCCGCGCCTTGAGGCGACGCTCGTGCTCCTCCATAATTGCCTTAGCGGTCTCTG
GTGACATTGGAAATCGTGGAATCACTTTGCGTCTCCTATTGGCGCGCTAGTGCCTACGCG
CAGATGGTTCTTCATATCCACAGGAATCACATCGAACCCCATGTACTTCCTTGAGTCCGG
TCCGGTTACTTGCAGATCTGCCTGGTGTGCGTTGGCGCGAATGAGGGCCCATTCCTCCCG
ACCCACATACAGCAGGTCAGGCCAATTGTTCCCGTCACGCCCGAGCATCTTTTCCTGGGC
TGTAGCCTGGCGCCACACCTCGTTTTGAATGTCTTGATATTTCATGCTGCCCTCACCACT
ACGCCCGAACCGACGTAACCGACGCGGATCTTAACAGGTCCGCGCTCCATGACGATGTGG
GGCTCTCGCTGCACAATCTCGAAACCCTCACGCTTCTTTGCCTCCACTGCTTCGCGGAGC
TCACTCTGCAATCGCTTTTCCATAATGATCAACCTTCTTGCCGAAGAAATAGGTGCCCAC
ACGCAGACGACCGTCGTCCAGCTTCACGATGTTTGTGTAGTAGTCGCCTCCAAGACGAAT
CCACTGATTGGAATCATCGATCTTGGTCTGAACCTCGATGCGACAGGAGGTGGCCTGGAG
CTTCACGCGCATACGACGCGAGGTGATCTCCTTGGTGACCGGATTGCGGCGTTGAACGTC
TTTCTGGTAGTGCCCGAAGCGGTCGGCTTCCCATCCGCATTCCTTGAGCACATCGATCAG
CTCTTGCTGTTTCTTCGCCATTGTGGTCTTGCCGCAACGACGCCCGAACATCACGATTTC
CATGGTGTTCTCCTTTGGAATTGAGTACATGGGCACAGTATAAACGGGCGTTACAGGATG
CGCAAGCCCGTTTATATGGTTTCCCTAGTCCCGGAGAAGCATGAGCTGGCGCTGGAGCAT
CTGCACCGACGCCAGGCTGTCGAGCATCAGATCCAGCAGTGCATGGAGGTTCTGCCGGTT
GAGGTCGGCTTCCTGCCCGTGGTTATCGAGACAGGCGGCCTGGTACATGTGCAGCGCTGC
ATCGTAGCGTCGCTGATATACGGTGTTCTTCAGGACTTCTTCCTGCATCGCCTGCAGAAG
CTGTGCTCGATCCATCATTTCGCCACCTTACGAATGATCTCGACCTTGCCATGCACTGTC
TCAGTCTCGACCTTGCCAGTCTTGTGGTTCTTGACCGGAATCCCGAAGACTGCCTGCTTA
TAGCGAATGACGTAGCCATGTTCGACGTCCGCCACAGTGCAACGGGTCTGACGCTTACCA
TCCAACAGCACGTCGAACATCTTGCAATAATCCATCGAGTTCTCGCTGATGGACAAGCGC
TTCGGGTGCATGTTCATCATGCCTCCACAGGTTTCCAGGCACCCGTCTGGAGCATGCGAC
GCATCCAGTTATAGGCGAAGGTCTCGAAGTCCTCGTGGCTGATTTCACAGCGCATAGGGG
AGTGAGCCTGACCACACTGATAGGCCACGTTCGCCTCGATCAGGATGCGCCACTTGCGCT
TGCCATTCTGGCGGAACACGACGATCGGGCGCCCGCCGAACTGCTGCGCAGCGGTGACGC
ACTGCTTCCACCATGCGTTCAGATCCAGTTGCTCCTGACGCTTGACTTCCAGGCACATGA
GCACGGGGTTCGTGATGTCGCTGCCGCCGACTGCGGACTGGTTCTGGTTGCGCTGGAAGA
TCGGCTTGGTGGGATAGGGCAAGCCCTCGTCCTTGAGCGCACGGTAGGCAATGCCGTTGA
GCCAGTCGCAGACCTCACGCTCCCCGCTTTGCCCCTTCTGTCTGATGTTTATCGACATCT
AGTTTTCCTCGTTATTGAACAGGCGTACAGTAAAACAGGGCTCACCCGTTCATACAAGAT
GAGCCCTGCAAGTTATCACGGAATCTCGCAGGCGCCGGACGTGCAGGCCAAGGTCTGCAT
CGCCACGGTGTTGTCCGTCTTCTCGTAGGTGGCCAGATCACGCCAATCGACTTCCGGAAC
AGGGTGTTCCTTCTGCCACTGAGCGAACTCTTCAGGCGTCATGTCCTGATAGGGCGCCTG
CTGATAGGTGTGATCGGTATGTGGAAGGAAGCTGATGCCCGACACCTCGTCGAAGTGCTC
ATAGACCCAGGCGCCTACCGACAGCCATTCCTCGTCACGCACGGTGACAGTGACGGAAGG
CTTGTGCTCACACCACTCACGTTGATACAGTAACCACAGTTCCAGGGCCTGCATCGCAGT
CACCTGATCACGGGTCACAGCACCATCTGGCGCGGACATGGCGAAGCTCACGACGGCCGT
GCTGTCCGGACGCATGACATCGTCTTCGGTGACGAAGCCCTTGTCCTTCATGAACTGGTA
GAGCGGATCCTTCTTATCGACGCGCACCGTGCGGATATAGTTCCGATTGTGGCGTGCGTG
GATACCGCTGGCGGTGTTGCAGAGCTGGCTCACGGTGCCCGACGGCTTGACGCAAGTGAT
GGCCGCAGAAGGCTTGATGCCCAGAGCTTCCGCCCACTCGGCATTCACGAGACGTGCGTG
GTCACGCATGCTGTTCAGGGTGTGCGTGAGCTTGTCGGCGCCCAGCTGGCCGGAGGTCAG
CGCGTTGTCCATGATGCCCGTCAAGCTGACGCCCAGCAGAGCTTCCTCGGCAGTGTTGCG
CGCCCAGGCTTCCGACACGAACTTGAAGTCAGTGAGGGTGGCTTGCAGGGTGCCCAGGAT
GGTGGCGATCTCGACCTTCTCCATCAACGTGACCATCGTGTCGTCTTCACGGATCACGAC
TTCGGACAGGTTGCAGAGTTGCTTGTCGCGCAGGATGATCTCGGAGCACGGGTTGCAGCC
GTAGGACAGTTCCTTGGAGCGGCGACCCCAGCGCGAAGCCTGTGCAGCAGCGGCGCGACG
GTTGAAGATACCGCGCTCACCGGACTTGGACTTCACGAGCGACAGCCACTCCTCCATGAA
GATCTCGGCACTCGGCTTCTCGGTGTAGGCCACGGAGTTGTTCGCCAGGCCGCGTTGCGG
GTTGTCGTTCCACCACTGGCCAGCCTTTGCGTCACGCATGCGCTGATCCGACAGGTTCGA
CAGACTGATGAGCGCACTGCGACGCACACCGCCCACCACGACGATCTCACCGATCATGCA
CAGCAGGTCATGAACCTCGATGCTGTTCAGCTTGCGACCCTTCGCGCGCTGGAAGGTATC
GACGGTGAATTTGAACAGACGCTTGAGCGGATCCGGGCCGGACGCACGACCGCCGAAGAT
CTTGAGGCGGGCACCAGCGGGCCGGACCTTGCTGTAATCGATCTTCGGGATGTCACCGTT
CCACAGATGCCCGAGGAGCGCATGGTAGGCCTTCGCCCAGCCTTCCTTCGAGTCCGCCAC
GACGATGGTGTCGTCGGTGTTGAGCAGTTCGTCAGGTACGGCGGGCAGCTTGGTGACTTC
CTGGCGCTCGCAGCTGAACCCGACACCAGTGCCGCACATGAGGATATAGAGGGCCTCAGC
GAACGAACGCTTCGTGTTGATCGCCAGATAGGAACAGTTGAACCCAGCGAGGTTCTCACG
CTCCAGCGCCTCACCGGCAGTCATCAGGGCACGCATAGAAGGCATGACCTTGAGCTCGAG
GATCGCGTTCTTCACCTTGCCCTGGAGCACCTCGCTGAACTGGTGCTTCGTGCGCTTGTC
GAAGAAGTCGATATAGCGCTGGACTGTTTCCTCCCAAGTCTCGCGCCGCCCCAAGTCATC
GCGCCAACGTGAATAGCGCGAGATGTGAATGTATTGTTGATAGAGATCCATCAAGGTTTT
CCTCTTGCGGTTGTGAAAGCGGTATGGTACGCGATCGATCTGCGCTGTCACAATTCCTAT
TTGCCGCCCAGCTCACGAGTGATCGCGTACTCCTTGGCGCTCCTGCACCCGCCATGATGA
CAGATGCTTCCACCCTGCCCCATCTGCGAGCCACAGCAGCACAGGTCAGAATCGATCTTG
CGATAGCGCCACAGTGCAAGCCAGCGCCTCCAGAACTTCGCCTTGTAGAGGGCAGTCGAT
GCCGCTGTGCTACCGGACACCGCCAGGAACACTTCGAGGACGAGCCATGCAGCCTGTGCC
CAAGACAGATTCACCCCATGTAACCACACAGCTAGGCCCACAGCCGACGCAATGCAGGTC
AGCGCCACTACCGCACTGATGGCGAACAACGGCGCGACGCTGCGCTCCTGCTGCGCCTCT
ACCCATGGACACTCCGACTGATCGTGCCCTACCCCTCCGCACAGGATGCACATCTTCATT
CTTCGTCCCCTGCGGATGCCAGCTCGATCATGAGGCGGCGGGTGACGTGCTTGCCCACAG
TGAGGCCACTGAACTTAGGCTGCATCTCAATATCCACGAGCAGCTTGTGGCGCTGCCAGT
TGAAGGGCACGCGCCCGTCCATGAGGTAGTCCCACAGGTCGCAGCACTTCTCAGGGTCGA
ACAGATCCGTGTGAGGCACATGAAGGCCCATCACGGACTCGAGCTTGTTCTGGGCGTCCA
GGAGGTCGAGCTCGGGCAGTCCGATCTGTCGCATAGAGTCTGCGATCGCTGCGCCGTCAC
GGTGCAGAAGCACCTTCCGAGCGGGGTGCTTGTTCAGCCAGTCCGTCCAGCGCCAGATGC
CAGTGCAGGACACGCCCACGGGCACAGAGGCCTTGAGCTTCTCGTCCCATTCGGAATAGT
GAGTGTGATAGAGCGGGTCGTGGTGGCACAGCACCGCATCCGTCGTGAATAGGTTGGCCG
CCCAGGTTGTACCAGACCGGGGCAAGCCGATAATCATGAAGTCGAGCATGGCGTGTCCTT
CCTGTTGAAGTATCGACGAATGACGTAGCTCCGGGCAACGGACAGCGCGGTCATCCACGC
CGTGATCTTGAAGTTATTCTCCCACAGCATCGGAATGTCGTGGAACCAGCAGATCGCAGC
AGTGGCAAGCATAGCGATGACCAGGCCAACCAGTGTATTGACGACAGCCTCGATGAACGA
ACTTCGCTTTGATTGTCCGTTCCACGGGCAGTTCGGCGCGGTGTGACCTTCGGCACCGCA
TAGCGTGCAGACCTTCTTCATATGATGGGCTTTCCGTTGTGGCGATACCAGTGCGGTTTC
AGAGCGATCTTCTCTTGGATACGTTGTCGCACCAGTGCAAGCGCTTCGGGCGTCGGATCG
TAGTCCTTGCGGAAGCGCTCGTCCAGCGCATCGAACACACCGTCAGGATCGAGCAGACTG
TCGCGGTTGAAGTTGATGCCCCGACGCTCCAGCTCCGCCCTCAGCAGGGCATAGCGCTTT
CGCAGATACAGGGCTTTGTCGTAGAAGAAGCTGACGTGTCCGGTGTTGAGCGTGTAGGCC
TGGGGCACAGCTTCGAGCACAATAGCCTGACCCATAAGGGCCTGGACGTATGCGTCGCGG
TAGCCGTGCGCCTTAACGTCACGCGCCTCTGCTGCCCGCAGACTGCGGCGCAAGCTCTTG
GGCACCATCTTAATTTCGCGGAACTCCGCGAACAGGTGCTGATCCATCAGTTCTTCGGGT
GGAACAAGGTTAATTCGAGTCATCGCCAATCCACTTTCTTCAATCTAGTTGAGGGGTTCG
GAATCGTCATTGCGTAGTCCAGGCACACCAGCCGCCCGTCGAGCATGCCGAAGTTCTCAG
GCTTCAGGTCACTCAGGAACGCTGGCACTTGCTCAGGTAGCACCGACCGATCTACTATAG
GCGAAGCCTTGCGCTGTAGCAAGATGCGCCCGTCTGGTGACAGGTATTCACACGGAGCGA
GCCAGTCCGCCACCTTCTTGTAGTGCTCGTGATCGTTCCAGAATCGCATCTCGAGCACGT
TGGCGAAGTAACGCCAGTTCTCTTCAGGCTCCACCTTCACGACTAGATCGTCGCGCAGGC
GACATTCGAAAACCTTCCGATGGATACCCTCGCCGAGCAGCTTGCCACACAGCAGGTTGA
AGGCGTCTTCGTATGTCGCACCGTTCATCAGCTGCCCGCCTGCTTGCGCATCACGACACG
GAACTCTTCCTCCGCATCGGAATTGACCCAGGCTTCCTCAGGGCTGCGCCACGCGCACCC
GTTCGGACTGGCGCCGTCCGCTTCACCGCGCATCTGGAACCCTTCCAGGAACGCCTTGCG
GATGCGGTGCTCTTCGGATTCGATGTTCGCCTTCAAGGCTTGCAGGTAGTTGGCGAGGTC
AAGAACTTCTTCGATGGCATGCTGCACCCATTGCCCGAGGTTCAGATCTTCGCGTTCAGT
CGTGACACCATACTTCTTGAGTCCGACGACGCTGCGATCCAGGAGCATCCGGCGGTTACG
CTCGACGTTGGCATCGGGTGAGGCGGTGACCACAGTGACGCCCTTCAGCAGCTCTTCCAG
CTTGGTGGCGGTCACCGGAGTGATATCACCGCTCGTCACTGCATCCTGAAGGTACTCCAG
GAACGACAGCACGCCTGCGCACTGCACACCGACGCGCACGGACAGACTTCCGACTTGTTG
ATTCATGCTTACTCCTTGAACGGGTTGGCGCCCGACACTGCGATGGGCGGATGGGTAGTG
CCCCAGGCGTGGAGCCAGACGTGTCCGGTTCTCATGACCTCTGCGAGCTCGTCTGTGCTG
AGTTTCCACTTGGAGATGACGTGAGGCTTGCCTTCGGCGTCCTCATAGCGATGGATGGGC
AGGTCAATGACCTTGCCTGATGCGCGGTCCTCGGGCGTGCCGAACAGCACCGCATTCGCT
TCCGGAAAGGACACAGGCCAAGTCGGATCCGATTCCAGCATGGCATCCAGCGCCTGAATC
TCTTCGGTGATGGAGTCGTCCTTGTCGGGCAGGTTCTCGGAATGCCACTTCAGGAACTGC
CGATACTTCTGAATCTCGCGTTGGATATAGACAGGGTTGCCGTCGAACCCGTTGAGCTGA
AAGAAGGCGCGTGCTGCTGCGAACAGGTCGCACAGCTCCAGAGCGATACGCTCGTCCAGA
TCACCTTTGCCATCCCAATGCTGCACCGCGCCACCAGTGCCCATGATCTTGCCCGCGATT
TGCAAGACCTCACCACATTCTTCGACTAGCTTACTCAGTCCAGGCCACGTGCGTGATCCA
AGGCTGAAGCTACCGTCGCCAGGCGTTCTGAAATCGTTCATACGATTCTCCAATAGTCAA
GAGGAAACGCGGCCCAGGCACCAGTCCCAGGCCGCGCACCATATTCGTAGGCGTGTGGGG
CCTACCCGCTTGCCCGCCCACCCACATGGGCACGCACACGGTTTCGCTTCGCTCTATCGT
CCTTGCGGGTAAGGCCCATATCCGGGCTCCGACAGAGCTAGGCTCGGCGGTTTCTGTTGC
GTCCGGTGAATTATGTGGTCTCCTGCCCCGCCGGAAGGGGAGTCCCAGGCCTCGCAGATT
CATCCACCGTGTATAGTGGAGCTCACTGCTGCGCCGTGGGCTGTTACTCGCTGCATACTA
TAACGCCCACCGTGCCGGAGCACAAGCGGGCGTTTTGGATATCTTGCAAGCGCTGAGCAC
CGTGATGACCACAGTGCCACGCTCGTCAGTAGGTGAAGAAGTCTTTGCAGAAGCCGAGGT
ATCCGCCCGTCGAGTTGCTGCGGCGCAGGAGCTCGGACAGGTTAATGCAGCCCACCCAGC
GACCCCAGGCTTCCACGTAGAACACCACATAGTCAGCCGACGGAGCGTCTTCCCGACCTT
GCTTGTCGAAGTAGGTCGCAGCAGCCTGGGCCATCTTAGCGGTAGCCTTCTCCGCTGCTG
CCTGGGTGCCGTAGTTCTTGCACGGGTTCTTATTGGTCGAGCGATAGTCTTCGATGCGTG
CGGTCAGTTCGGTGATGATATTTGCCATGTCAGTTCTCCTAGTGCGTTGCGGTATGGTGT
TAATGTAGGACGAACTTCAGACCTATGCAAGCGACTTTTGCAAATCTTTTGGACCTAACC
GAACACATTAACACGCAAGCCGTGAGCCATAGCTTATAGGTCGGCGTTTCAGCAAACAGG
TCTGGCTGATCGCGCACGCGCCCGCATTATGCGGGATTGCTCTATACAATATAACAAATA
AACATATTAACACTTATATAGAGTAGGCTTATCTAAAGGAGGGGGATCCTCACCCCCGGC
TGCGCGTATTGTATGCCACCCGAGGTTGTTTCGCCGCCCCGCTAAGCCCCTGGCCTCCTT
TATTTCTTGCAATACAAGGCCCCATGCCTTAGCTTATGCACTGTTCAATTCATTCCAGGA
GTTTTTATCATGGCTCAACTTGATTTTGACGCTACCGCGTTCCCCCAGCCTGCGCAGCAA
GACCCGCTCAGTTTCTTCAACCAGATTGACAACAATGATCCGGATCCGTCGCTGGTGCTG
CAATACCTGCACGCGCTACACACGCAAGCGCTGGCGCAGGGCATGGAGTGCGTATCGGTG
GAACAGTTCTACACCGACCAGGCCATGGAGCAGTGGCGCATCCTTTGGGCAGAGCGTCCG
AAAGACGTTCAATTCCCTGCCCATGTGGATCTGCTTCAGATCAAGAGCATTCTGTTCAAT
GCGCTGACGCCGTTCAAGTGCAATGCGACAGGCATGGAATGCTTCAGCATGCTTGACCGT
GTGAAGCGCGCTCACCAGATTCAGTCCGTGTGGTTAGCTGAGCAGAATCACCAGGAGGAG
ACACCAGCGCAAAAGCGCGCACGTCAGAACCGTGAAGCTCAGCGTCGCTTGGCATTGCGT
TCGAAGGACGATGGAAGCCCGGAGTCGGAGCACGCCAAAGCGCTCAAGGCTGCCTATGAC
GCTTACCTGCTCGCGTGCAGGCAGCGCAAGGAAGCGGAAGCGCAGTGGGCTCAGTACGTT
GCAACCAAGAAAGCGGAGTACGAAGCTATCAAGGCGCAGAAACCGCTCAACTAAACATGT
GTTGCGATAACACAGCGAACGCGCTACACTGCTGAGCCATTCGGGTGTCGCTTTCGCGCT
CCTAGTTTGCCGGGGAATCAATAATGACGGAAGTTGAGAAGACTGCTCAGCAGGAGTTTG
ACGAGATCTATATCACGTCAAGCGAAATCGGCCAAGAGCTTGGTGTGTGCCGAGCCACTC
TAGTTAATGCGCGCCGTCGGGGCCTGCTGCCCGATCCGATTGTCGTTAATGGCGCGCAGA
TCTTTGTCTGGAAGCGTGATGTCGTTCGCCCTTACCTTGACGCATGGAAGCTCATGCTCC
AAGCGCGGAGGGGCGAGCTGGTATGACCACACGCGCTCAAGCATGGGCGCGCCTTCCAGC
TGAGCTCAAGTACCTGCGCCAGTGGTGTGTTGCTGGTGCTAACAAGGCTCCGCTGTCGGT
CGGCCCTGACGGAAAACTATTCAACGCCTCTGTGACTCAACCGTCGCAGTGGATGGACTT
CAATACGGCTGCCCAGGTCGCATTCGCTAACGGGTACGACATCGGCTTCGTTCTGCATGA
GTCGGACCCTTACTCGTGCATCGACTTGGACGTCAAGGACGCTCAGAACTGCGCAGATAA
GCCCGAGCTCTGGACGACCCCCGAACAGTTCGATCTGTTCTATCGCATTATGCTGGGCTT
CGACAGCTATGCGGAAGCGTCGCGCAGCGGGAAGGGCTTGCATATATGGGTCCGGGGCAA
CATCGGGAAGGGTGTGCGCCGCGATGGGGTGGAGATCTACTCGCAAGAGCGGTTTATCAT
CTGCACCGGCAGCGTCGTCCAGGACAAGCCCGTTCGCGACTGTCAGCCTATGCTGCTCAA
TATGGCGTCGCAGATGCGGCCCAAGGAACAGGCGGTTGATTTCGCGCTGCAAGAGCTGGA
ACAGGACGAAGACGACTGGTCGGTTCTGGTGCGCGCTGTCAATGCAGGTAATGCGGACAA
GTTCTGCGGGCTGTGGCTGGGGCAATGGGAAATGATGGGATTCCCGAGCCAGTCTGAAGC
TGACCTCGCGCTCATGTCCATGCTCACGTTCTACAGCCCATCGAATGCACAGTGCAGGCG
CTTGTTCCGTGACTCGGCGCTGGGTAAGCGGGAGAAGGCAGTCAAGGACGATCGCTACAT
CAACCGCACGCTGGCCACAATCCGATCTCGTGAAGCACGCGAGAAGGCAGTCGATGCCAG
CGCACTGGTACAGGCGGCCGATACCCTGCTGGAAGCGCGCCAGGCTGCTATGCAAGAGAT
TCAGCGCTTGCAAGGGGGTATGCCCGCGGCTGGTGCCCCACAGCAGCGCACAGCGGTCCC
GCTGCACGTACAGGGGCACGGTGATCCGGTTCAGCTACCCCAGCCCACAGCGGTCGCCGC
TACGCTGGCAGGCCCCGTGTCCGCTACCGTCGTTGAAGCTGGAACAAAGGGTCTGCCTTG
GCCGCCTGGGTTCGCTGGGCGAATTGCGCAGTACATCTATCAGAGCGCACCGCGTCCAGT
CAAGGAGGTGGCGATCGTTGCATCGCTTGGGCTGCTGGCGGGCTTGTGTGGTAAAGCCTG
GCACATTCCGCAGTCCGGTCTGAACATGTATATCATTCTCGTCGCACGTTCTGCTATCGG
GAAGGAGGCGATGCACAGCGGGATCAGTTCGTTGATCCGCTCCTGCACCGCCAGCATGCC
TACGTTCCACAATTTCATTGACTTCACGGACTTTGCTTCGGGCCCTGCTCTTATCAAGGC
ATGTGCCAACAATCCGTCGTTCGTGAATGTGTCTGGTGAATGGGGGCGCAAGCTCAAACG
CTTGGCGCATGACGACCGAGATGGGCCGCTCAGCACACTGCGCACGCAGATGACGAACCT
CTACCAGAAGTCGGGCCCTCAGTCCATCGTTGGCGGTATCGGCTACTCGAACAAGGACAA
CAATATCGCATCGATCAGCGGTGTCGCCTACAGTATGATCGGCGAGACCACACCGAGCAC
GTTCTACGAAGCACTCACCGAATCGATGATGGAGGACGGGTTCCTGTCCCGCTTTCTGAT
CATCGAGTACGACGGTGACAGGCCTGCTTTGAACACGTCGCAGGTGATGCACCCTGACGC
GGCGCTCCAGGACGCACTCGTCAAGCTCGCATTCCAGGCGCAGAACTTGATCGGCGGGCA
GACGTCCCAGCCGCTTGGGCGCACCGAGGAAGCTGCTCAGATCATGTGGGCGTTCGAGCA
AGAGTGCGACAAGGAAATCAACAGCACCGACGACGAGTCCCGACGACAGATGTGGAACCG
AGCTGCGCTCAAGGTGCTGCGAATTGCGGGCTTGCTTGCGGTAGCCGACAACTGGATCAA
CCCGTGTGTCACGAAGGAGCACCTGGACTGGGCACTGGACGTGATTCGCAGGGACATCCA
GATCATGAGTAGGCGCTTGGATACTGGTGACGTCGGTACAGGTGACACAGCGCGCGAACG
CAAGCTCATGTCTCTGCTGCGCGACTACCTTGCGAACCCGCTTGCAGCCAGTTACAAGGT
GCCTGAGGAGATGCGACAGAATAGCATCGTTCCGCGGAGCTATCTGCAGATCCGCACAGC
GCGCGTGGCGTCGTATTACAACCATCGCGCAGGGCAGAACGCGGCGCTAGACCTTGCTAT
CCAATCCGCTGTGAATAACGGCTACCTCATGGAAGTGGATAAGGCGAAGGTCGCAGAGGC
CTACAACTATCATGGCAAGGCGTACCGCGTGATCAAGCTGCCCGACTACGCTGCTCAAGC
GAAGAAATCCTAAGCCGATGCAAAATATCCAGAAAATGGGCTTGCCGGCTCGCGTGTGTT
GCGTTACATTAACGCTCATGCAGTTCAACCAGTAGATGGAGGTAAGATGAAACTCAATGT
GAAAGCTCTTCACCCGGATGCCATCGTGCCGCAGTATGCGACCGTCGGCGCCGCGTGCTT
CGACTTGCATGCGCTCATGGAGAAGCCTTGGAAAGAGGGCGAACAATCCTATGCGCAAGT
CAATCCGGGTACGCCCACCGTGATCCGTACTGGGCTGGCGTTTGAGATTCCCGACGGTTA
CGTGATGCTGATTTTCAGCCGCAGCGGCCACGGGTTCAAGAACGACATTCGCCTCGCCAA
CTGTGTCGGTGTCATCGACAGCGACTACCGGGGCGAGGTGCAGGTCAAGCTCACCAATGA
CAACAGCGACGGCAATTTCCTCACGGTGAAGCATGGTGACCGCATTGCGCAAGCGATGAT
CGTCCCTGTGGAGCGTGTGGAGCTGGTGCAAGTCGATGAGCTGTCTTCCACCGAGCGAGG
TGAAGGCGGGTTCGGCAGCACTGGCACCGAGCGCAAGTTCTTCGGCATGCCTCAGGAGTA
ACCACAGCCATGACGCTCATTCCCGAAAACCAAGTCAGCCAGGCCGATCTGGCCGAGTGG
TATAAGCTCCAAGAGGAGCTGAAGAAGGTCAAGGCGCGCGAGATGCTTCTCCGCACCAAG
ATCTTCGGGTACTTCTTCACCTCCCCCGTGGAAGGGACGAACAGCTATGATCTTCCGGAC
GGCTATGTGCTCAAGGGTAAGCACACGATCAACCGTGAAGTGGATCCTGGTGCGTTCCAG
GCGATGCGCGAACAGTTCTCCCAGGCCGGCATCCACCCCGACGCCATGGTGCAGTGGAAG
CCTTCGCTCAAGCTCAAGGAATACCGCGAGCTGACCGCCGAGCAGATCCAGCTCTTCGAC
CAGTGCCTGATCGTGAAGCCCGGTTCGCCTGCGCTGGAAATCGTGCTCCCGAAGAAACGT
GCGGCAGCGGGGGCACAAAATGCGGGTGACAATCATAGCTGATGCGTCGTTCTGTCCTGA
CACGAACGTCGCCGGTTATGGATATTGGATTGCATCCGAACGTGGCAAACAAGGTGGAGG
CGGTGAAATGAAGTGCCGTGTGGAGGGTAACATCGCAGCAGAGATGCAAGCGGTAGTGAA
TGCCCTCTACATCGCGCACCGCCTCCAGCTTGTGCAGGCAGAGGACGAAGTTCTTATCCA
GACTGACTGCATGGCTGCAATTGATGCGTTCGAGGGTAAGCGGAGGAATCTGCCTGCCCA
GGAATGGGAAGCGGTGAAGGTACTTCGCCGCCTGCGTTCCGACCATAGCCTGAGAGTCGT
GTTCCGGCATGTAAAGGGGCACACAGGCAAGAAGGAGGCGCGGTTCGTTACGAACCATCT
CTGTGACAAGCGCGCCAAAGAAGCAATGCGCCGAGCTAGGGCTCGGGTTCAACTTGGAGA
AGTGCAATGAATCAGAAACATCTGTTGGCGCTGCTGCAAAGCGGCTACACCACGATCGAA
GTCGTGTTCAACGACAGCATGCAAGACAGCCTGGGCTCGGGTCGTACCAAGTCCAAGGCC
TACACCTACAAGGCCCGCCTGGATGACAACATCGAAGTCGGCGATCATGTGGTCGTGGAT
AGCCCGAGCAAGGGCCTCACCGTTGTCGAGGTGACTGCTGTTCATAAAACGGCGAAGATC
GACCTGGATGCCCCCTTCACTTACAAGTGGATCGTCCAGAAGGTTGATCGCACCCGTTAC
GACGAGACCAAGGCCAAGGAAGACGAATTCCTGGAAACCATGATGGAAGTCGAGCGTGTG
CATCAGCGCGAGCTGTTGCTGGCCAAGTTCAAAGATCACCTGCCGGAAGGTAGCGAGGCG
CGCAAGCTGTTCGAGAACGCCACGCAGAAGGTTCTGGAGGTGTCCAAGTGATCCCGAACT
ACAGTGGCAAGGGCGCTATCGCTCTGGACGTGCTGGATCACGGGTTCGTGGCCCTGCGCA
ACATGTCGGGCCCGAACCGTCGTCCGGATGCACCGTTCGACGCAGACGATATCGATCCGG
CACAGTCCGCTCGCATGTCGTTTGACCAGATGGACAGCGACCGCACCCGCGACGCGGATC
TGAAGCTGGCGGACTACCTGATGCGCAACTGGCACACCAGCCCGTTCGAGATGGTGGAAA
TCTGGCTGGAAATGAAGATGCCCATCTTCGTCGCTCGGCAGTTCGTGCGCCACCGCACCG
CTACCATCAACGAGGTCAGCGGTCGCTATGTGCAGCTTCCGGCGGAGTGGTACATCCCTG
AAGTCGTGGGCGGTAAGGCTGCCAACAAGAAGCAGGGGCAGGAAGACAACCTGGACAAGC
CTACTCAGGAATGGTTCCGTCGCGTGCTGGATAGTCAGTGCCGCCTGTCCTATGACCTGT
ATCAAGAAGCTCTGGAGCGCGGTGTCGCTGCTGAGCATGCGCGGACGCTGCTGCACCTCA
ACCACTACACGCACTGGCTCTGGAAGCAAGACCTGCATAACATGCTGAACTTCCTGCGCT
TGCGCGACCACAGCCACGCACAGATCGAGGCGCAGCGCTACGCCCAGGCAGTTGATCAGC
TGCTGCGCCAGTACCTGCCGAACAGCATGGCGCTCTATGACAAGTATCGTCGTCTCGGAG
GTTAAGATGAAGCCCATGCTCGCGGTGGAAGCACCGAAAGAAATCAAGTTCCCTGTCTAT
GCCAGCGCCAAGCTGGACGGCATTCGCTCCGTCATCAATGAAGACATGGCAATGTCGCGC
ACCATGAAGCCCATCCCGAACGGGTTCGTCCAGGACTACCTCGGGCAAGCCCTGTTCAAC
GGGCTGGACGGTGAGCTCACGGTGGGCCCTGCAAACGACAAGAACGTGATGCAGGCAACG
ACCAGCGGCGTCATGTCCCGCGACGGAGAACCAGATTTCACCTTTTGGGTGTTCGACTTC
TTCACGGATGCCAAGATGCCCTACGGCGAGCGCTTGCGCCTGATGGAGCGTGCTTTCAAA
GACGGCGCGCTGGGTAACTACCCTCGGATCCGTTTGCTGAAGCAGACGCTCGTTCATAAC
GAGCAAGAGCTCCGCGCATTCGAGACCATCACTCTGGAGCAGGGCTTCGAAGGTGTGATG
ATCCGCGATCCGAAAGGCATCTACAAGTTCGGTCGCAGTACCGCGCGCGAAGGCTATCTG
CTCAAGGTGAAGCGCTTTGCCGACTCGGAAGCTGTGGTCATCGGTGTGGAAGAGCTCATG
CACAATGCCAACGAGGCAACCCTCGATGAGCTTGGATATACGAAGCGCAGTTCGCATCAG
GACGGCAAGGTGCCTATGGGCACGCTAGGCGCGTTGAAGGTGCGTGACGTGACCACAGGT
ATCGAGTTCAATATCGGTACTGGCTACACGGCAGCGCAGCGCGCGGAACTGTGGGCGATG
TGGCAGGCTGGTACGCTGGCTGGCAAGATTGCCAAGTACAAGCATTTCGAGGTTGGCGTG
AAGGAAGCCCCGCGCTTTCCCGTGTTTCTGGGCTTCCGCAACCCTCTTGACATGGGAGAA
GCGAAATGAAAATCAAGTCCGCTGCTCAAGTGCCGCCCATCATTGGCAATTTCTCTGACG
AGGAATTGATCCGGCACGTTGAGCACTACTATCCGAATCTGAACGGCCCGCTGCGCACGC
TGCTCACCCGCTTCGAATCCCGCGTGTATGGTACGCCGGAGCAAGTGCAGCTCGAGCACC
AGGCCGGCCAACTGCAAGACTTGCAGGAAGGCGACAACGAAGTGAGCTGCCCGCATTGCG
GTTCCGTGCTCCAGATTGACTTGGAGATCGAATCGTGAAGGAAGCCTACATCGACGCTCC
GCGGTTTCACAAGGCGTCGCTCAAGCTGATTGCACTCTGCGACGAGATCGTCACGGACTA
CAATGGGCAGGGCTACCGACTGACGATCCGCCAGCTTTACTACCAGCTCGTGGCGCGTGG
GCATATCGAGAACACAGTCCGCAGCTATGACAACATCGTCGCGCTGATGACGAATGCTCG
ACTCGCCGGTCTTATCGACTGGGACGCTATCGAAGACCGCACGCGCGGCATTCTGGAGCG
CTCGCACTGGTCCAGCGGTAGTGACATTCTGCAAGCGTGCGCGCAGAGTTATCACGAAGA
TCTGTGGTCGGATCAACCGAACCGTGTCATCGTCGTAGTTGAGAAGGAAGCGCTGGCAGG
CGTGCTGGAGCGCACTTGCAAGGAATGGGATGTTCCGCTCCTTCCTGCTCGCGGATATCC
TAGCGCCACCACGTTGCGCGAGCTGGCCAAGACCCGTATAATGCGGGCAAGCCAGGAAAT
TGTGGTCTTGCACCTTGGAGACCATGACCCGAGCGGCATCGACATGTCGCGCGACCTGCA
CGAACGCCTAGAGCTGTTCAGCAGGCACCGCGTGAGCATTGACTTCCGCAGGCTGGCCTT
GAACATGGATCAGGTTGAGGAGCAGAACCCTCCGCCGAACCCTGCCAAGGTCACTGACAG
CCGTTATGAGTCCTATCGGGCGCAGTACGGTGAGGAAAGCTGGGAGCTCGATGCGCTCAG
CCCGCAATACCTGCATCGTCTCGTGAGCAAAGAAGTTGAAAGTCTGGTAGAGTTCAGCCT
TTGGAACGAACGCTGCAAGGAAGTTGAAGAAGTACGGGGTCGGCTGCAAAAGCTCGCCGA
CGAGTTTGACAAAGGAGAAGGCTGATGGCTTTGCAATTCACCACAGCTGAGCAGGCGTCA
CAGCTCTCCGGAGTGAAAGCGCTGGTCTATGGTGGCGCGGGTATGGGTAAGACGGTTCTG
TCCGCCACCCTGCCTGCCCCCGTGCTGATCAGCGCCGAGTCCGGTGTGCTGTCGCTCCGC
AAGGCTAACCTGGAGCGCCTGTTTGGTGTGGGCAATCCGAACATCTGTTACAACATGCCC
ATCATCACCGTGACGAACGTGCAAGACCTGACGGACGCCTATGAGTGGTGTGCTCGAAGC
GCGGAAGCGAAGCAATTCGCAAGCGTCGGTCTGGACAGCATTTCCGAGATCGCTGAGGTC
GTGCTCAACAATGCCAAGCGGCAGGTCAAAGACCCGCGCCAGGCCTACGGTGAGCTGATC
GAGAAGATGGAGACGCTGATCCGCCTGTTCCGTGACCTGCCCGGGAAGAACGTCTATGTG
GCTGCGAAGATGGAGCCCATGAAGGACGAGATGACCGGTGTGGTGAAGTACGGCCCGTCG
ATGCCCGGTTCCAAGCTGGGTTCGAAGATCCCGTACTTCTTTGATGAAGTATTCCGCCTC
GGTGTCAATAAGACGCCGCAGGGCGAAACCTATCGATTCTTGCAGACTCAACCCGATCTG
CAGTTCGAAGCAAAGGATCGGAGTGGCGCACTCGCTCCGTTGGAACCTCCTTTCCTCAGT
GCGTGTTTTGCCAAAATCCTAGGAGCTTAAAAGCCATGGCACAATTGAACTTTGATGCAA
CCCAAGTCGCCCCGGATCTCGGTTTCGAGACCGTCCCCGCGGGCTGGTATAACGCGATGA
TCGACGAGTCGGAAATGAAGCCGACCAAGGACGGCTCCGGTGCTTACCTCCAGACCCGTT
TCAACATCATCGACGGCCAGTACGCCAACCGCAAGATCTACATGCGCCTGAACCTGCGCA
ACACCAATCCGGTGGCCCAGGAAATCGCCTACAAGCAACTGTCGGCGATCGCGCACGCTG
TCGGCGTTCTGCACGTCCAGGATTCCAGCCAGCTGCACGGCCTGCCCATGAAGATCAAGG
TGAAGCTCCGCAAGGACACCTCCGGCCAGTACGAGGACTCCAACGAGATCAGCTCGATCA
AGAACATCAACGAGCAGGTCGATATGGGCTCCCAGGCTGGTGCCGCCCCGGCGGGCTTCG
GCGGTGCGCCGTCTGGCGGCATGCCTCCGGGCTTCGGTGCTCCGCAGCAAGCTCCGGTTC
AGCAGCCTCAGCAACAGTGGCAGCAGCCGCAGAACTTCGGCCAGGCGCCCCAGCAGGCTC
CCGCACCGCAAGCCGCTCCGCAGCAGCCGTGGCAGCAAGCACCGGCCCAGCAACCGGCAC
CCCAGCCGCAACAGGCCCCGGCGCAAGCTGCACCGGCCCAGCAGCCCTGGCAGC

[0132] In another aspect, the invention provides an LPS-TLTL bacteriophage targeting Pseudomonas aeruginosa. In certain embodiments, LPS-TLTL binds a molecule of LPS (core). In certain embodiments, the LPS-TLTL bacteriophage has a genome comprising a nucleic acid sequence comprising SEQ ID NO: 4.

LPS-TLTL
(SEQ ID NO: 4)
TGGTCACCAATCGGCGGGTTATCCTGAGAGTTAGTTAGACCCTAGAGACTCGGTTGTTGA
ATGGTCACAGCAAACTATCGAGCCATTCCCAATGCCTGCCCTACCAGGGGCTTGTATCTC
AACCCCATCAGATGGCAGGGACGTGCCTATGTTAGTAGCAAGGCGGCATCCAGTGGTCCG
TCTGTATTTACGTGGTGGACCAATCCTATCGTAGGTACAGCTTTGTAGTTGGAAGGCTGC
GACAAGGCGCCCTATCTACACCGCCCCGGACCATCACGTCCGCTTACTGTCGAGGCTACG
CTAATCCCGAAGTCATGCGTTATGCCGTTGACTTGGGGGGCCATCTTACCCTTCCCTATC
CCTTGTCAACCCCCGATGCCTGCCGGTCTTATACTTGGGTGACAAGGCATTCCCCTTGGT
GGCAGCCCCGTTAGTGTCCGTAGACTCGGGGATGAGTGGCCCCTACGTGGAACGTGGTAG
CCGATAGGCCAGGTTCCTGGGGTTGTCAAGCTAGGGAGTTTCCCGTTGCCCTATCGAGGA
CACCTACATAGAAACGGCGCCATTAGGCCATATTCTTTGGGGTTGTCTACTGGTTTTCAT
ACAGTCTTAAGGACTATCGGTCCCCAGCAAACCCCCGGATATAGACAGTCTTTGATTAAC
ATAGGGTATCGTGGGATGTCAATAGGGGATCAAGGGGTTATCAAGGGATATTCCCCGATC
CACCCCTGAATACCCTAAGATTTTTCTTATGAATACCCTAGGGTCTATCCGATGAACGGT
AGCTCAGGGGTTGACCCTGGACTAACCTTATGGTATCCCTAGGGAGGCTAGGAGGCTATA
CCCTGAGGATAGGCCACCCCACTGTCTGGGGGGACTCCCTGGGGGGATATTCCCCAGATA
CACCGGAGGGATAAAATAGACCTTTGGGGTATCCCCGGTTATAGGCCCTGGATCCAAAGG
CAACCCCGATACCTGTTGGTATATTACTGGATAAAGGGCAATAGGCCAGGACATAGCAAA
CAGAGGTAGTCTAGGGTATACCTATGGAACAACCTCAGGGAGTACCTATAGAACCTGGAT
CAAGGGAACCCTATGCCATCACTTACCCCTTACCAGCAACCTACGAAGGGTAGTCTTAGG
GTATATCTATAGAACCCTATCATACCGTTCGTCGGGTAAATCATGTGATTATCAAAGAAA
TATCAAAAAAGTACTTGACAAGGTATCGAAATGGGGTATAATAGACCCATAGGCTCTTAA
GATCTTTCTTCCTTTGACTTACCTCTTACTAAGAAGGTTACCTTAAGGTTATCTTAAGAT
AGTCTTAGCGAACTCTTCCATTCCAGCAAAACCCCTATCAAATCCGGGTCTTGCGACCAA
AAATAAAAAAAAAGATGAAAATTTGACAAAATAGAAAAAAGTGTGATATAATAGTATTAT
AAGGTTGGAGAAATTAACCTTAAGGGTGCTTTAGAATTAATTGGGATGTAGCTCAGTTGG
TAGAGCAGGGAGCCGATAACTCTCAGGTCGTAGGTTCGAGCCCTACCGTCCCAACCATTA
TGGCCCATTAACTCAGCGGTTAGAGTGCCTCCCCTGTCTAGGGAGAAGCCGTCGGTTCGA
ATCCGACATGGGTCGCCATTAACTCCTCGTAGCTCAGTTGGTTAGAGTGCCTGTCTTGGA
CACAGGAGGTCGTAGGTTCGAGTCCTACCGGGTGACCATTTAGAGAGATCGGAGCAGTGT
ATGTCAGACGAAAAGGTTGTCTCGATTAGCTGCCCTTTCTGCTAAAGAAAAGCTAGACCT
CTATTGTGAGGCTCTGGCAGATGGCAGGGCGAATAAAACCCAAGCGTATAGCCGCTGGGT
TCTCCTAATCACGCTCAACGCAACGTTGCTGCATACCATCGAAAGCATGCCGAATACATC
AACGCCTTTATCTCTGAGCGCATCGGGAGTCATGTCCCCATGGCGCTTCGTGTGGTTGTA
GAGATTGCTAGCAACCCAGAAGAGAAAGGTGGATTCTCAAGGCAGCCCAGGATATCCTGA
CCGTGGAGGCTTCTGGAGCTAAGCAGAAACTGAGCTACTACTAAGAATGGGGAAGATATG
TCCGCAGAGGATCTAATCAGTGAAGTTCGACGAATTCCTCGACGAAGAGCCAGAGTTGGC
TAAAGTCATTTCTTTTCCCAACCTTAAGTACCTTTGATCTAATCAAGCGAAGAGAGGGGT
TGGTTCTAGCGGGTACAAAGACTCTCGGGAAGATAATCCGGCGGTTATGGCCACTTGCAA
CTCCCTGGGAAGACGGACCGATTAATTCTAGCACGAGCAGAGACTTGGCTAGAGAAAGAT
AGTAAGGCAGCCTATGATGCAAGCCTCCGCTAGTATTATCTCAGCTGCCTTTTTTGCACT
CCAGAGCTATTCGATGCCCTCTAGTTAGCGTCAACTTCCAGCTGGGTACAGCGTGGACGA
AGAAGTTCCCCGGGCGACGTGGAGCCTTCTGAGCCGGGAGTTCGACAGAGCAGCTTGGGA
GGCCGAGGATAGTGCCTGGGCTAAACAGAAACCCAGTGCGCGTAAGGGACCCTCCAACGG
CCCCTGTGGCGTGCATCAACAGTAGGTGGTTGGCGGTGGTCTAATGGATACCCAAGAGCG
GCTACGGAATCTAGTCAGGGAGCGGCTGAGCGGCAGAAGTATTCGCATGAACCAGTATAA
TTCTTATGGGTGGCAAGAGAAGTTTATCGCAGCCTCGAACTGCGCCCAGTTGCCGGCTAT
GACTGGTAACCGCTGTGGTAAAACCTACACCGGGCCTTTATCATGGCTCGCCACCTCACC
GGTCGCCACCCCGGAGTGGTGGACTGGTAGAGTATGCATCGTCCAGTGAACTGGCGGGGA
TCTCCACGGATACCACTCGGGATATTCTTCAGTCCGAACTACTAGGTGACTGGAACCCTG
AGGCTTTCGGAACGGGGATGATCCCCAAGGAAGATATCGTAGAGACGATTCGTAGGGAAG
GTAAACCCGGATGTGTGCAAGCAGTAGTTGTTAAGCATGCCTCCGGGGCCTCTCGTCCCT
TATCTTCAAGTCCTACGAAATGTCCCAGGACAAATTCATGGGTACTGCCATCGACGTTAT
CTGGCTCGATGAGGAATGCCCCAAAGATATTTATACCCAGTGTGTAACCCGAACGGCTAC
TACTGGGGTATTGTATATCTGACGTTTACCCCAGAGCATGGCCTCACGGAGATCGTGAAG
GACTTCCTCCAGGATCTTAAACCTGGTCAGTTCCTTGTCCATGCAAGCTGGGAAGACGCC
CCACACCTCAGTCCAGAAGTTAAAGAGCAGCTACTCGGTATACCTCCAGCAGAACGCAGG
ATGAGGGCCGAGGGTGTTCCTATGCTCGGATCTGGTGTAGTCTTCCCCATTCTGGAAGAG
AAGTTTGTATGTGAGCCTTCCAGATCCCCGATCACTTCCACAGGATCATCGGTATCGACC
TTGGGTTTGACCACCCTAACGCTATCGCCTGTGTTGCTTGGGACCCTGAGAAAGACAAGT
ATTACCTCTATGATGAGAGGAGTGAGAGTGGTGAGACCCTTGGGATGCACGCTGATGCTA
TCTACCTGAAGGGTGGTCACCAGATCCCGGTAGTTGTCCCCACGATGCCTTTAAGCACGA
TGGAGCAACCTCTGGTCGTAGATTCGTAGACCTTCTTAAAGATGACCACAACCTCAATGT
AGTGTATGAGCCCTTCAGTAACCCACCGGGTCCTGATGGTAAACACGGGGTAACTCTGTA
GAGTTCGGCGTTAACTGGATGTTGACCCGTATGGAGAATGGTGATCTGAAGGTGTTTAAT
ACGTGTACGAACTTCCTAAAAGAAATGAAAATGTACCACCGAAAGGACGGAAAGATTATC
GACAGAAACGACGATATGATCTCCGCTACCCGGTATGCCCTGTTGATGGCTTCCCGGCAT
GCACGTCCTGGTGCTGTACGAAACAGTGGATACTACAGGAGTGATACTGCAAAGTTGACC
CCTGATTGGTTTGGGAGTATTGTCTAATGGCTAAGCGTCGTCGCAAGATTAAGCCTATGG
ATGATGAACAGGTACTTCGTCATCTAGACCAACTTGTTAACGACGCCCTTGATTTCAACT
CTTCGGAACTTTCAAGCAGCGTTCTGAGGCCCTGAAGTATTACTTCGGAGAGCCCTTCGG
TAACGAGCGCCCTGGGAAGTCCGCGATTGTATCTAGGGACGTTCAAGAGACTGTAGACTG
GATTATGCCTTCTTATGAAGGTATTCACGTCAGGCGGTCAAGTAGTTAAGTATGAACCTC
AGACTGCCGAAGATGTTGAACAGGCAGAGCAAGAGACTGAGTATGTGAACTACCTCTTCA
TGCGTAAGAACGAGGGGTTCAAGGTAATGTTCGACTGGTTCCAAGACACTCTGATGATGA
AGACCGGTGTTGTAAAGGTCTATGTAGAAGAGGTCCTGAACCCTACCTTCGAACGATTCT
CTGGTCTCTGAGGAAATGGTAGCGGATATCCTGGCTGATCCAGACACTGAGATTCTAGCA
CAGAGTGTGGACGAGGATGGAACCTACAGTATTAAAATTCGCAAGGACAAGAAGAAGCGA
GAGATTAAAGTCACCTGTATCAAGCCTGAGAACTTCCTGGTTGATCGGTTGGCTACCTGC
ATTGATGATGCACGCTTCCTCTGTCACCGTGAGAAGTATACCGTAAGTGACCTGAGGCTC
TTGGGTGTTCCCGAGGATGTACTAGATGAGCTTCCATACGATGAGTATGAATTCTCTGAT
AGTCAGCCAGAAAGGTTGGTACGTGATAACTTCGATATGACTGGCCAACTCCAGTACAAC
TCTGGGGATGATGCTGAAGCCAACCGTGAGGTATGGGCCTCTGAGTGCTACACCCTTCTG
GACGTAGATGGGGATGGTATCTCTGAGTTGCGCCGTATCCTGTATGTGGGCGACTACATC
ATCAGCAACGAGCCTTGGGATTGCCGTCCCTTCGCTGACCTGAATGCCTATCGAATTGCC
CATAAGTTCCACGGTATGAGTGTCTACGATAAGATCCGAGACATTCAAGAGATCCGTTCG
GTGCTCATGCGCAACATCATGGATAATATCTACCGGACTAACCAAGGGCGCTCTGTAGTC
CTGATGGTCAGGTTAACCTCGAAGACTTGCTGACCAATGAGGCAGCGGGTATCGTTCGGG
TTAAGGCCATGAACTCTATCATGCCTCTAGAGACTCCTCAGCTGTCTGGGGAAGTCTACG
GTATGCTAGATAGGCTAGAGGCGGATAGGGGTAAGCGGACAGGCATCACTGACCGTACCC
GAGGTCTAGATCAAAACACCCTGCACTCTAACCAAGCGGCTATGAGTGTAAACCAGTTGA
TGACTGCTGCTGAGCAACAGATTGACCTGATTGCCCGGATGTTTGCAGAGACTGGTGTTA
AGCGTTTGTTCCAACTTCTGCATGACCATGCCATCAAGTACCAGAATCAGGAAGAGGTCT
TCCAGCTACGAGGCAAGTGGGTTGCTATTAACCCTGCCAACTGGCGAGAGAGATCCGACC
TGACGGTTACCGTTGGTATCGGCAACATGAACAAAGACCAGCAGATGCTCCACCTTATGC
GTATCTGGGAAATGGCCCAGGCTGTAGTAGGGTGGTGGTCTTGGGGTCCTAGTCTCTGAG
CAGAACCTTTACAATATCCTTAAGGAAGTCACAGAGAACGCTGGGTATAAAGACCCGGAT
CGCTTCTGGACTAACCCGGATTCTCCTGAAGCTCAACAGGCTAAGGCCATCAGGGAGCAG
AAGGAAGCACAACCTAAGCCTGAAGACATCAAAGCCCAAGCTGATGCCCAACGTGCCCAA
TCGGACGCCTTGGCTAAGCAAGCGGAGGCCCAGATGAAGCAGGTAGAGGCTCAGATCCGA
CTGGTTGAGATCGAACTGAAGAAGCAAGAGGCTGTCCTTCAGCAGAGAGAAATGGCCCTT
AAGGAAGCGGAACTACAACTTGAGCGTGATCGTTTCACTTGGGAACGGGCTCGTAACGAA
GCGGAGTATCATCTTGAGGCAACTCAGGCTCGGGCTGCTTATATCGGAGACGGTAAGGTA
CCTGAGACTAAGAAGCCATCTAAGGCAGTGAGGAAATAATCTTGGGAGAACGTTTTGGCT
ATAGTCTAGTGCTGACTGATGCGGCACAACAGATGGTACGTGAGAACGTTCTTCCTGAGC
TTTTCCGTATTGTCCAAGAAGAGATCGAGGGAGAGTGGAAGTCCACGGCACCTAAGGATT
CAGAATCCAGGAGGCCATCTACCACGAACTACATGCCCTCAACCGCAAAGCCAACTTCGT
ATTCAGGTCCTGGATCTGATCACTCTAAAGGAGTATAAGTAATGGACCTTGAGAATCAAG
GCATTGATGGCTCTGAGGCAGCGGAAGCTCGAGATTTGCTAGGTGATGACCTCCTGGCCC
CGGTGATGAAACCGTGATGGTAAAGTCAGGGGAAGAAGAGGAGGAAGAGGTAGTAGACGA
AGGTACTCCAGAGGACACCGAAGAGGTTGAATCTGAGGAGGAAGAAGAGGGTACTGAGGA
AGAACCAGAGGTTGAGTCCGAGGAAGATCCTGAGGATAAACTCTTCGAGATCCCGATTGG
GGATGAAGTCTACGAGGTTAACTTCGAGGAACTCAAAAGTGGCTACCTTCGGAATGAAGA
GTTTGTCACCCGACAGGCTGAACTGGAAGACCAGTATGCAGCTAAGTTCGAGGAGCTTGA
TGCAGAGCGCTCTAATCTACTGGCCGAGCTTGAGCAGTATGCTGTTACCGCTATCGCTGG
TGCTAATCAGTATGACAATGTAAACTGGGAGCAGCTTAAGGCCCAGGATCCAGAGAAGTA
TCAAACCCTTCGACTGGAAGCCCTGGAAGCCCGAGACCGAGCCCAGGTTTCATCAAACGT
CGTAACGACATTAAGGCTATGCAAGAGAAGCGAGCCGAGATTGTCCACTCTGCCTACGTT
AAGCGTCAGACAGAGCTAGCCAAGAAACTCATCCCTGAAATGACTACGGATGAATCTTGG
GGTGACAAGATTGTGTCTTATGGCAAATCGATTGATACTCCGAGGATGAGATCCGAGGGA
TATCTGATGCCCGCCAACTGGCTGTACTCGATGCAGCACGTAAGTGGGCTGAATCTCAGG
TCCGTCGCAAGGCTGCCCTAGAGAAGAAGGAGACTGAGCTACCTGCCGCAGTTAAGCCTG
CTGCTCGTAGGGCAAGCCTCAGAAGGGGTTCCTAAGCGGGTTAAAGCTGCCCGCGCTACT
GAAAGGAAAGACCAGTCGGTTGAAGCCGCTGCTGCTCTCTTCTCCTCTCTCGATATTTTC
TAATAGAAGGAAACGGTAACTTATGGCAACTCAACTAATGCCGTCTCGACTGTAGAGTCA
ACGGTAGCGCGAAGACCTTATCGATATCATCACAACATCGCGCCTATGACACCCCGTTCG
CGGTTGCGCTATCGGCAAGGGCGTAGCTACCTTATCACCACGAGGTGGCGAAGCTGATGA
ACTCCGCCAGCCGGTAGAACTTACCCGAGTGGAAGGTGAGGATGCAACTTCATCAAAGGC
TGGTAGCTTCACCACCATGCTGAACAACTTCTGCCAAATCTCCGGACGAGACCCTGCAAG
TCACCGGTACCGCAGATAAGGTCAAGAAGGCTGGTCGTAAGAACGAACTGGCGTATCAGC
TGGCTAAGAAGTCGAAGGAACTGAAGCTGGACATGGAATACGCCATGGTCGGTGCCCCTC
AGGCTAAGATCCAGCGTAACACCACTACTCCGGGTCAGATGGCAAACATCTTTGCCTACT
ACAAGACAAACGGTTCGGTAGGTGCTAACGGTACCCTGCCAACTGGTGATGGTTCCGACA
CTGGTACCGCTGGTGACCTCCGTCTTCTGACCGAAGACATGCTCCTGAATGCCTCTGAGG
CTATCTGGCGCAACGGTGGTCAGGCTAACTCGATCCAGACTTCGAGCTCGATCAAGAAGG
CCATCAGCAAGAACATGAAGGGTCGTGCAACTGAGATCACCCTGGATGCCTCGGATAACC
GCATTGCGCAGACCGTGGATGTCTACGAGAGTGACTTCGGTAAGTACACCATTCGTGCCA
ACCGCTGGTTCCACGAAAACACCATGTTCATCTTTGATCCGAAGATGCACGCCCTCTGCT
ACCTGCGTCCGTTCTTCCAGCACGAACTGGCTAAGACCGGTGACAGCGAGAAGCGCCAAC
TGCTGGTTGAATACACCCTGCGTGTTAACAACGAGAAGTCCGGTGCTCTGATCCGTGACG
TCGTAGCCCAGGTCTAACCCAACGGCCCTGGGGCCCTTTGTTTCCTTAGAGGTACATCAT
GAGTATCCAATCGACTTATGCAATTGACGAAGACCTTGGGCTCTTTATCCGAAAGGATAC
TCAAGATGTTGAGTCAATCCTGTCCGCTAACGCCGAAGAGCGACACTGGTGTCAATAGCA
ACCGCAAGGATAATATGCGCAAGGTAGCAAGTATCCCCTTGGTTGTCGTAGAGGCACTAC
GGAATCGTCCCATGGCTGAAGGTGGTCCTATCGATCTAAACCTGATTGGTTGTGACCCAG
ATCATGCCGCAAGATTTACCCGTTGGCTTAATGACCGAGATAACTATCGGATGCGGACCT
CTGAGGCACGGGTGTAATGAATGGCTACGATCAATAACGTAACTGATCTCGCTATTGCTG
CTATCCAGTGGTCTGACCGTCAGGATCTTACCCAAGAACTTCTGATGTTGTTCATTGGGA
ACACTACTGACCGTCTTAACCGATTGCTACGAGTGAGGGAGAACGAACACTTCGAAACTC
TCATGGCCTTCGGTGGTGGCATTGAGATCCCTGAGCACTTTGTTGCTCTCCGGTCTATCA
CGGGTGATTCTCTTATCGGTGGTCGTACTCTCCAGTACATCACACAAGATATCTTCACCC
ACTATGTTAACTACAACTACCAACCTCAGGGTGTAACCTACTACACTCGGTTGGGTAACT
TCTGGCGAGTATTCCCCGTTGTTCCTGACGGTGCCCCGTTCATTGTGAACTACTGGACTG
TACTCCCAGAGCTAAGCCTCGCTAACCCAACGACTTGGGCTCTGACGAAGTATCCGCAGA
TTTATCTCTATGGTGTCCTTGAGCAGATTTATCTGTACACCATGGATGAAGCTCGGTCCC
AGTTCTGGGGTCAGAAACTCGAACGGGCTGTTATGGAACTCCAGAACGAGGAGAATGCCG
CTGACTTCGCTAGCACTCGACTGGCGATCAAAGACATTGAACGTTAAGGAGCTTCAGATG
CCTATCTTTCTAAAACCCTCGCAATCAACCTTCTGGCTACCCTCTTCCCAACCAAGGTAA
TCGCTAAGTCCATCGTGACTGGTGCTAAGGCTTTGGCGGAGAAGACTAACTCTAAGGTTG
ACGACGAGTTCGTAAAGTCCTGGAAGACAACCTTAAGGAGAAGACGGAGGATGCAACTTC
TAACTGATAACCTGGGCAGCATCGTCAGTGCCCTGGTCGTATCCTCGGTAGTGACGGTAG
GTTCCTCGGTTGTCGGTCAGAATGTTCATCAGGCTCTGCTTGAAAGAAACATCCAGGCCA
CGGAGAAGCTCACCCAAGCGGTGAGCGATCTCCAGATTTCTATGGCAATCTTTGGGGAGC
GGTATGTCACCCGAAAAGAAATGAAAGAAGAGATAAAGGAGGCCAAGAATGGGTCTTGAG
GTCGCAACTTATATTAACCAGTTGGTGCCTACGAACCCTACCGGCTCTGATCTGAAGTCC
TTTGGGGATGACCATCTGCGACTCATTAAGAGTGCTATTAAGAACACCTTCCCCAATATT
TCTCAGGCTGTCACTGTAACGGCAGCCCAGCTAAACGCAGTCGCTGATACAACCCAGTAT
GTTAAGCCTGGGATGATCGTCATGTGGACTGGTGCCCTAGCTCAGATCCCAGCAGGTTGG
AAGCTTTGTAACGGCGTAGGTACTACCTCTAATGGTATCCCGATCCCTAACCTGATTGGG
GCATTCCCCTGGGGTATCGACGGATCTTCCCAGGCTGTAGGTACTAGAGGCGGTAGCGCT
AACATTGTATGGGATGGGTTCACTGAAGGGACTGCCCTTACCCTAGCCCAAATCCCATCA
CACACCCACACTTGGAGAACTAGGGTGCTACTACCCGCATCGGTTCTGCGGGTGACTCTG
GTGCTCTGACGGGAGGCTCTGGTAACGCAGCCAATACCAACCTTGAGACTGGCCCTGCTG
GTCAAAGTCAGACTCACAACCATGCAGTAAAGATCAACATGCCGTTGGGTAATATCCCAC
CGTTCTGTTCTGTGTTCTTCATCATTAAGAACTGAGGTATACAATGGCCCTAGAGAGACA
AGAGGTCAAGAACCCTACGGGGATTGTGACCGATATCGCCCCCGCTGACCTGCCACTGGA
GAAATGGTCCTTCGGGAACAACGTCCGGTTTAAGAACGGCAAGGCTCAGAAGGCTCTGGG
CCATACGCCTATCTTTGATACAGCCCAGGCCCCAATCTTGGATATGTTCCCTTTCATCCG
GAATAACATCCCATACTGGCTCTTGTGCTCAGAAAAGAGGCTTTACCTGGCAGATGGGAC
TACCATCATTGATGTGTCCCCAGGACCTTACGCTGCTAGTATAACTAATAGGTGGTCTGT
AGGATCGTTCAATGGAGTTATCTTTGCTAACGATGGGGTTAACCCTCCCACCACCTACCA
CCAACTGAGAGTGTGTTTAGGGTTCTACCTAACTTCCCAGCGAATACAACCTTTAGACGT
CTTAAGTCCTTCAAGAACTTCTTGATTGGATTGAATGTAACGTCTAACTCTATTGAAATG
CCCCAGATGGTCTGGTGGAGTACCTCAGCTGATGCTGGTGGTGTCCCGGCCTCTTGGGAC
CCAACGGACCCTACTAAGGATGCTGGTCAGAACACTTTGGCTGATACCAATGGTGCTATC
GTGGATGGTGTGAAGCTTCGTGACTCCTTCATCATCTACAAGGAAGACTCTGTATACTCC
ATGCGGTATATCGGTGGATTGTATATCTTCCAATTCCAGCAATTGTTTAACGACGTTGGT
ATCCTCGGGCCCAACTGTGCAGTAGAGTTCGATGGTAACCATTTCGTTGTAGGCCATGGT
GACGTCTATGTCCACAACGGTGTACAGAAACAGTCCGTGATTGATGCTCAGGTCCGTAAG
TTCTTCTTCTCTGATATCAACCCGGATAACTACCAACGAACCTTTGTGCTAGCTGACCAT
GTGAATACTGAAATGTGGGTATGCTACTCCTCGACTCGATCTGAGCCTGGGAAGCATTGC
GATAGGGCTATCATTTGGAACTGGAAGGAGAACACTTGGAGTATCCGAGACCTCCCTAAC
GTCCTCAGTGGAGCCTATGGCATCATTGACCCTAAGACTTCTAACCTCTGGGATGACGAC
TCCAACCCTGGGATACCGATACGTCGGTCTGGGGTGAAGGTTCGTATAACCCAGCGAAGT
CTAGTATGATCTTCACGTCCTTCCAGGATGCTAAACTCTTCCTCTTCGGGGAGACTTCTA
CGTTCTCTGGACAATCATTCACTAGTACCCTTGAGAGATCCGATATCTATCTCGGGGATG
ATCGAATGATGAAGACAGTGAAGTGCCATCATTCCACACATTACTGGTAACGGTACTTGC
TTAACATCTGGGTGGGTAACGCTCAGGTACAAGGTTCTGGTATTCGATGGAAAGGCCCTT
ACCCATACCGGATTGGTCAGGACTATAAGATTGACACTAAACATGTGGGCCGGTACATAG
CCTTGAAGTTCGACTTCTCTTCGGAGGGATTGGTACTTCAATGGATACACTATTGAAATG
GCCCCGAAGGCAGGTATGCGATGAGTCAAAAGTACAGCCCTTCGATTCCACCACAGGAAG
AGGAGGAACTGCTGCCCTTCCTTAATGAAGAATTCGTTAGGGTTGGACAGACTCTTAATG
ACCTAGCTGACGGCTACTGGGGAACTCTATGGAGCCCCTAAAATTCAAGCCAGGGACAGT
AAAGTATTTTGCCCCAGGTGGTAGGTCAGTATCCGGCATCTATCATTACGACTTGGATAA
CCAATGGAGACTCGCAGGTACTAAACCCAAGGACCTGCCGGGGATTTTATCCTATTTACC
CCACAGAACAACCATCAGCCGATGGGTACCTGTGCCTATAGGATGAACACTGCTAAGGAT
GAAGTATGGATAACCATGCTCATGTCTGGTGGTAACTACACTAATGGAGCTACTGTCCTG
GATCTTCCCCAGGCGTATTGGCCTCCTGCTGAGTTGTTTATCCCGGCCTATTCCAGCATC
ATCCCAGCGCAGAGCACTATTACTTATCCACCTCCGTCTGACCCTAACGCACCTCCGTTG
GATCAAGTCTTTGATGTTCTCAACAGGGCTACTATTCAGACTGGGGTGGTTAACCAAGCA
ATGTTTAAGATCACAGCTAATGGCCGTGTTCTAATCCAAGGAATTCCCCAAGGAGCAGTC
TTCGGGGTACATTCACATTCCCCTGGTGGTGACTCCATGATTCATTTGATTACTCGTGAG
AATATCGATCTGCTTCCTACCGTAGTCCCTGCTCTGGCCCGAGCCTTCAACAGGACGGAC
CTCGGTAAGTTTTGTAGACTTCGAACACTTGGTTCAATTCCTGGTTAATTATGAGGCCTA
TGTCTTCTACCAGGAAGAGAGCGGCTACGCTGGTGTAATTCAAGTGTCCCAAGCACCCTG
GGTAACATCCTTCACTTCTTCTGGAGTGGTAAGATGCCTGGGAATGAAACCCCGGTAATT
ACTCGGAGGTAGACGACTTCCTCGACAGTTCGCCCAACGAGTTAATCCGTCGGTTTATCC
AATGCGAAGGTCGTCGGGGCTGAAGCCTACCCAGAGAAACTCGGGTACACCGAAGACTCC
GTATCCTTCTATCGTGAGGTAACTCCAGATGAACTTCCTCCAATTTAATGTAAAGCGTCT
GATGGGGTTCGATGTAGGGGATGCCTAGATTCTCCGGGCTTACAAGGGTGGTAGTAAACA
AGACTCTGTCTCTACACCTATCAGCAAGGTAACTATAATGAACTACTCTCGGGTGCCAGT
GATTGGCTACATAGCAGGGCTTTGACTAATTACGAGAGCGATCGAACTTTGACCAGTGGC
TGACCAAAATGCTCTCCAACTTGAGTATCAGCGAAGGGGCACAGGTGGTCTCGGGGTGCC
CTTCAGTCTCTCCTGGGTAGCTCAGGTGTTAGCTCTCTGGCTGATTACCTTGGTCCTTAC
GATCCCAACAAAACTGGCTTGGCGAACGCCATTGGTGCAGCCAACGAGCAGATGCAATGG
GACTTCGACACTACGGTACGTCCAGACCTGCGAGCAGGGGCCACTAATGCTGGTCAGTAT
GGGAGTTCCCGAGCGGGTGTAGCAGAAGGTATTGCTACCGCTAGATTGCTCCAGAATCAA
CAGAATAACGCCTCCCAGTTGGCTTTCCAAGACCAGCAGGCTTACAACCAGAATAGGTTG
AATACCCTGGGTAACCTGTCGGCTATTGCTAAGGGCCTCGGCTCTGGTAATGCCATGCAG
GTAGATGCTGGTAGCATGCTTCAGAACCAGGAGCAGCAGGAAATCAACGGGGCTCTACAG
AAGTGGGCCTATGAGAATAACGTCAGCCTTAACGACCTACTCGCCTACAAGGAGCTTATC
TCCGGCGACATGGGTGGAACCAATGTTACTACCTCCTCGGGTGGTGGCGGTGGTGGTGGC
CTCAGGTCTGCCCTGGGTGCTCTCGGTGGTGCTTCCCTGGGTGCTCTCTTCGGTGGCCCA
GCGGGTGCTTCTGTTGGTATGAATGCTGGTGGTAGGGTCGGGGGCCTTCTGTTCTAATGG
CCTCCCTTCCTCAGAAACTGTTCGCTATAGGACAGAACATAGGTGGTGGCAGGAGCGGGT
TCAGTTGAGTCGTTGGGGGCTCCTACCGCCCAACCCACCTTGGGACAATGCAATCGGGAG
AGTGGACAATCAAACCCTTTTGGCGCAATGGGCGGAGCAGCACTCGCGGCTCTCCTCGGG
AAAGAGTGGAAGTCTTCTTCAGAAGCAGTACCAAGCTTTTTCTGTCGAAGGGGCTCGGGG
AGCAAGCGAGCGAGGCGCAGCGGAAGTTGCAGCAAGTATGGGGCAGGTGGAATCGCTTCT
AGCGCAAGAGAACTCGGTTTCGGACAGCAGCCAAAGTCTGGAATCCTAAGTAAACTATTT
GGAGGTTAATCCTATGGCCAGCATGGCTTATGAAGGGTCCCCAATTCGCCCTAGCATCCT
CCGGGCTGCTCAGAATGAACTGGACATGGCGCGAATCGCAAGGAACAAACTGCCGCTGGC
TGTAGAGGGCTCAGGAATCCCTGATCGTGTCCGCCGGGCTGCTCTCAGGCTGCCCTAGAG
AACCCTAATCGTTGGTCTCGGGTTGCCAAGAGGTGGCCCCTGCGGCTGAGGCTACGGGTC
GTGGAGCCTTGGGCCGTATCGCAGGTATCCTCGGTGGTCCAGAAGTGTCTGTTGGTGCCC
AACTGGCTGTAAGCCCAGGAGAACTTTGGGATGCAGAGCGGACTCGTGCTGAAGAAATGG
CTCAGGCTAGTCAGGTTGTAGAGAACAAGGGTCCCGGGAGGTTGCTCAAGAGGCAAACCA
CTGGCCTATAGGGTAGGGCCAACGTGCAGCCCAGAACGCCACAGGGGTTCTACGGGGCTG
AACTCCTGTCCCATGGGGTAAATCCCTAACCAACCCCTCTATCGGTTCGAGATCACTCCA
GAGGTGGCTCTGAGGCTGGTGCTGCTGTAGCAGATGAGGAGGAGGCTAATCGTCAGGTTA
TCCAACAGGGTGCAGCTGAGGGTCTTCGTACTGGTGCTGTAAGTCGTCCTGAAATGGCCC
AAGCTGTAGTTGAGGCTGATGCCCAGCGAGAAGGTGTAGAGCTTAAACCCCAAGAGCTTA
AGAACCGGGTGAACGAAGAGTTGACCCAGATGAGGACTATGGACAATGATGACCTGTCTC
GTTATGTATCTTATGCTCTCATTGGTACTGGTCTTCTGGCTTCGGCCCTAGACAAGACTG
GTAAAGCTGGGGATATGTTCGCTGCTTCCTACGAGCGTCAGCTTGATCGTAATCTACAGG
CTGGGATCAACCAGCAGAAGATGGCTGCCGCAGCTGCTGATCGTCAGATCAAGGAAAGGA
TCTGGAGCGTAAGGTGGCTAAGGATGCTGCTGATGTACGTCTCGGGGAAGGAAACCTGGA
GGTCAAGAAGGGCACCCTTGAGAAACCTCTCGTAGAAACACTGGTCTTCTGGATCGGTGG
GCTGAGGAGGCTGCCTCGGGGAGAGCCAACCTTGCCCTAACCCAGCGTGGACAGGATCTG
GCGCTAATCAGCAGGCCAACTACGGGCTGAAACAACCCGTCGTGGCCAGGATATGTCTCA
AGAGAATCCAACGAAAGTTCTGCTGTACGTCTGAAGACTGCTAAGATCAGCGCTCAGGCA
CGGCGGCAGCTAAGAGCAGCCGAGGTGAAACTGTTACTACTAGGACGCCCTTGGTATCCT
GAGTGAAGTCAATGGGTTCTCAGGCTCTGGGTGGTAAGAAGCTGAGTAAGACTGCCCAAC
AGGCTATTGCCACTGTCGAAATGAACTTCGGGCTAATCCGGGGGGGGCTAATATTACTTG
GGTGTTATTATCCAGCGGGAGGCTGCTAAGCTTCAACCTACGGGAACTGGTTTGGTGCTG
ATCTGGACTATCCTGCTAACCCGATAAAGGTACTTGACAAAGTATCCAAAATGTTTATAA
TGAACCTAGGCTCTTAAGATTCGCTTCTTCCTTTTGACTTGCCTTACTAAGAGGTTAGTA
TCCTAAGATACATCTTAAGAGCCTATTCTCTTCCACAAATAAAAAGGTGACTATGGCTCT
TTCTCCAGAACTGAAAGCCGCTATTGATGCGGAACTGGCTGAGGTCAAGGGCCTCGACGT
AGCCGCTGAATTGGCTTCCTTGAATGAGCCAGAGGTTATCGAAGAGGCACCCCAGGAAGT
AGCATGCCTGAGCCTACCCCAGACCTGAGTGCCCCTAGTAACTCCGGCTGACCCTAATTC
TATTAGCTCTGCGATTGGTCGCGGGGTTGATACCATGCAGTCTAACATCGGTGGTACCAT
TGCTACCCTTGGTGAACTGACTGGCAGTGACTACCTGAAAGACTACGGCACACAGATGGC
CGAGGAGAATGCTCAGGAAGCGTCCCAGTACGGAACCCCTAATGTTCGGTCTTTCGCTGA
TATCCAAGATATCCCATCCTTCGGTTCGTTCCTAAAGAATAACATTGTAGAGGCTCTCCC
TTCGATGGCCCCTGTACTTGCTGGTGGTGCCGCAGGTGCTAAGGCTGGCTCTGTCTTTGG
GGCCCCAGGTCGTATGGGTGGAGCGCTCATTGGTTCCTTCCTGAGTTCCATGGGTATCAA
CGTAGGTGCCCTGAGTAACCAGATGAAGGAACTAGACCCCGATCAAAGCAACCCATGGAC
CGCAGTCCTAGGTGGTGCTGGTCTGTCTGCCCTGGATACCGCAGGGGCTGGGGTTATCGC
TGGTCCCCTGTTGAAGCACCTTGGGAAAGACGGGGGGGCGCCACCATATGCTGGTACAGT
CCGGTCTACCCAAACAAACCGCTATCGAGGCTGTTACCCAGGCTGGTAAACACGCTGTAG
TCTCTGGTGTAGCTGAAGGTGTTACCTCTGGTGCCCAGCAGGCCCTCCAGGACACTATCG
CGTATGATGCCGTTGGGCAGACCCAATCCCTGAGCAGTTCATGGATAACCTCCTGACTGC
TGCATTCACTGGTACCGCTATGGGTACTGCCGGTGGTGCTGTATCCTCGGGGATGGACAC
CCTGGGTCGTCATCAGGACTCCGCTGGATCTGCCGTGGTTGACCCTAACGCCCCTGCGGC
CTCCTAAGGCTTCTGAGTTTCAGGCCTGGGGGTACGATCAAGAAGGCTTAAGGATGCCCT
GGAAACGAAGCTACGTCCCCTCCCTAGAGCCACTCGCCAAGGCCTCCCCTATCGCTCGTG
AGTTCTCTGAGACCTTCCGTGCTGATATGAGTGGTAAGCGGGCCTCTGGTAAGACTATCT
TTGAGGACCAGGAACTACAGGCAGGTAAGTGGAACTCTGAACTAGATAACATCTTTGAGG
GTAAGTCTTCCAAAGAGATCGATAGGATTATCGCTGATACATCCGCTGGTGTCAACACCC
TGAGGCTACCCGTCTGCGTTCTTTGATGGATGACGTAAGGAATGAGGCTGTTAACCGTGG
TGGCATGTCTGTTGGGACCATCCCCAACTATATGCCCTTTGGGCTGTCTCCTGAGAAGGT
TCAATCCCCAGAGTTCCTGAACGACATTACTCCGTACTTCCAGAACCGACAAGCTGCTGA
AGATGCTGTAGCTAACTGGCTGGTTGAAGTCTCGGATGATACTCGTGGTAACACTGCCCT
GAGGTTAACCGATTGGTTACTCAGAACCAGCAGACCGGGGCTTGGGAAGTAGACCCTCGC
TACCGTATCCAGGGTGATCCAGATACTCTACGTGGACGGTTTGCCCAGAGTGATGCAGTA
CCTAAGTATGGTCAACTGGAAGAGAGTCGGGCCTTTGGATCTGTACCTCAGGAGATACTC
AATAAGTATTCTCTTAATGATACTCCTAAGCGTCTCCAAGAGATTCGGGACTACTTCGAG
GGCTTCCACCGGATTGCCTTTACCGAACGGTTTGGTATCAACGGGGAGAAGGCTAACGCT
AAGATTGCATCTGCTGTAGCTGAGGCTCAACGGGCTGGTAAGCGGGTTACCAAGGAAGAG
GTGGATCGGATGTATGACCTAGTGGATGCCTATAATGGTATGCACGGTCGTATCAAAGAT
CTAATATCAAGCTGGCGGCTGTTACGTCGAGATTGCCCTCGTGCTCTCCAGGCTTCCCTC
GCCGGCTTCTCGACCTAACCGAGTTCAGCCTACCATTCGCTAAGGCTGGGGTTATGCCTA
CCCTTGGGGCTGTACTCCCAACCATGGGTGAGGTAGTAAGGCAAGCAGCCCGCAGGATCT
ACAGTGGGATTCCGAAGTCTGAGACCGGTCGGTTTTATGAGTGATATGAACCACACCCTG
GCCTCTGCTACCTCTCTGATGGCTGATCGGGTTGGTGCTGAGGTGTTTAACTCTACTATC
AAAGACGATCCGTGGTCAGTTCCTCATTAACGGCTTGTCCATCCTAACCCATGTTAACCG
AGTGTTTGCAACAGAGACTGCCAAGCGGGTCTATCAGAACAACCTGATGGATCTAGCCGC
AGGGCTCCCCTTCAGTTCTGCCAATGGTGCTCTAAAGGTTGCTCAGCTTCGGGAAATGGG
GGTTAACATCAGTAACCAGCAGGATATCTCAAGCTAATCTCCCCAGCTACTCCATCTGAA
GTCCTGATGGCTAACAACGTCAAGACTTTGGCCATGCGTCGGTTTGTAGATCAGGTAGTC
CTCGACCCCACCTTCGCTGATAAGCCTATGTGGATGAGCAACGGAAACGTTCAGATGTTC
TCCCTCTTGAAGGGTTACCCAGCAGCCTATGGTAACATCATCCTACCGATGTTCCGTAGA
CGAATGAGCCCACACTTCGCTGGTTCCTGACCAACGCTGGTATGGGTGCCGCAGGTGTAG
CCTTCACTCTGGTCTGATGATGAGTTCCATCCAGGTATCTCCAGATGAAAGCTTCGTCAA
TCATTAAGTTCGGTGGTCTAGCCGAGAGATACCGCAGTCCGAACAACGGATGATGGACGG
TGATGCAACAGATGCCACCCAGGCTTCGCGATTTACGACATGCTGACGGGTTACTGTCGA
GGGACTACCCCCGCAGAGGTAGTCTTGGGTCCAGTAGCTGGGGCCGCAAACTGAGGGTGC
TATGGCTGTTGGTAAAACTATCGCTTCGTTTGGGGACGACCCATCCGCAGGTGAAATCTG
GAAGTTTCTTGTATAAGAACTCCAGCACGTCCTTTCTGTTTCCGGTATGGAAGCGATGGA
AGATGCTCTGGATCTTTATGAGAAGTAATATGGCAACTTATAGAAACTGATGCCGCTGGT
CCTGGTGGCCGTGCCTACGGTTGATGTGCTAAAGTCTTCCGACGTAATGCCGATGGGGAT
CTCATTGAGATTACCTCGGATGCCGGTCGGGTGAATACTTCAACATCGTTACCGCTACAG
AGTTCCTCCCTGACTATTATGCAGTTAAGGAGAACGCAGCCCTGGTAGTAGAGAACGTTA
CAGCCTCCTTCCCGGAGAACCCCTCAGAGGCCGTTATCCCCTCTGTCCTGGTCAATACCC
TCGTGGGTGCTCCTGGGGAAACCTCGGGTGGCAACCGTGACCCTGGCCACGTGATTGGTC
TGTTCTCTGAGACCATGATTGAGGCACCTTGCGGTACTGCATTCGGTAGTGAATTCCGAG
TAGACCCTCGTCGGGAACACCTGGGTGTTTACGTGGCTATTAAGCACGTGATTGGCCCGG
ATGACCAAAACGGTGGTACCATCGGGGATTACATTATCGAGCAGTTTGATGACATGCGTG
GTCCTGTGAAGAACATTGGTTCTCTCCAACAGAACTACCTGGATCCCCGCCTTGTGACTA
CTCACCTTGGTGGTAATGTCGTCAACACCCAGCAGCTTACTCAGAACATTACCCTGACTA
AGCAGCAGTCTGGTTGGTTCTTCATGTCTCTAGGGACCACGGATATCACCGTGACCCTTG
GCGGATGTAACCCAGGTTGTCACTTCCACTTTATCCAGGGATCGGCAGCTAAGATCAAGT
TTGCTGTATCTCCGGATAAGGCTTGGTACGCTAAGGGTAACCAGACGGAAACTGATGGTC
AATTCGGGAATGCACTGTCCGTGTATATCCCTTCGGTGGTACCGTGGGTACCTTTAAATC
GGCAGCAATTAGGAGTTAGGTTATGGCAGGTTATATCGCTGACAACGACGGCAATAGTGT
ATTCGTTATTCAATCGAAGGCTATTGCTGTACGTAATGAAGATGGGACCTTTCGACAAGT
CATTGGCCCGAAAGACTTTGAGCCAGTGAAATGGGAGGATATTGAGGGAAGCCTGAGCTT
CTGGAGGTGGGTGCTAAGGCTAGCGAGGCTAAACCAGGTAACTGGAAGCCCAAGGCTAGC
GAAGTGAGTGGCCTAGATGCAGCCGCGGCTTACGTCCAGGGTAAAGGTCGCTGAGATCCC
GTGGCTTCCCTATACGGACACTCACGAGGCCCTCGTGGATAAGTTCAACACACTGCTGAA
CGCCTCTCGGAGCTAAAGATAAGGCCCCTTGGGATGATACCCTTGGGGCCTTTTTTTTTC
GAGACCTCGATGGATACCTACAGTGAACCTGCCCAAGATAATACATCGATGAGGAGTCTG
GATATTTCTCCCAGGGTCAGGAGTAACATCAGTCAGCTATATCCTACATAAACCAGCAGG
GCAAACAAGGCTGCTACCGCAATGTAGGTCCAAAGGGAATCCACCCTTACCCTTTTGATC
TTCGCGCATAGCCTCCAGTCTTTATAGAAGACGTTTGACCGTTGATCTACGATATCCAGC
ATCGAGCTAAGGAAGAGATATTCTTCCGTAATCTCTCGGACTTTATCAGAAGCAAGCTCC
AGTTCCGCTTGGACCTTCGCAAGATTGCTCTCCGCCTCTTCAAGTGCCTTCTCCAGTTCA
GCCTTTGTCATAGTACACCACCTTGTCACTACCCTTACGACATACTCAGGTCAATGGTCC
AACTCATGGTCGGGCACTTGATCCGAATCATCTTGGGGAGCCATCAACTGTTCCAATAGC
TAGGTGGGAAGAGGTCTTCTGTGTACCAGAAAGACTACCTTGTCTTCTCCCACCTCTAAG
TTCACGATCCTACACGATGCTTTCATAGTTACCCAAGATATCGGAAGGTGAACACTGGGG
ATGTACAGGATCTCCAGGACCTCGATGGAATACCATCCACCTTAAGCCCCTCCTCTGCAC
CTTTCCCAAGCTTCATATCAGCCAGAGTTCTGCGGAGATCGGCGTCTTAAACATCAACCC
GTTGACCGAAGTCATACTCAGACTTAATGTAGTACCAGGTCTAAGAGCTTTTCACAGGAA
TTCTCCACACTCATCAGCTTGAGGTCATACTCTCCGTCCTTGTGGTTCCGGAGAAGGGCT
ACCACCTCGCCAGTGGTCGTTACCCTGGGGCCCTTTGTAGGACTCATCATGGGTGTGCCA
AAGCTACCGACTACAAGCCCGTGGATTCGCTTCTTGCCCTTCTGCTGCCTCGATGTGGTG
CTTGGATCCTGTTCATTGGCCTTGGACGGGAAGCTGCGCTTGCGTCTTATTGAGGGCGTG
TAAACTCCGCCGTATGGCCGACCACTGTTGGGATTGTAGAAGTAGTTAGTGGGCCGGCGA
CACCTTCGACTTACCACGTCGAGGAAATCATGGACAATCCAATCGGACAATCAAAATGAT
CGTGCCCAATAAGGCAACCCAGGCAGGGTTGATTTTTCATGTGCAAGCGATACGCTCTTC
GTGGTTTCCGATGAAGAAGTGATTTCTGGTCGGTGAATGCGCTTCTTACAACCCGCTTGG
TGTTGCTGTAGGCGGCGGCGAAGAGGATCGAGGCAGAACTCGCATCGCATCATTACCAGC
TTGTATGTCAGCGAGGACTCGACGGCCTTCGATCTTAGCGGTACCACGGTCGTAGCTTGA
CAGACTGGGCATGTCCCAATGGTCCCCAATATGAACAATTCGCTTGGGGCGGTTACGTGC
GATCCACTCCCCAAGGTTCCGAGGTGATCGATGTTGACCTCGGATCGAGCAGATTTCAAT
GGCGAGTGTCTTCATTATACTTCTTACTCATTAGGGAAGGACTCCTTGAAAGTCTCTAGA
GTAAACCAGCGGAAGCCGTTACGCTCGGCCCATTCCGCCATGGATTGCTTTGTGCCATCT
TTACGCTTGGAAAGCCAATGGCAAGCTTGTGTTAGGGCGCTCGTAAACACAAGTTCAGTA
TCTGGGGGAGAGCTTCCCTCACCCAGATATTGCCAGATGCCTCTGAAGCTTCCTGGAGAA
TTGCCCTTGACCTCACGACCAACAGGTTCTTCGTCGATCCACAGGGTTGTATTGTCGATA
CCTTGAAGTCCGGCGTAGCGATGACGTATGGCACCGGCTCCGGCGAACTGCATCCAAGGC
ATCGTCTCGTGGACGATCCTCTCGGTTTCGCTGTCGTACTTCGTCCCAATCAATGACTTC
AGTTTGGGTCTGGGCCTCCTGCTTTGCCAATGAGCCCTCCTTCTTGAAGCTTACGGACAA
CCGATAGCGTCCCCTCAGTGAGGACAGAGTTAGACCGGATCAGCAATGAAGCCAATCCCC
AGGCACACCCGGAACTCCGGATACTTAAGTTTGATACGTTGGATGAGACAACGCGCACCC
AACTTGATTGTCAGTTAGGGGTTGAGAATGATCCAGAAGGGGTCTAGGACTCGGTTAAGA
GTAATGCACTTCCTTGCTTTATCAAACTCATAACCCTTGAACGGTAGACTTGAGATTTCA
GTCCACGGACACTTATGGGCCAGCATGCAATCTCACACAGTCCTACATCGAACTCTGCTG
GATGGGAGTGGGTACTCACGACAAGGTTGACGGGTAGGTCAACACCAATGGATTCCCACA
CATCAAACCCCGCAGGATACCCATCAGGCTTATCCCCAGTCCTACACCGGACCTTCTTGT
GGCCCAGCTTGTTGTAGAATCGAGTGACCTCTACCTCTAGGGTATCGTCATCACAGGGGA
TCAACCGCGGTCCAAAGCGACTACGCCGAGTATCAGTGGGGTCCTCCACATGGCCTACGG
ACATAGAGGTCGATATCCTTAGGTGCAACCCGTTGTCTGCATCGAAGGAAATACCAGCGA
CCTTGTAGTCGAACCCAAGACCTTCGAGGGATCTCAAAGAGACCTTCCACAGATCCTCTG
TGCTTCATCAATAGAATATTTCTTCATCGTCATGAAGTCTCCCAATGTGTTTCTTCAGTG
AGCAGTGATACTCGTTACCGGACTGCTGAATATCAAATAAAGAGCGGTCCCGAATGAGGT
AGGGGTGAAAATTCTCCAGAAGGTATTGCTCTTTCCAATTATCCGTACTGCTTCTGTTGG
TAGGCGTAGCGCAAGCTGCGAAGAGATCTCTCGCTAAGCTCCCCAAGCAAATCTGCCGCT
GTCTTTGGTCCGTCCCTGGGAGGCCTGGTATGTTATCCACGGAGTCACCAACAGGAGTTG
CCCGTAGAGGAATGCCGTACCGTTGCCCTCAAGCTTCCATGATTTCTGCGGCTTCTTAAC
GCCATACATTCTCCAAGAAGCGGAGACCCTTCCAAGACCATCAACTTGAAACGGTCCCAA
CTCCGGCTGGGAATCTCCACAGGGCCAACTGTAATGGTAGCATCCTGGGACTTGGCGGAT
ATCCTTGTCTCTAGAACACGCTGTAAAGTTATCTCCCTCTTCGATCCCTCGAATTCCGAG
CCAGTCATCAACCTCGATACCGTGGAAAGTGATTGCTCCCCACTTGTCATAAGTCTGGCC
GACACGGTTTCCCAGTGATGAGGCTTCTCAAGACCGATTCGATACCCTTATATTGCTTGA
TTTTCGCAAGCTCCAGCCTAAAATTTCCTTGGCCAGTAAGGTAGATTTCACACTCATCTG
CATTTACCCTTTTGATAATTTGTTCGACTTTATCATCGACGAGCTTATGGACCTCTTCCT
CAGGCCATGGCTTCTCCACCTGGATATCGAAGATGTGTTCCTTCGACATAGCCACGTGTC
CCAATTCGTAGCGAAGCTAAAGTACGTCGCCATCAATTCCTGCGATCATACTACTTACCC
TCCTTACGCTGGACTACTCCCAGCATTGAGCCCACGCTCTGCCGTACCTTATGTTCTGAA
CAGCATTATATGGGAACCCTAGTTTAGAGATTTCTGTATTCCCTAGACCACTTTTGATTA
ATCGGATGATCTCTTTGGCAACGCCCTCGTCTATAGTGGCAGCTGGGTTCTTGCTACCTC
TAAAGTCTGCGTTTCTCCCTTTCCTTGATCTATCCGTGTTGTTGTCACCCTTAGTTCCAA
GGAATAGGTGATCTGGTCTTACACAAGATGGGTTATCGCACTCGTGAAGTACATATAGTC
CTTCTGGAATCCCTCGAAGTGCAACTCCCAGGAAAACCTAGGGCGTACCCAACTCGTTTG
TTCCACTTGAAGCGACTTCTACCGAACTTATCAGTAGATGCTGTCCAGTTCCAGCAACCC
TCAGTTTTATCAACCTTGGACCAGAACCTCTCTTCAATCATCACGTTACCTCTTCTACGA
CCTGAGACTCTTTTAGCTTCTCTTCCCAGAAGACACGAAGGGCAAAGGCTTCACCCTTGG
CTCGATACTCTGGGTGCTCTACCACCGGGTTAACCAGTGCCTCGTAGCCCTTCCAGTCGT
AATATTCACTCTCTTGACGCTTGGCCTTGTCCATAGCTTCCTCCGTTAGGCTGTAGCCTG
GGGAAGCCCCAGGTCTATCGACGCCAATCACAGAGTAGTTGCTAGGAACAGTCTTAGCCC
TTGGGTCCAACAGAAGTTCCATTGGATTCCTCCTCTTGCTGAATGACGAGTTCAGGGATG
CTAGGGCGTTCCCACACTTCGTGATACCAGTCAGGGTAGTTTACTTTGGGGGGTCCAAAG
CTTCACCCTTGTGTCGCTCAAGGAGGTGTCTCCCGAAGGCAGCGTCATATCGCTGGACTG
TTATAGAACAGACCTCAACCCCACTGACTATATTTGCTGGCTCCGAAGTTAGCAGCGGTG
CCCACTGCATATAGAGCCCTCGGGAACGCTTCGAAGATGATTCCAACATCCACCTTACCG
CTATCAAGTTTAGCGCCCGGCTCACCGGATTGATTCCATTAGGATCGATACTCTACTTGT
TAAGATTGTATGGAACTCACCGCTGGCGCACTTTACTCTCGATTTCGAATTAAGCAGTAG
GGGCAGCCTGACCGAAAATACCCCGACTCATGATCCGCTAGGCCCTTAGATAGGAGCGTC
TTCGTCATCGAATACCTCGAATACGTCCTCAGGCTCTTCCTCGGTGTTGAAGGCACCACC
GGAACAGCGGATCGTCATCACCGTCGCCACCGGATACGATCTCGTGGAGTCGTACACCGC
TTTTGATCATAGGGCCGTCATAGTACCCGCCTCGTGGGCGCTTTTGGGTCTCGATCAGGA
TGCCAACTTCACCAGTAGAGCCACCCCACGGGTTGGGGCCATCATACGGCTTGTTGTCCG
AGGTCAGAACCACCGGCTTCATTACAGCAGACTTGCGCTCACCATCTTGCATCAATCCAC
GTGCTTCTTCTGCTTGACCTTGAACAGGTACTCGCCATCACGCTCTTGGTATTTGATGGT
ACCCTTCAGACGGGCATCTTTAGTTCCATCTGCTGTACCAGCTTGTCGGCCTCTTCCTTG
GTCGGAATGCAGATGGTTACTTGGTAGACCTCACCGTACTCGGTATCCGGAGTTACGATG
TAGGGAAGATCAGCTTCGCTACCGGGAAGGTGAATCGTTGGGAAACTTTCTTAGACATAT
CTTAAACCTCTCGTAGGGAAGAAGGTATTATACCACAAGGGGCTGAAAGTCAGCCCCCAG
ATGTATCAGTGTGTGTCATACCATGAGCGACCAGCGATAGAATCACTAGCCAAAGGACAG
TTAACCCCGAGGAGTTCCCTCAGCATCCCGAACGCAGACTTCCATCTGCTCACGTAGCGC
CTTTGAGATCCTCTGGGTGGCATTCCCACTGGCCTTCGTCGTGGATATCCAAGACTTTCC
AAGCCCTCAGGTTTAACCTACGAACCCGCTCGTCTAGGAGCACCATGGCCCACTTCATGA
CAATAGCACCTGCTGCTTGTAGGAGGGTGTTCAATGCCTTATGGATCATCACGTCGCCAG
ACTCAGAACGTCGCATGGTTAGCTTTTCGTCCGTCTAGCCCTTCGAGATAACCTCTCTCG
GCTTCCTGCTTAGCCACTCTCAATCAGTGCAGCTTAAGGTCAGGGTTAGCCTCAAGGAAC
TGGGCGGAGTCTAGCCCGTCTGCCCTGGTGCCTCAATGATAGTCCCGATCTTGGCATCCC
CAGCACCGTAGATGAACGCATCAAAGTTCAACCAGTGTCGCTACTACTGGCCCGCCTCTC
GGCTGCCCCAAGGTTTCCCCTGGGGATCGGACTATATCATCACCCTGTCTTCCAGGGGCT
GGGCGCTTCGAACCCGCTTGGGTCCTACATAATAGTCTCTGCACCTTTACACTTGAAGAT
ACTCAGCAGCCTTCCGAAGAAGCTCTGGAGAATCTTTCATCAGTCCCAATACTCTGTTAC
AGTTGTGACACAAGAGTCCACGAACCTTTACTACAGTTGCATGGCAGGGTCAACGACCAA
GAATGCAATGTGCTTAGAGGGGTCCATCAGGAATCCTTCTCCCCGCAGATATCACACTTG
TGGTCTCGTTCATCAGCCATAGCCCTTACTTCATCATACGTGAGTCCATAGACTCTGGTG
TAGTAGGCATTGATCCTACCCTCCTTGCACTCGTCTGAGCAGTAGTGGTGGCTAGGGGGG
GCGTAGGCTGGAACTCCGAGGAGCACTTTCTACAGTTCTTAATCTTAAACCATCCATTTG
GGTACTTCATAAACACCTCCCATAAAATATTAGTATAACACATTCTACGGGAAATGTCAA
GTGTCTTGGCTCAGGATTCCCATATTAAAGGGTTCCCTGAGTTCACCCAGTTTTAATCGA
GGGTTTCCCCAAGTCATCCATATCTCACAGATGAAGGTCTTAGCATCGTCCCGTGTGGGA
AGCCCTGCGGCTATCTGGTTGGCCGTGTGTACATCACCCTCGACCACCTCTTTGGTGTAC
TCTGGGTTGTTGATGTAGGATGCAAGCATCGAAGCTCTAGACCAACACCATCGTAGCCCA
CGAATACCAATTGATTCGCTGGGACGTATGCCAGTACTTTCCTACAGTCTTCCACTTACC
CTTCTTGAGTTCCTCCACGATGTTAGTGAAGGGCCTAACCCTTTCGTTCTCCCCAAGATC
ACGGCGGAGGACAGTCCATTTCCATTCACCAGCCTCAGGTGTCCCCTGGAACAACCCACG
GATTTCAGGTCCGAAAGGAGAACGAGCAGCGGGGATATTGACTACTACGGTGCCTCATGC
GGCCCGTAGGTGTTACTGAGGGGTTAGCACTCCCTCTAGGCGTCCATCAGGCCTCACCTG
ATCTACCATGCAAGGGACCGACGGTGGGCCCAAACCATTCGCTGCATCACCAGCTTTCCA
AGGTCGCCCTGGACGGTATCCATCGACTCTTCCGTCATCTTCGGAGTCGTTGGGACCTTA
CGTTGCTTTCGAGCTTTCTCTTGTTTCCCCAATGGTAGTTTCCCAGGGATGATTCCCTGG
GCTTCGTCGGAGTCGTCCAGATTTGCTCTGTCGAGGATCCCTCAATGTACTTATTCAGAT
TCATTAAGGTCAGATCACGTAGCTTCTTGCCATCAGTGCCGACAGTAATATCCTTGATGT
TCCATTGGTCAGGTATCCATCCCTGATCCAGCATCCAGTCCTTGAACTTGGCAGTCTTAC
CAAGGTCGAAGGGTACATACTGATTGCAGAGAAGGGACCAGATACCTCGAAGTGCCCAAG
ACGTTGCCACAGGGACTGGAGTCTTTGGTTCGGCTTACCACTCTTTAGGAATGGCTTGCT
GAAGGCCCCAGCCCTTACGATCATCATGGGCATCTGGGGACAGCCTCAAGGTCAATCTTG
AGGATTCGTTCGCTAAGCACATGGATCAGCCACTTGGCCCGCTGAGTCTGGAAGTAGACT
CCACGTTTACTCTGGCGGCTGATGATATCAGCTACCTTGTGCTCAACGAACAGTGACTTT
CTCCAATCCACTTAATCCCCTTAAGACGCTCCGCCAGATTCTCTACAACTGTCTCCACAG
CTTCGTGGGATACACCCTCCAGGTAGGCGAGGTAGTCCACGGTACCACTGCGGTCCAGCT
TCCATTGCTGCTCCAGGAAGGCCACAGCAACTTGCTTGAGCAGGAAGTCATCTACCCGCT
CCATGAGGATACTCTTGATCTTGCTCATGTAATCACCAGTCGAAAATGAAGTAGGAACAC
CCACGTTCACAGGCCAGGTCTACCAGGTACCAGGACAGGTCGATCTTGCGCTGGATATCC
TTAATGTCGCTCAGTTCTTCATCGGATGGCAGATTCACTACCCTTCTCCTTCATGGATCA
AAACTCCATTTCTTCTCTTCTTGAGAAGTAAACAAGAAGGTCTCCGCGGATCTAGCTGGG
TATTCCTGTCGATGTAGAATCGTCGTACGAGCTCAGATCCTTCTCCCGTACGGCTTTATT
GCGTTTAAGGCGGTAGGAACTCCAGATCCAGGTGAGACCTGGTAGCTCACCAGGAATCAG
CGGGGCTGTACCCTTCTCCCGAAGAAGGGTAATTTGGGGACTGCTGAGGAACTTCCGGAT
GTTAGTCCTTTGTATCTCCATGCTCTTATGGAGGGCAGAGGCCATATTACACAGGTACTT
ACCACGGACATGTTTGGAATAGCTTACATGGTCACTCATTTGTATCTCCTATAGGGGTAA
AGCAACCCCGGACACCTTAAGGTTATTATACCACACTTTTCTGGATTTGTCAAGCCTTCT
TGTGGAATACTTTATCGTACCACTTGTAGAAGTATTGAGCAGAAGTAATACCAAGGGCAC
CTCCCCACCCGGACACGAAGATAAACCATCCGATATCAAATTCTGGAAGATCCCACGTGA
TGTAAAGCAAACTGAGCCAGCGTGATACACCAAGATACTACAAACCCAGCCTTGATCTTA
TCATCCCGAAGGAGTTTAGAGTTCAGACCCAGGAGAAATACCTGGAAGAATGCACTCAGA
AGATGACTAGGACTTGTAGGGTTATTGACATGACTCACACACCTCGGGGTCTAGGCCGCA
GGCACTACCCAAGGGGAAGTCATCAGCGTCGATCTCAGGGCCACCCAGCTACCAGGAATT
CCTTCTCCAGGGCGATCTCCTTAAGCGCCTGCTCTTCCAGGCTTTCCTTCTTACTGGTCA
TCATTGATCTCCTCTACAGAAACCCATCCACGGACAGCACCGATCTCGTTAGCTCGGACG
GTCATGGGGTTGGCATCGGAATCACCAGCGAAGAATCTGATGATATCCAACTCTATGCGG
TAGAAGTCTGCGTTGAACACCTTGGTGTCCTGGAATCCCACGTTAACTCGATACTTCTTC
ACTCTTACCTCCCAGCAGTTCTTCCAGATTAGCCAGTACCTTCTGGGCCTTCAGATTGTC
CTGCATGACCTGGGTACGCTCCGCCTTCAGAGGAGACTGATCTCGTTGGCCAGATCCGTT
CAGATTCCTCCGAAGACTCTTGGATGAAGGTCTTCAGGTTAACAACTTTTAACGATAGAG
GGCTGAGGATTGCTGATAGCAGCTTTCGATTGAACATAATGAGTCCTCGGGGCCCGAGCC
CCTCTTCATTACTTTTCTTGCGAATGCCTTTGGCCTTACGATCGCCCACCCGATACCATC
GGCGGCGTTGAAGGAACGTACGGACGCGAAGGTTAGAATCCCCGTTTATACACCATCTTT
AACACGTTTGATATGATCGACAACCTCTGGGTTCGAGCTTCCCTGCCAAGACGCTTTCCA
CCTTTCAGGCGGGCTCGGTGCCGCTGAGCATCTCCTGACTTAGAGCCCACGCGCCCGTTT
CGCCGCGTCGAATAGCCAGTTCTCTCACGCTTGTAGTTCCTCACTCGCTTTTTTAGCCAA
TCTACAGTCCTCCATTCAACAAGCTCTTGCCAGAATCATGCCAGTACCCGGAGGAGGTAG
TTGAACAGTCGTGACAGCCACTCCATCCTGAAGGGTATGCTCAAACATTTCCTCACAGAA
CTTGGAGAAGTCGTTGAAGTCACCTTGTGACACTTCAGGAACTTACCCAGGCTCCGGGAA
TGACCCTGGGGCCTATCTGTAGAATCAACCTCGATGCAACCAAGGTATCATAGCTTCGGC
CGGGGGGGGTATGATAATCCCATGAAGTTTCTCAAGGACCCGGTTGTCGTAGTCAAGGAT
GTTGTGACCGACTACGAACTTTGCATGGGCGATGATCCTGTAGAAAACATCCATTTCCTC
GGGCCGGAATCCCCGGACTACCCCAGTCGGAATGTCTACAACAACAGCGCACCAAAGCCT
TGTGACCGTATTGAAGAGGCCGTCCCCTCTAGGTCATAGATAACGTAATCAAATTGGGGT
GTCATCGTCAGCAGGTACCTCGTCGTAGCTGCCCTCACGTTCAACCAAGCGACCCGTCTC
TGGGTTATACTTGGTAAACACTAGGCCAGTGTTACCGTAGTTCCTGTCCTTGATTACACG
GATTCTGCTCTCGTGCTTCTCTTCCCCGTCAGCCTGCTTGTTCCGCTCGAAGCCTATCAT
AAGCTGACACCAACGCTGCATAGCTCGGGAGCCGGTGAACTGGCTTTCCTTTACCTCAGC
GCCCTCCTCGTGGGTACGATTACCCTTGGGCGGGTTAAGGTGGGAGAAGATGAAGATCCG
AAGACCCAGCTCATCGGCCATACCTGCAAGCTCTGTACAGATACGGGCGATCTCCGTGTT
CATTTCGGAAGGACTAAGGTGGTTGGTCATGGCGGTCATGTTATCCAGCAGGATAGTCTT
CACATCCATGGCTACTGCCCAGAAGCGAATACATTCCTTGATATGATCCCAATCGTTCTG
ACCCTTGTTCTTCCACATGAAGAGCTTGCCACGGAGTTTACCCGCAGCATCTTTAAAGGC
TTGCTCATCCCACTCGATATCCGGTCGGTGGAAGGGAACATTAGCTACCTTCCCGCGATA
TTCTTCAGTGTCATGGCTACCTGCTCTTCCAACAGGAATGTCCCTACGTTCTCCCCGTGC
TCAATGCAATTCCAGGCAGCAATCTCGTGGGCCAACAGGGTCTTACCGATACCAGTACCT
CCACCTACCCCGATGATCTCACCATCACGCTGACCATAGGTAAGGTTGGTTAGACCTTCC
AGGGATAGCTCTTACCCCACTTAGGTGGTTCTAGCGCCTCAGCGTATACCTCATCGACAG
TTACGGAACAGTCCGGAGACTTAACCTTGCTACCGAATCGGATCATCTGGTAGACCTCAT
CCCCGATTACGCATAAGCATGTCGTTAGCATCCTTCAGGGGAAGCTCTACAAACTTACAC
TCGGGGTACAGGGCACGTACCTTCTCTACTGACTTACGACCCTCGTCATCAGCATCATGG
CAATAGATGACCTCGTTGAACCGTTCGAGTACACCAGATTCCTTTAGGAATGCGATATCT
CGTCCAGCGGAACCAACACCAGAGGACCAGCTAATGGCTGCCTGACGCAGATGCTTCCAC
TTCTCGGGCAGCTTCGACTCCATGATCTGAGCCACAGACATTGCCGACAGTTCATCCTCG
CAGATGACTAACCGCAGGTGGCCCATATCCTTATGCCGAAGAGTGTTATAACCGAAGGGG
TCAACACCACCCTTGGGACTACCACGATAGTAGAAAGCCTTGGGGTCTGGGATTCGGACG
TTAAACGCTCGGTACTCCCCATCGCGGAATGGATAGTAATGCTCGATAACGTCCTCACCA
TTTTTCTTGTGATGAACCAACACGTACCCGTATCGTTCGGCGATTACGTTTGCTTGATCT
TCCGGTATCGAGACTTTAGTTGAATACTCAAGGACTTCGTTGACTAAAGATGGATGATAT
CTCTTCAGTTTCTCCTTCGTTCAGAACCTTGAATCCTTCTTCGAACTTCATAGTGGCCGC
AACAGTTTAACTACCGAAGCGGGTACCTTTCTCGCTGTCTACGACAAGATGAGGTGATTA
CCTGTTTTATCCCCACCTTTAGCTCGGCAACCCGGACAAAGCCGTATCACCGATAATCTG
CTTCACTTATTCCTCCATCTGGCTCTTGAGTACCAAGCTCGGTACAGCATTGACGTTACC
CGGCAGGGGTCTTGAGGAGTTGTTACGAAAGTACCGTAGACCTTCTCCAGTTCACGAGTC
GATCCTCCGATCTTCTTCAGTCGCTCCACATGAAGCGAATACCAACAGACTCGTCACGTA
ATTTGCCATGGCTGGTCTCCGGGTTATCCGAGGGACTCCGGAATCTTGGAGACCTCGATG
GAGATCTTGGAGTGTCGTTGGGGCGACAAGGCCCAGGATCTCCTTGAGGGAGCATCTTCT
GGAGCATGTAGCTCTTAAGTCGAAGTTGTTCGGGGCAATAAGGTAGACTTCTACTGCTGT
CTACGGTCATTTCATTCATTATACTGCTCCTTGTCGTTTTGCCAGGTGTGCCTTCAGTCG
CCATCTTGGACGATATCCATCGCCATATGGCTATCCTGATGGTACACCAGAATGATTCGT
TCCCCGATCCGGAAATCCTTGAGGGTACGATCATACCAACCCGGATAACCTCAGAACGTC
AAGTTCTCCAACATTTCCTCCCCCTTCTCACCTTCGGAGTTGCCAGATTTCCCCACTACG
ATGAGATCGCGCGGGAGGCAAAGGAGAGGATGGGGAAGCCTCCAGCGGAGTACACATCAG
ACCCGCTCGCAGGATACAGCATTGCCGACAAACTCGGCCCCTTCCAGAAGAGTGGATGGT
TGGTACAAACCAGACGGGGAAATTACCATAAACGAAAACACGAACAACCATTAGATAGTC
TCCTCGAAGATTTTGTTGGAAGCCCTTGACGTAGGCCTCCAGGGCGCTGCCTTCTGCATC
AGGCCCGGCGCGGTGTTGTTCCAGGACAAACGCCCGGCTAGTAGCGTGCTACGGTGATGA
TATCCCTCCAGCGCCGGGGGGCCAGGCTATACAACGGATGGCTTCTGCCGCCGCCGGCAT
AGCCTGCTCCAGCTTCATCGATCCATTGCATCGTTGACGCCATAGACCCAACCGCCCGCT
ACGTTACGTGATGCTTTGGCCTTCGTTGGTCACCATATCGTTGGCAACGGCGGAGCTTGA
CCTGGAGCAGGGCAACTGGATCATGGACTCCGGAACTCGGTACGCTTACCTGACGATGCC
CTGGGTGAACAGTTGGGCGTTCTCGACGACCTCCGGAATGGTATGTTGGATGTGTACCGA
GGTAGTTACCCCTGGCGACGAAGGGCGTAAATGGCCTGCACCTCTGCGTCGTTGATGCTA
CAGATCAGATGAATACCCTGCCGCTATGACCATTGAGGTCGGTACGAGCGTACATCCGAC
CACAGGAGTCCAGGATCGGGTGGACATTGGCCCAGGAATCCGTCCAGCGGGGATCAGATG
TGGGGCGTTGGCCTCGAAGTGGCGGAAGAAGTCCAGCTTGTTGGTGCAGCGAGCAACCAT
GGCGGGTCATTGAGGAAGACCGGGGCGATACCCTGGAAGGCGTCATTGCCTCTGAACCTA
CAGTACCCCAGTTGATTACCGCAGTACCCGCGGCGTTGGGGTGAGCCCCTCGGACCGAAG
GATTCGGGCACCAGAACGTTGCAATTTACGGCACCGGAAGCTCGGGAACGCTGGCAGATG
TAGAGCATGGCATATCTCCCTGTTTCTGTTGGGGTAGTAGTGAAGCCAGCAATAGCCCCT
GAGGTTAAGTTGAACCCATGTACATCGCCAGGAACCGGCATGGGTCGGCCAGGGGCTATT
ACTAACGCACTACTTTTACTCAGTAATCTTCGAAGAGTCGATCACGATGGCCTCGGCAAT
TACCACCAGGGCAGGTACAAGGAATACCCTCGTCGGATTGGCATCGTTGAGCTCCTGTAC
TCGCCGAGCTCGACGGATCGACTGGATCTTGTCCAGGGTGTCGCGGGAGAAAAGGATACT
TACGAGTTGCGTCGGTTTCCTCCCTGGATCACTACTTGACGCTTGAGAGTTACTTGGGTG
AACGGCCTCCTATTTATTCGATTACGCATTCGCCGCAGATGAACTCACACTCATCCAGGC
TACCGCAATGAACAGCACCCTCGTACCGTCAGATGACGTTACGCTGGTCATACGCGGTAG
GGATCTTACCACGGGATGCACCCGCTTAAGGACATGAACAACGTTGTTGAACGTGTGTCC
CTGAACCTTCAAGGGTAGCGATGTTGGCCGGAGGGTATTCCCCAGGTGCCGCCGACTTGA
ACCCTGGGTTTAGAATGGGATTTCGTCTCCGATGAGATCGTTCAATCCTCAAAACCGGGG
TAGTCTCCCCAGGAGTCGGCCGATGCTTTGGGTCCAGGCAACTTACCGCCAGATCCTCGA
CAGTAACCTTGAGATCACGGTCTTGGCCGATGAAGTAGGCGTTGGAGATACTTCCTCGTA
GGACGGTGTAGCCGTGGACTTTGGCGACATTGATGCCATGAGCTTCGATGAGAAGGTTTT
CTTCACGCTCGATTCCAGTGATAGTTCCGTACTCGCTGCCGTTTGCGTAGGCCTCGATCT
TGACAACATCGAAGGTGACGAGCTGCCGGTGCTTGAAGGTGCTACCTGCTGCATCGAGAT
TGTTGTTGATCCGGAGGGTGTTCCTTGCGTACGCATCGCCAGACGTTCCATACGACGAGC
CCGCTTTGCTGCCTTTCGTTCCCGCTTGGCTGCCTTGGCTGCATTTTATGGCCCTCGTAG
TCGGAGACACCGACGTAACGACCCACCATGCCGCTGCTTGCCTTTCGCTTTCGGGGATGG
GAAGGTCGAAATGTAACCGAGTGGTCTGGGGTTCTGCCTACTCCTCCGGCCTCCGTGAAC
GGGATAGTTACCAGGACTTCAGCCTTCAGTTCAGCGATGGGAGAACGAAGGCGGATCTTA
ACGTTAAGGACGCTCCAGGAAAACCTTGAGGCATACCAGGCTCCGGATGCCCACACGATG
GTACCAGTGGTGGTCACCGCCATGAACAACGGACGCTCATCGTTGCGGATGAAGTTCAGG
GTACGTTCCTTGAGTCCCACCAGACAACCGCAGCAGCACCAGAACTTCTCTCGAACGTCT
TCTTAACCGTGGTTGGCAATGGTGGCGCGCACAGCATGTTCGAATCCACGTTGTACTTAT
CATTGCCATCCAGCAGGTGCAGGCCCCAGGTATCTACGGTGCCGTTATGTACCATGGTGA
TGTGGTCTACCTGGAAGGGTGGGCATTCCCATGGTCCGTCTTGTCGCCCATCGTGGCGTA
ACGGTTGTGACCCATGTAGATGCGAGCCCGACCCTTGTCCAGGAACTCCTTGGTTTCAGG
ATCAGCCAGGAAGTCGTAGGCATCTACTGCCCGCTTGTGAATTCCTACCTCGTTCTTAAC
CGGGTCGATCTTGGCCAAACCGGTGGCGTGAGCACCACGGACAATATCCACGGCAGGAGG
ATTTGAGAAAAGGCGATTTCGTTATCACTCGCGTTAGTTGTGGCGCAAGCCTACCAATCC
ACACATTGTATTTCTCCTTAGTACATATCTGGTTCGATTGTTACGCCGGTATGGCGCTGA
AGATTGAGGGTTATCCATAAGGCGCTACGAAATCTTGAAGAGCCTCTTGGTCACTCCAGA
AGGTCTCGTACACGCGGTGACCAATACGACGCAGAGGATACCGCAGTGATCGCTGTATCA
GTCGAACCTGGGTACCTGGCACCGTGCCAAGTGTACCCGCTCTGCTGCACCATCGAGTAG
TCTGGTGGTCGAGCTAGCAGCAATACCGATCAAAACCCTCTGACGCTCACGTTCCTATGC
TCCGGAGACGTCGCTGACGGTTCTGTTCATCCTCCAGAGGATCTACCCCAGGCGAACCAA
AGCCCATGGTTGCCACCGCGGTAACTGGCGATCCCCATTTCACGACCACCCGGAGACATT
TCATAGTCCGGAATGCCCCAGGAAGGCACATCCCGGAGAGATTCACCTCGGAAGCACGGA
ACTCTTCCAGGGGGTTTCTGCGTGAAGCCATGGCGAAGGCCTTTAGACACAACATACGCT
GCATCAGGCCTACCATTTCCTGGCAGTAGTCATGGCGTGAACACCACGAGAACTCGATGG
ATCGAAAGTTGTGGAGTTACCTGGAGGTTCAAGGCCGAATACTTGGGCCAGGGTAAGACC
CAAGACTTTCTCTCAGTCTGCCTTCCGGGGCCCGGGATACGGCGACCGAGGTCTGGAGCC
AACCAGTCGTTGCTGAAGAACGGGATGCAGGGGATTCACTATCCCGACGATACGGCTACA
GCGGTGATCGAAAACATCCTCGAATGCCATGTAAGTCAGGACCGTTCGTTCGTACACCGG
CCACTCTACGTCCCGCATATCCATGTGCAGGTGGGTGGAGCAACGGAAGGTTGGGGCCGG
GGAGTTTCCTCCATCGCACTCACAAAGGATTCAACCCGAGTGATTGCCTTCTGGCCAGAG
GCGGGACCGAATACATGCTCCATACCATCCCTCAGAGATCGTCGCCCTTCAGTCCACCCG
TCCACTTCCGGCCAGTTGTTGAGGCCTTCCAGTTCGACTTCGAACCCGAAGGAAGCAACC
GCAGGCAGTTCCTCGTGGTGTTCCGGGGAAATGATCTGGTTCTTACGGAACCCTATCTGT
GTGCCAATAACTGACATAGCAAGTCCTCCTGGTTCTTGAATTGTTCATCTGCGGACAGTC
GGCCATCTACCATCTGACCAACCTTCACCTTCCAGTGAACTACCCCATCCTTGATGAAGA
AATCCCGGTGGGAGGGCAGAGATCATTTCCTCGGCCTGGGTGAAGATTCGGATCATCATT
TCGCCGGTGATAGCCTGTTGGGCATGGTTCAGCAGGATGTTCCTGGGGTCCACACCCTTA
CGCTGAGTCGGTTGTTCACGAGGAAGGATACATAGGTATCACGAACCCACGGCCAAGACG
TCATAGGTACCCACTGGAGGACACGCTCTACCTCGCTGTAGACAGCCCACCGTAGTAGTT
ACCGCCGTCGAGGGCTGATACACGTTACCGAGGAGACAGAAACCCATCAGATCGACGGTC
GTCACCAATGGACTCGGTATCGTCCACGTACACTACCAGGCTCGCCGTCCCGCGGAAGAG
AGCATGGAATTGGAGGTAGTACATGTTGAAATCTCGGACAACCGATGGCATTCAGGTCAT
TCATATTTCACCCAGCGCTTGAAGTTGCAGCTACCGCCGCAGCGCCGTCGTTCTCGTTGA
TGATTCGCTGGACTTCATCGCCAGATACGATGAGGACGCCGCTCCTCCAGGAGGTGCTTG
GAGGTGTAAGCCTGTACTGCCATTCATAGACCGCGGTCAGGTCTGCGAAGATCAGAAGTT
CGACAGGCTGCGGTATACCGCCGTAGGGCTTATAGCGCATTGCACCAGCCTTGCCGTACA
GCTTCTTACGCTGCGTTGTCTATCGGGATGACAGACGCCAGTCCCAGGAGGTAGTCACAC
ATCTGCATGATGACCTCGCGGGTGTTCGCCAGCGACTCGCTCGATGTGGCTGAAGCCGAT
ATGGACGTGGCCGCCAGCGGCGGTGCGCGCAGGGTCGGAGGTGCATCCTTCGGCATCGTT
CTGACGACGAGTCCAGCAGTTGTAGTCCGGCTGCAACCGAAGGCAATAAGCCTGGGGCCA
ACGGAGGAGTTTCCTCGTCGGTACAGGTGAGACGACGGAGTTACCAAATGATCAATTCCA
TGCCGAAGGGTTGATCCTGGGCACCAAAAAAGTCGGACGGAAATGATCGCTTGACGAACT
CTTCCTTGGTGCTGGCCGGGTCGATGTTGTACTCAGAAGAACGTTGTCTTCTTGGACGGC
ACCACCGGCTACAACCAAAGAGCGCTTCCTTGGTTCCACCGATGAAGCCGATGACGCTCT
GGGGGTTACGGTCGTAGCCGACGAAAACTTCGGGATCTGCACCGATCAGGGGATTGCGTT
GTTCATTGCATGTTCTCCAGTTTTCGAGGATTTCGGGAAGGTCGTAATAATAGTGGGTAC
CGTGGGGAGGAATCTCGTCCGGGATCACCTAGATCGATAGTGATGGGGAGCCATGATGGA
AGGATTCGATCATCGTGTACCTCATCAACCCATCGCACTCGATCAGGTAATCGTCCTTGA
GTAGCCTTTCAGAGGGGATCATCATGGTGCTTGAGCTTGTCCTTGAACTCTTCTCGAGTT
CGTCCATGGATACTCTTGATATCGAAATAGGTGATATTCTTCCACCCACCTGTCAAGTGG
TCCATGATCTCACTGATGTAGCTATCCTCTACATCATCCCCATTGGCTTCGCACTGCTCC
TTATACTCCCAGCGGTCACGGGGAACATCGCCGGATAGCTGTCGCAGTGGACAGTGCTAC
CGACAGACACAACCGCGAGGGTCAGAAGTTCTGCGTTGAACCCCAGGACTTTATCCTGAG
CTTCCTTTTGAAAACGACGCATCTGATCCCCGATACCCCAGAGACGATCACCCATACGGA
GTGCGCAGATGATTGCCGATGCGTTCTTCTTGAGGTCCACACGAACGTACACAGCCTGTC
GGCGGCCAGGGGTGCTGAAGTGGTTCTGGTCGGAGAGGTTTTGGTCTCGTCAGATCCTGT
CCACCACTTGGTTGGCCAGTCCTGGGAGGCCGAGAGGATTCCGCCATCGGTGATCCTGTT
GACCAGATCACTGTTCAAGAACTCCACCAGCTTACCGGCAGTGTTCTCATGGGTGAATAC
CAGAAGGTGTCCAACCCCGGTTTCCCACACTACATCGGACAGGCCCCGTTTCGTCTGGGA
AAATGCGCAGAAGCAGTTGGTATATTCAGCCATTTTGTTAACGCAGCAGTGACCAACCTC
GACATCATGAGTACGTTATGAATGCATAGAACATTTGATTTCTCCTTGGTTTGTCAGAAG
TTTTTTCTCGATGAAGTCTTCGAGACCCAATTAGAGATATCCTTTATGTCACGACTCCAG
CCAATCTCACCCATGATCCCCAGCATGACCACTCCGTATTTTTTCACAGGTATGAGAATA
AAGGCGGATGAAACCTCCACCTCGCTATCTACGGTCATGTAGGTTCTTTCCGAAAACGGT
TGGCTGAGGGGCTATGGTAACCACCTCCACCTTGTCCAACTGAAGATCTTCAGGAATTCG
ACCGCCATGGTGTACTCCTTACCCACTCACGTCCACCTGGAACGATTGGCCATCCAACGA
CCGAATCGCATAGACTCTTCAGCGGATTGGATGTGGATATCCCCTTCTTGAGATCATCCC
AATCGCTACTGAACATGTAGTTGGAGAGTGGGTACCCGGTGTAGCCATTGGCTATCAGTC
CGTGGAAGGACATTGCGAGGTAGGACTTCCAGAAGCCATACTTCTCAGCAAGCTTCAGGT
GAACCTCCTCTTCACGACCTTGGTAGTCGAGTCCGCTGGAGATCATCTTGAAGAGGAATT
TCATGATGGGGTACCAGGAATCCAGGGTGTGTACCTTGGGGTTGAAGTAGATACCGCAGA
CCCCTTCTTTTCCGTGATGGGTGGAAATCACTTCCGTCCCGTTAGAATACTTCTCGAAGG
GGAATCCTGGTCTTGCTTTCGTAAGACCAGGAAGTGGACCTTCGGGATTTTGAAGGCCTT
GCCGCCGATGGTGATGGTCTTGAGTTCACCTTTGGGTAACACTTTGTTGAGTACATCGAT
GAACTTCTTGCTTCGGCGGGGAGCAGATGAACCAACCGTCGAGCTTCTATATCCGTGGGT
TACCGACCTTCCATGGTACCGAAGCAGGAGGAAGAGGTCATTACCTTGAGGTGGCTTTTA
CCCTCGCCCTTCTTGACTTCATACCGAAGGCATACTCTTGATACGGGCCATTTGTTTTCT
CCTTGGTTGAGTTAGCCAGCAATACCCCAGGACAGGAAATACTAGGGGTATACAGCGACC
TCTAAGTTACTTAGAAGGTGCCACGGCGCTGTTGCTGCCTTTGGTCGGTGCCGACACCTT
GGTGGCCTTGAGGTTGCCGTTCAGGGTCAATTCACCGTTGGAGCAGAGACGCTCATAGAA
ACCTTACGCTTACCCATTGTTCACCTCCTTAGCGAACGTTGATGAAGGGCATGGCTTGGC
CGCCGGTGACGTAGGTAGGCAGCTTGCCGTCCCACTTCTCGATGGCATTCAGTTCTACCA
CGCCGGGGTTCTGGCGGAGGGCTTCACCCTGGATGCGGAGGCTTTCGGCCTTACCTTGTG
CCACCAGGATAGCCGCTTGCTTCTCACCCTCGGCTGCCGCGATAGCCTTAGCTGCCTCGG
CCTGGGTCTGACGCAGTTCGTTCTCACGCTGCATCGCCGTCTGAGTGGCCTTGATCTTGG
CATTGATCGCCTCGACCACCTGCGCCGGCAGACCGATCATACCGTTGAGGTACAGGCTTT
CGACGATTATGCCACGGGTGGAGAAGTGCTCACGGACGGCAGCTTCGACTTCCTTGACAA
AGGCTTCCTTGCCAGGACCATAGATGGCCTCGGCGGACTTCTTGCTGCTGGCGTTGTTCA
CGGCGTTACGGACCACCTGCGGCACGTTCACGCTTACGATCTCGTTCATGCCCTTGCGGT
AGGTCTGGAACAGCAGGGGTGCGCTACCCGGAGCAGCCCGGAGGTGACGCCGATGGGGAG
ATCCAGCTTCAGGCCGTCCTTGTCCTGGAGCGATACAGATCGAAGTTCTGGTTGAAGATT
GAGACGAACAACTTTCCTCGTTCAGGTCAGGAACTTCCAGCCGACGGGGTTCCTTCAGAT
CGACGCCGGTCGCCCATCATGTTGACGACGACGCCGAGGCAGCCAGCGGGAACCTTGGAG
CAACCTGCGGTGATTGCGGGCAGCTTAATGGCCAGGAGGCCGAGTTTTCTTCGGTTTTGC
TACTTTAGCCAAGAAGAGGTGATGTAGACCATGCAAAGAAATGAACATGACGGGCTATCA
ATTTACATAGAAGCTATCGTAGGGAACACCAGATCGGCAGAGGCCTTCTATATATGTATG
TTGTCGTAGAGGTCAGGGTATCTTCTCCGATGCCCTCTAAATCCTTTGGATTGCCTCACG
GAGGCGGCCTCGCATCTGTTCCGTCATAGTACATCAGACCTCCACCGTCAGGACTTCACC
GGCTGGCAGTACATTGAAGAACAGGGACAACTCACTTGGCGAACACGCCATGATCGAACC
ATCGCTGATATTAATCATGGAAATGAACCCACGAGCAAGGGATCTTTCTGGCCGGATGTA
GACCTGGGAGTTCTTCTTACGTTCGAAGTACAGCGGGAGGGTTGGCTTAACACCCCTCGT
TACCTTAGCCATACTACACCCCTTCTTGCCCGAGAGTTTACCGGCGTAGGAGTACAGATG
GCTGACAGCCCAGAGGAGTACAGGATGGAGAGGACCAGGAGGCCAGCACCCATGGCGTTC
ATCAGGGTGTTAGCCGGGGACAGCATCTGGGTACTACCCAGAGGATGCTTACCCATGCGA
TAGCCAGAGCATTAATTCGAGTGTAGAGCTTGAGGACCATTGTTCTTACCTCTTTCTTAA
GATGAAGAAGATAGTAGGTTAGAACCTTAGGTATCCTAGGGATATAGCAACCCCCGACAC
CTTTTAAGGTTATTATACCATACCTTCCAGCAGAATGTCAAGGCCTAGATGTTACAGACC
TTTACAGCATTTTGTCGAGGTACCTGAGTGCTCGACGGTACTGGTGAAGTCCTGCAAACC
ACCTAGGTGGATTACGGAGAACCCCATGGCGATGAGGACTTGCCGCAGCCTTCACGTTGA
TGACGTGGGACCCGGACCTTGGTCGAGTGGTTGTCGGATGCCCAGGGTTGTAGTGATGCC
CATGCGGCGGAGGATGGTGTCGAGCACACCTGCTCGCTGTTCACCGTGAAGACCATCGTA
CCGTGGCCCTTCGTTGATTCACGGATAGCGCCGATCAGTTCCTTTGGCGAAACCACGGGC
TGAACCCATTGATTATGCCGCGTATCGGTCAGCGGTACCCGAGGGTCCCATGCCGATGTA
GATTTTGCGGTACAGCAGGAAGGAAAGTTCTGCGGTGCATTAGTAATCTCCCTTTGATTA
ATCGTTTGGTTGATAAATCTATTCCGTCAATGCCAGAGCCAATAAGCACCGACACAGCGC
CAGGAAGCCCAGGGGAGTATGATGGTTAGTAATAGGAAGGCGTCATGCTTTCATCACCTT
CCGCTTAACATCACCACAGACTTTACACTGAAGGTCGTAATAGACAGACGAGGCTACTTC
ACCACCCCTTTGTGCATGTACGAAAGGACCAGTCCTGATGATCTTGTGAAGTCGTGGACC
CTGAAGAAACAGCTGAGACGACCGAAGATCACTCAGTCCTCGCGCAGTTGCAACAACGAC
CATCTTTGGGGCCGAAGACCGGCATACAGTGGGGCAAGGCCTCACCAGATTGATCATAGC
CTCTGGCGTGGCGCAGGTAAGCCGATCGGCTGGACTCCATACCTACGGCTGCCAGGGTGA
AACCAAGCTCACCACGGGGCTCCTGGGGCCTTCCTGGAGGCTCATGTTGAACCCCGCTTT
TCTACCCGACGCTTCATGCGGCGCTCCTGAGCCATTATCTGGCCTATCATGGGTTTATTC
TTCATACGGCCCCACATGCAGGCATTCACCGACAACCACTTGGCCGGGAATAGATCAGGG
TGAGTACCGATATCCTTGCGCGAGGATGTTGAAGCCATCCTTGTGAATAATGGTCACGAG
CTCGCCCTTCTTGAGATAAACCAAGTCTCCAGACCCGGAATCACCCGAATGGACGTAGGC
ACCGTCCGCCATCTTGCTGATATGAAACTCAAACCTTGGCTTTGCCACCGCTACGGTGAA
AGAGGTATTGGTCATGGCGTCACCTCATTGAACCCGATGAACGATGTGGTCCACCGGGAT
TCCGAGTTCGAAGAAGGTTTCGGTGATGAACTGCCGAAGTTAATGACCTTTACGTGGCGT
TCACCGTCCTTGCCACCAACCAGAAACTTGGGGTTTAGTGGAGTTCATATAGATGATAAT
ACCTACACGTTTGCCGAAGATAGCTACCCGGATGTGGGTAACGGCCAGCCGGGGTACATC
TTGGGGTTAGGCTGGAATCGCCGGATGCTGACCAGGGACTCCAACCAGAGGAACAAATAC
AGGGCGGGCGTCATAGTACACCTACCTCACGATGCAAAGGGATGCTGTCCAAGGTCGAGG
ACAGGACGAAGAACCACCCACGCTACCAGCAACAACCCATTGGAACGTGAGCGTATGGCG
GCACATGCAATATACTTCCATTCCATCACCGCGCCCTGTTCTTAACCAAGGATGCCCGCT
TGGCACGGAGCTTGTTCAACTCAGGGTTTTACCAAGGTGGCTACCATTGGTATTGGTAAG
CTCACGAGTTACCTTGGCAATCTTGCGGTCGATAGCTTCGATGGCTTGCATGTTGCGGCT
TACCTTGCGATAGTCGTTGCGTTTCACGGGATAGTTTCCTTTGTTGATTTCCCAAGACTC
CCCAGCCTGCAACCATAGGTTCGGTGGGGTTTCGGCCAGGAATCACCATGGCCTCATCAG
TTGGGTCAGTTGATACCCATCTCTTCCTTCCAGTCACGGAAGAAGAAGTATCCGATGCCT
ACACAAGACACCACGATAGCAATAGTCATCGCTTCAACCTCTTAATCAATTCTTGCTGTT
CTTGCTTCCACCTGGGATCGGGGTGAACCCGCAGCATCCTCGTGAGCTTCTGCAACCGAT
TAACCATGAGTGCCCTTTCGTGGGCCGCTTCGTAGGGTGACTTCATTTGGTCCCACCCCG
CAGAAGCCCATGGGACGGCCTTCCACATAGACGTCTGCAGGCGAATTTACCATCGACGAA
AGCCCAACGGTAAACCACCTGTTCAACCCCGTTGCTATTGTACGAAATGAACGGGACAAA
CGCCCTTTGCACGTAATCGTTTGTAACAGCTACCAGTGTCACCAAAAGGTCCACACGGTT
ATATCCCTCGGTTAGTTCATCCATACAATACACGACCTACCATGTACTCTAGGGATATAA
ACCAAGGGGCGTCATAGTACGCCCCCGGGCCATCATAGGTAATGCCTTTCTGCGTATCGC
TTTCTGCTCCTAGATACCGCCCACGGCTTTACCATGGACAGATACTTTCGGATCTGTGCC
ACAGCTGGTGAGGGGTGCTTTAGTAACCTTGGGAAGAACCGCGCCACCCACTACCGCATC
AGGCCGCCTCGCCGTTGTAGAAACATCTGGCGCAGCAGGGTATTCAGCTGGATCTCACCT
GGTCAGCAGTGACCTTTGACTGGTCCTTGAACCGCTGTCCAGTTCCTTGTTGCAGTCCTA
AATTGTTTTGCAGGAGCCGTGCTTGAAGATCGATCGGCTTGAAATTGTCAGCGGCGCTTC
CGCCGGGCCGCAGTCGGACCAGTAAGTGCTCAGGGATGCCGGAGAACAATGCCGCGCCCT
CGGTTTCCTCTTGGCGAACGCCCCAGGCGCTGTTTGTTGCCGTCGAACTTGAATTCTTTT
TTTCAGTTCCGACCACTTGATCGGAGCGTAGCGCTCGAAGTAGCGGCGCAGGCTGTTGGT
CTTAGCGCCCTTCGGCATCATGGCCAGCATCGCACGGATAGCCCGAACATCACCATGCTC
GTGAGCCAGTACGGTAGCCGAGGCCGCCAGTTGTTGGGTCGCTTCATTCCAAGCCTTGTT
GAACGACTTCAGAGCTACCAGACCAGCGGTGATCTGATCCTTGCCCAGGATTTTGTCTGC
GGTGAGTACAGTTTCATAAGTATTTCCTTTTGTTTCAGGAGTTGGGAGAATGTCAAGGGG
TTGCCCAGACGTGGAGCTACCAAAGACCGACTTCCGATTGTTGCGATGGATATCAGTCTT
AGCAGTCTTGCGACCGCCTTTGTAGACTGCGGTCCTTTGTTTCGGTTTGCCTTTCACTTT
AATTCCCTCTAGAGGATACATTGCAAAGGGTTAGTCCTTTGTAATATATCCTACCTAACT
CCGAGGTTACTTGTAGAGGGAGCCGGATGGCTATCGTAGGGAGTAACCTTACCTGTTAGG
TAGGGATGCGTCTTACCCAGGACTCTCGCATACCGGATCGATAAGCTGGTAATTGAGGAT
TCGGATGGCTACCCTTTGACCTTGCTTTTCAATAGTCTAACCGCCGTTCCTGGGTCCGCA
ATCAAGCGGGTTATCCTGGGGGGATTGGTTAGACCTAAGAATCGGTTGTTGAATGGTCTA
GCTTAAACTATCGGCGGCATTGCAATGCCTGCCTACCAGGAAGCTTGTATCTCAGCTATC
CAGCGAAGATGGCTGGGGACGAATCGCTATGTTAGAGCCTTGGGCTTGGCTTGTCAAGTG
GTCCGTCTGTATTTACGTGGTGGACCAATCCTATCGGCTGGAGTCACAGCTTTGTAGTTA
GGCTATAAACAAGGCGCCCTATCTACACCGCCCGGACCATCACGTCCGCTTACTGTCAGG
CTACGCTAATCCCGAGGAGTCATGCACGTTATGCCGTTGACTTGGGGCCATCTTACCGCT
TCCCCTATCCCTTGTCAGCCCCCGATGCCTGCCGGTCTATGCCCCAGGTGACTTAGGCAT
TCCCCCCCTTGGTTGGCAGCCCCGTTAGTGTCCGTAGACTCGGGGGGGATGGTGGCTTCT
GGGGTGGAACGTGGTGGCCGATAGGCCGGGTTCGCGGGGTTGTCAAGCCCCTAGGGGTTT
CCCCGTTGCCCTATCGGTTTTCCCTCAAGGCGGCGCCATTAGGCCATATTCTTTACACAC
AGGGTTGTCTACTGGTTTTCATACAGTCTTGGACTATCGGTCCCCAGCAAACCCCGGATA
GACGGTCTTTGATTAACGCAGGGTATCGTGGGATGTCAATGGGGATCAAGGGGTTATCAG
GGATATTCCCCGATCCACCCCCTGAATACCTAAGATTTTTTCTTATAGAATACCCTAGGG
TCTATCCGATGAACGGTAGCTCGGGGTTGACCCTGAACTAACCTTATGGTATCCTAGGGG
AGGGGCTAGGGCTATACCCTGAGGATAGGCCACCCGCTATCAGGGGGGC

[0133] In another aspect, the invention provides an TIVP-27 bacteriophage targeting Pseudomonas aeruginosa. In certain embodiments, TIVP-27 binds a molecule of type IV pilus. In certain embodiments, the TIVP-27 bacteriophage has a genome comprising a nucleic acid sequence comprising SEQ ID NO: 5.

TIVP-27
(SEQ ID NO: 5)
CAGCCGCTCTCATTTTGCAATGAGAATTCGTACAGTTCATCATGCGCCTCCTTGAAAGTG
ATTTCTACTTTCGGTATGCGGATGCATGCTATATACTTGTATAGCCCGCTATCCCGTTTT
GCATGGCACACGAATTGCATAAGCATGACAAGGGTAACCTCGAAAGCGGAGCTTTCAAAG
TGGTCTGTGAAGTGGTGGCTCTACCTCTATTATAGTATTTGCGGACCGGAAGTAGTGACA
CTGAAAACATTGACTCTGCAGCTCCAGTAAATACGTTAAATCGAAAGGCTGATAGCTGCC
GCTATCGAGTAACCAACATTCACAATAAGGAGTGCAATGAATGACAAGCAAACAATCATG
CCAAGATCCATTACGCTAAGCAAATCTACTACGCCATAAAACGTCATCGCAGGTATGATG
AGATATGCAAGGAATGGGTCACACAGGCTTTGAAGCGTTCTATGATTGGCGGTGAATGTC
AGGGCACGCTACCGCCTAGATAAGAATATCCTCTTCCCGGGAACAAGCCTATTCGCATAC
GTGCGAGTTCACGCTCACATGCATACACTCTTCACCAACTGTGACAAGACAGCGAATAAC
CGTGCCAATACGTGGGATAGTTATATCCCTTAGGCGTCCTGCCTAGCACGCTATGACAAG
TACGGGATGCTACACGTTGCTCAGTGGTGACACTTTGAAAGAAGTCTACCCTGATCGTTC
GACGATCCGATGTGTTTTCCATGGCATGGCAACATGCCGCCATTAGCAGCCATCCGCGAA
TGGCTGATCTCTATCGATGGAGGATGTCTTCACAGTGTGAACGTTGTTCGCTGCTGTTGG
AGAGAGCGGGATGACTTGGCGCGACATTGCACAGGGAAGAGAGACAACCCTTTGCAACAA
CATTTGATAAGTCGATGGTCAACCCTTCGAGAGTGCGAGAACTTTGTGTGGAACTCCGAT
AGCGAAGCTTAATAAACGTATATGCATATTCCATGCCAACATGTGGAAAGATTTCCCCAC
CCGGTGGGCGGGAGCCCGTTGGCATTAGTTTGTATAGCTTTAGCTGTCGCAGCGGAAAGA
CCACGGCCAAATTCATTATGGAATTTATTAGGTTAGAGAGACAGGGTTCGTGGTTAAGCA
GCTCCGGAAATAGAACCACAACTCCCGAACAGGATACACTCGGACGTAGGCCACACTACA
TCACTATTTTCTCCCAGCCAGAGTAAACGCACCTTCAAGCGGTCATTATTTCTGGAGTGG
GGATTTCGTCGTGTGATACAATAGCAGCTTCCGCTTGGTAATAGGAGAATGGCCAATGCA
AATCTATAGGATTGGTATTGGGAATAAGCCGGACAACAGCTGTAGACCGTAATCCGTAGA
TTCGCTGCCCGGGCTTTTGTCTCTACTGATTGTATTCCATGTCCCTGCTTCCAAGCATCC
CTGCATAACCTTGCATACTCTTCGTTAATCTGGTCCATGTACTGCAACGCTCGTTCTGCT
CTACCGACTGAACCCGTTGTGACGGAGAATCTTGGTTCAAATTTCATCATCCCAGAAGTC
TCTGACCAAGCTTCCCAAGCCACTGCTTTTCAGACTCTTTATGCAATCTCGATAGGCTGA
TGTTCAATATTGCTCAGACATTAGACCCTCCCGAACGTTACGATCACGCCTTTGCTTTAT
TAGGGTTGCTTGTAGCTCATCCAGGAGAGGGGCTTACTGCCCACGATGATGATACTTATC
TGCCTCTCTAGAGTCATCACACACTTAGTCTGAAGGTAGGCCTATACAAGGCGTACATAT
CGGGTTGCCACTTCGCTTCGCAGGCCTGTTCCAGAAGCTAATGAACCGTCTTCGAATGAT
CCCGATGTACAGGCACCGGGGACTATCGTCTGGCCCATCTACGGAGATAGGGTGTTCCAT
CCACTCCCCTGATCTTATCAACGACGCCCTTCCTACTTCCTTCAATTGAGCGTACTGGTT
AAAACGGGTTAACGCACCAAACTGTTCGGCAAGCGGAAATGTTTATCGATCTCTTTAGTT
TTCATTCTCTTCCTCCATGCTCCGCAATGATTTTCAACGCTTGAAGCGTGTAGGTTACGA
AGCTCTGTGTAGACCAGTGTCACACTCATGAAGCGTGTACGCGGTCACTTTCTTCAGTGA
CGAAATGGAAGTCTACCCCTTCGAAGTCGTAGGTCGATTTCGAGTATCCAATGGCCTTTG
AGTTCTTTTCCTCCGTACCACAGGAATGTCATTGGACTTCCGTCGCTTTTACGAGTGTGT
AGTCCAGCAGATTATCTCCAACCCACAGTAGCACTTTTGAGCCTTGTCGTACATGAAGCC
GTTTCCGCCCCAACCGATACCATAAGCCTTAAGAGGTGCTGTTGTATCGCAATGTTCTCT
TCGTGGGGGGTCTTCTAACAATAGTGTAAACTTCACCAAACGCTCTTTCACCCTCTCTCA
TTCCTCCTGTTCGTGCTTTATGGGAGTGTAAACGTTCCCAGTCACTGTCAAGTTTCTGGG
GATAGACCCAGACGCTTCAGCTTTTTAGAATGATATCCCACTCATCGCCTTCTTGGACCT
TCTACATACTTTCCATCATCAACGCACGGTCAATCAGACCAGCCTTGTAGTTATCCCGGC
TACGCTTATACAACAGCTTGTCGATGTAGTCCTTCTTATCTGCCAAAGCGATAGCCTTCC
TGGCCATATACAGCGTATTCTTCCGAAGTCATCCACGGCATATTGGTCAGTACGAGGTCA
GCGGCGTCCCCTGACCAAGGGGATATTCCTCCATAGAACTTTACCGGTATCAGGTTCGAT
TCGCAGCTCTCCACTGTAGCACTGTTCCGGTCTTAGAATTGGTAATATGCACCTTCTCAT
CGATACGGTGGGCCATCATCGAAAATTCCACGTTGCGGCTCCATGATCCATCGCTTCCAG
TCGAAGAATGTAGCACAAATAGCTTTCCAACTGGCTCCGACCTGCAACCGTCTTCTTCAG
ACGTTAATCTGCTTAGCGTTTATATACTTTACAGGCCGGGAGGTCGGATCATAGCACCTC
TTACCTGGAACCTCAGCCCGAGACCCCAACAACACTTAGGCTCATCGTTACTTTTCCTCT
CGAACCATGCGAACAGCTTCTAAAACATATCCAGTCCTCCTTCCTGTGATACAATTTAAA
TAGTCTCCACACTTTTCTAGGAGATTAACGAGGAATAGCATATTCATAAACGGTACGGCG
ATAGGCCATCATTCCAGCCAACCACCGCTTCGGGCCTCTTCTACGCTCTCGGTAATTTTC
CCTCCACCCAAGAAGGGGGCGTAGAGATTCCCATACGAACATCCCTATCACAGAGTAGAA
CAATAGGCAGACCACTCCGGACGACTATGCATGGCGAGAATGAGAAGCCCCACGGTCTCC
ATGGTGCGGATCCCTCTCTTTAAGTAGTTTACGGCTGTTCCAGATAGACAGAGCCCACTT
AGGTAACAACACCACTTTCAAAACGCGCTGCTGTATGTTGCGTAGAGTAGTGCAGTTAGC
ACACTGCGTATGTATTAGGCCATAGCAGTCCCAGTACAATGGCAAAAGCCCGATACCCTC
TCTGTGATCTTTTAGTCGCACTAGCTGGGAAGTTATCTTTGAAATACTCCGTGATACCCA
TGTAGGTCCATTACGAATAATTTCACGCGAGCGAGAGGACGAATAGCATTGGGATTATTC
CATTACCCTCCTTTCGAATAAGTCGAAGTAGGCTCACGTAGAAGTTGCACCACGCCCCGC
CTATGGCCCAGCCTTCCAATAGTCTTCCCCTGAAACCTTGTTCGGAGGGTTATTCTCGAA
CATGGATAACACGCATGAATCAGCTACTTCGTCCAAGAGGTGCATTACCGAGTTAAGCGG
CCCGATTCCAAAGGTCTTATCTAGCCACCCCTTAAATCAACCGCACGTCTGGAGACGGTG
ACGCTGGAGTCACTGGCACAGCGCCAATCTTCCGAATGTAGCACACATGTATGGTTCCTC
GTTCTCGAAGAATGCCCGCATGCCCTCCTTGATTAGAGGTGCAATAGAATTAGAGTTCAT
TGTTTTTCCTTCCTTTGAGCCCCACTAGGCTCTAAATTTTTTGGTTCGACCTGTCAACAC
ATCACAACCCAGTTGTACAGGTCAGCCTCGTAAGCCGATGGCAGCGATTAATTCAAGAAG
AACGCATATCAATAGCTGCGTATTTGGTTGCGAAGCTGTTGATGTACGTTATAAACCCGT
TGTCGCCCCGGCTAAACAGGGCGTATTCCCTCAGTCCCATCCTTGAACGTATCTAACGCG
ATAATATACTTGTCGAAGATCACTGCGGCTTCCTCCCGGCTGATGTAGTAATTGTATTCG
TCCTCTTGACGAGGAACGCACGATAGAAGCCTTTCAAAGTTCCCCTTGACCAGCACCAGA
TTGCTCCTCCACCTTGCATGTATAGATATACATGGTGTTTGCTACTGGATAACAGGATCA
TCCCTGGGACGAACATCCAGAGCAGAGCATAGCCTCCATTGGCATGCTTAATAAGTGTGC
AACTACAGCGAGCAGTATTCTGCATCGCGGCCAGAACCCAGACAGCAGGAGCGACCGGCA
CGAATGCAGGGCGAGTGTAAAACGCAATAGCTACGAGTTTCTTGGAAATTCGGCTCACCC
TCCTTCTTGGTTCGTCTGGGGAACATCCGGCTCAGTAGACGAATGTCTTGGATACTTCAT
GCATTCTTAGCTCATCTTTTGCAGAACCCGTCAATCAATTCTCATGTGCGAATTCCGCAG
CCTTGTAGTAGCGATTAGCTTCCGTCTTGCCTCCACTCCGGAAGGAGGTGGCTGCCCAGC
TGCTGATATTACGCGACTCTTGCAAAATTGTCAAGAGCTTTTGCAGAGAGGGATTGACCT
TCGTCAGGTCTGTACCAATCAAGTCTACACCTTGAGAACGTCAGTCCACCCACAGAGGGT
AGCTCCCCATCAAGCTTCGACCATGACTTCGTACATTTGCTGGAACAGCGTTGAAAGAAA
AGGGCTTTTCGCCCTCTGCTGGTATCTAGAGGAGGAACAAGTCTCTTCTTCCACCTTGTG
AATCAACCGATCAGCATTCGCCCTATCCGAGACTTTTAGCTCCTCGATCTCTTCACATGT
CAACATACGGAGGGCACACCTTAGATTTCGATAGTGACGACGCTCTTCGCATGTCAGGTT
AGCAGGTCCATACCATCTGAACATGTTGTTGATATCGTATCGAATCAACTGAACTTCTGC
CCGTCGCACATATCCACGTCGAACCACGCCACGACCCATCTGACGTAATCTTCAGGTCGT
TCTCTTCGCCATCTGCACTCTAGATCAACGTGACTGCCTCTAGAACGTAAACGTCTTCGA
ACCCTGTACCTTTTTTTTTTTTTTTTTTTCGTTCTTAAGTCGGATGATTCGAGCGCGAAT
CCATTGCATGCACCTGCGGTTTGGGTCTGTGATATCGCAGACCAATGAACCTCTGGAACC
TCAACTGGCATACATGATTGTACCTCTATTTGTTTTACAAGAACGCCATGATTCTGTCTC
TGTCTGCATGGCGGTACAGATTGAAGCAAGGCACGCCTCTAGAGGACTAGCTGCCAAGCG
GTCCTAGTCCCGCCTTTCTGAATCCCCGTTGTGGTCTGTCTTGTTCCAGCACACCAAGAA
CTTCAGGCGTGTTGAGATCGATTCTCAGCACTTGGAAAACGTTCCGAGTGTGGGCTCGTC
TTGCGAATGGACTCAGAACAGGCTCTCCATCATTTCTGACAGAGTTCCGTGCCGGGTGTA
TCCGGCTACAATACCCCAGCCTTCCCACTGCCCGGCCACTCTTCTGGAAGCGATTAGGAA
GCTCCTAGAGTCTCAGCATCACATACTGATTGGACCCGCCTCCGCAGATAGATTTCGTCG
TAGTCCCTCCTCTTTTGTTATTGGATATATAATCGTTGCCAGCCTCGAACGCTGAATCTG
CTCCCTTTCGTCCTGACCGAAGAATAAAACTCGTTCCAGTTTACGACTCTAGCTCTTCGC
GAGAATGCCCCAATTCTTGTTAGGCGTGCATTCTACTCACCTCGTATATCATCTCATCGT
CTCACCATTTGTCCCAGTTCTCCGTATGTAACCCAGTGGTGACGATAACTCTTCTTGGTT
GGTGTACTCCACTAACACCGGATAGAAGTTGTCTTCGTAGTCTATACCACCACCTTGCAT
TCACATCCTTCTGGGAACAGTGTATCCATCGCCGTTCATGGTTAAGAGCATTCCCCGGTA
CACGTCTTTTATCCTAGCTCACTCTCCAGACTCTTCAAACTTGAGTCTCAATTTCTCGAT
TATTTGAGCTTGCAAATGGAGAAGTTCGTACGCTGTTGTTGTCCAGATCAATAGACATGT
CACCTTTCCTTCTAGCTTTTGAATTCTTTTGTCCAGCTTAGTTAGATGCTTATCCAGCTT
ATCTAGCTTTTGACCTATTAAAGTTGAAAGTCGAGCCCGGGCCAACCAAGTCCCCTTTAT
ACTTAATTGCACCCCGATCATATATCCTCCTATTACAGTTCGTAAACGTATACCTGAACT
ACGAGCGTCCCCTCGATAGAGGCTCGACATTGCTCCAGTCCTCTCCGGCTAAACCGCAGC
CACCTCGGCAGACCTACACAACTCCGAGGTAGGAATCGCCCGAGCGTCAGCCTCTGCCTG
CTGAACAGAGACATAGTGTACGGCTTGGCCCAGTGCGTCGCTTTTTTTCGAGTGTAGACT
GACCCTCTTCTCGGCCATATTGTATCCGCGATTATAAATCGATCCGTACTCGTTCATTAG
AAGGTCAGGGAGCTTCGAGTTTACCGTCCCTTTCACCGTTGTTTGGTCTGTTCGTAGGCC
TCCGGGAATTGCTCCGATTTGCTTTTAGCAATGTTGCCGCCCATGGTGTTGAAGCAATTA
GCCTGATGTGCAATAGCGTGCAACTTCCTTTTGTTTTTTGAACGCGGCGCAGGTCGCCCT
TCGGTATTTAATCATTTGAACTCTTCTACACTTTGTGTATCTTGATATCCAAAACTCTCG
CATCGGCTCGATGTTATCGTACATCGAGTCTAATGCTGCGAATGTGGAGACCTCAGTACC
CTTTTCCCAAACTTGAACAATCTATGTCCTTATTCTGGTCGGCTCTTGCTCGCAGAAGGT
TGTAAAATAGTATTTAGCCAACATCCTCACCTCCTCTTATACGCCGCTCTTAATCCGATA
ACGGATAGATTCCAGATCATTGTTCTTCAAATCTTCCGTGTCCCATTCTGCCTTTGAAGA
ACGTCCGCAAGGAACCAGTAGCCTCCTCCTCTTCAGATACATTATCTTTCAACTGGAGGA
ATCGACTCATTTTGCAGGTCTTCAAGTACACTTTCAGGAGACCTTAGCCTCGACTTCTTC
TTGCTGTCAGTTTTCGGGTCTTTGAAGATTGCAATGCCTTCACCGTTCACTTCCGTAGAA
GCTTACCGCGAATCCGAAAGTATCCTGGTGTTGCACTGGTAAGTGTAACTGCCAACTCAA
ACACTACAGTTCAGGGAAGCAAAACCTTTCTCCTTCGCGCCTTAAGATTTTAGCTGCTCG
GCGAGTCGTAATGGAATCCCCATAGATCAAACCGATATGAGAATCGAGCATCTTATAACC
CGCTTCATTCACAGTGCCGAAGGTTTCCCACAGAACTTGATAGCTCCTTTACCTGCGCTC
GCCTACTTCTTTCTGAGTTTGTAGCCAATTACATACTCGTATTGATCCCACTCAGTGGGA
ATAACCTTTGAAGTACTTATCTTCAAAGTTCAGAACAAATGCATCGTTTCCATTTACTGC
ATCCATGATATCCCAGTGTTCGAGCGACTCGACAACTTCAATATCACCCAGTCCGCAGAT
AACCTCTACAGGATCACCAGAGTCTGGACGAATAACCAGCTTGCCATCACGCTCCATGAT
CTGATCCTGATGGACGGCAGAATTTCAGTAAAAGCACGCCCCAGAAGTCGAAGGTTCGCC
ACGTACGACAGAATACCACTCGAACTGGGAACTTACCCATCAGTTCGATAAGGAATCGAC
GTTCTGCTTCACGGCCACCTTCACCTTCCCCATCCTGCATTTCTCAATACGGAGATGTTG
CTAGTAGCTACAGCGTGTTCAGTCGCAGGTACGGAGCAAGCTACCAGACCAGTGCGCTAT
ATAGTAGTCCTTTCGGCGTAGATAGCCGCTGCCAAGGTGTCCGAGCCTACGAACGAGGTC
AAGACCAACACCGCTTCTTCGGGCCGCGTCTTCAATCCCACTCATACCCCGGGCACTGAA
GTCGTGAAACTGAACGGACAGCAGGAAGTCGTCGTAATAACCCAGTGTGGTTCGCGTAGT
ACCGGGCCCATAGCTGCGTATTCTGCGGCAATAGGTTGCGTTGGTTGCGGTCTTCCAAGT
CATAGCCGAAATCAGGGTCTCATGGTAGTTCACCAGCCAGTAGAACTCAGGCAGGGGGTA
TTCTGATAGCTAGCAATAATGCCCATAGGAACGCGCTAACGCCCCTCGGTCAAAGACTTA
ACCTCCAGAGGCAGATAGCCGAGCTTGTGAAGGGCGCGAAGTTGCCCACGGCTTCCATTT
CCCCGGCCAAAATAGCCAGTCAGGAACAACCGGGAATACCGGGCCAACGGCGTTTCTTCA
GCCGCGAAGAAGCCTTCCCAAGACTCTACGATCTCCATCCAGCGGCCCGTCCGCCGAATT
TGAGAGTGCCGTCGTAGAAGTCGGTGGCATGCGTCTTTCGATAAAATCTTATCGGAGCGA
GGTCAGGCTGCTATAGACAAGCTGAGTTCCTTTTCCGAGGCACATGGAGCCGTCCAATCT
TTGTACCCATCAGTGGAAAGATGCGCAAATTTTCATGTTATTTCCTCCTGTTGTGTTGAA
TAGGCCCAGACTACATCTCTGGGCCTCCTGTCAATATTCGACTTCTTCTACTGGCAGCGT
CAAAGCATTGTGGTAGATGCATGGAAGGCGGCAATGGTTGCTTCTTGCTGTGGAAGTCTT
CCAAAACTTATCTGCATCGTCTTGTACCGAGCGTCCAGTTCCTCCTTGGTGTCGCGAACT
CCACCTGACAAATCTCTTCTCTGGAGCCGAACGCTTATACTCTGCCAACCAGATAATTAA
GCTCACAGGCGTTCCGCCTTGAGTATTCAAAACCGGAATGACAGTCAGCGCTTCGTGCTC
TTTTGAGGAGCGTAATCCGAGGTGTGATGATCCGAAGGAATCCAGCAAGCAGTCGATACC
CTACTGAAGATTCCATGAGTGACGAACAGGTCAGGAGCACTCACACTTTACTGTAATTCT
CTTAGGGCCTTAGGACACGCTTCGGAATGTAGCACCTCCGTCACAGATATCGTCGATCAC
CAGAAGCGGAAGTTCAGGATCGATATCCGAAGGATCTCAGAATTTCAAAAGCCTTCGATT
TTACCGGTCTGGAGATCGCGCTTCTATTGCAACGAACGAATTACAGCGGCTGCTCCGGGC
CTTTCTTTTGCAAAAAAACTTCGGTCCGCTTTGTGAGCGTTCGATATCAGGGGCTACGAG
TTGATATTGCTCCCACTCTGAACGGCTCAGTAGGCCACCGAAGACCGAAGATTGACGGAC
AACTTCGACGTTGTTAATCAGGGTGCAGAGTTGCGTCGCTGTGAGGGTCTACAACGATAA
CTTCGGTCATATCCGCAGAGTTCAGCATGTTTGCAAACACTTTCAAACTGAAGGCGTCGC
CCGGATTGCACCGACGCGGTCTTGGCGGAGCATACGGGACATAACGCAGAAGAGTCATGC
GGATTAATCATTTTGCTCGATCGCCTCGGTGACGTTGAAAGAGCTATGATATCATCAATT
ATTCTGAATCTGAGCTTTAACGTTTACGAACGCATGGCTTTCGATGCCGCCCACTATTAA
CGCCCACTTCGCCGCCCGGGAACGTCCACATTAATACTTTGCCTCTTGCCACGGACGGCT
CTTCATAACACCTTCCATTTCCCGAAGGCAACCTACAGCATAACTACATCCTCCTCACAG
TTTCACAGAGAAGCGATTCCGCGCATTGCTTCCATCGTGCTTCCGGGAACACCGTGTATT
GTGGACTTATTCCCATGACGATTCTCTACAATCAGAGAGATAACAGTGTAGCCAAACTCT
TCAGCCATGTCAATGTATGTGCTACCTCTCGCCCTGGTACTAGTATTGATACGATAACCG
CATCTAGTCCTATCTCCATAGACCGGGTCGCGCTTTGTCCATTAACTCTTTGTGAGATTC
AACTACCCTCAGTTTTCCAATAATACTTGCGAACTCCATTTGGTAATCGTCCGTTTCGCA
GATAGATTCTGCCGGCCTGACTCCCAAGTTTTGTTGTTATACAGAATTCGCAAGAGAGGA
CTTCCCGATTCGGGAGTCGAACGATATACATGATCTTTTCTGCATACTTCCTCCTTTAAA
TTCGAGCCATATCGAAGTAGGTTCGATCAGAAGTCGTCGCTGCATCGGTCATTTCTGAGA
ACCGAGCCTCATCCACTTCATTTACCAATAAGAAGTTCAACAGAGGATAGAACTCTTCGT
CAAGCGTCTGCTTGAATCCAGCCGGGTCTTGCACATCGCATTGACCCTTTTTTTTACTAC
CTTGCATCCTCATGATAAACTTCTTTTAAGCCGAGGTAGTGAGTTGACTTCAGACTTCAC
TGTCCCTAGCCCTGTTTGTACCCATGTAACCTTTTCACAAGAACCTCAGAAGACCCCTTG
TATTGTTCCTCCCCAGCTACACTCTATGTGCTCGGACGAAGAATCTTTACAGAACTGTGG
TCCGTTACACCTAGGCGTGAGAGTCAAGAATATATTCCTGAAAGCGGCTCCCCCAGTGAA
GATATCGCGGATACCGATCAAATATCTTCTTCTTCCTCGACAATGTGAGGGTCGTCTGGA
GAGCATATCTCGAAGTTATATGAAGCCTGCGATGTAATCATCTGGGGTTATTCGGACACA
TTTGACCAAGGGCAACGTAATCGCCGGTCAATGACCCCGTAGTAATTGAAGATAAGGGAG
CCATTGTGCTTAGTCACGGAGAACAAGCGAATCCATTCACTTTCTCAATCAGCCGCACAC
GGAATTTAGGATGGAGGAAACTCCCCAGCACCATTCTCTCCCAGATTAAACAACACCTTC
TCGAAGCGGGCGTACACCAATCACCGGAGTGCTGGTCAAAATTACGACCCCGTGCTCCAG
AAGGAGCGGATGCTCATTCCACAGGTTCCCCGTAGACCTTCCGGGCATACTTTTATAACG
ACATACCGTTGAAGTGCTTTAACAGTCACCAGCCAGATAGCGATCAGGTTCCGTACCGGT
AATGTTGAGATTACCTTCCATCCTACTCATTTCAATTCGACAATTGGGCAGAATTTAGCC
TTCTTTGCCTTTAGATAATGATACCAGAATCCTTCATCCTTTTACTGGACGATTTACCGA
CATAAGCGAGAGAATCGGTAGAAAACCCACACGCTATAAAGACGCTAGATGATTCCAATC
CATACGAAACCCCACATTGTGCCAGAGTCCCACCTAGAACATATATCCGGTAAGTGGACC
GAGAGCCAGAGAATACAATACAGCCTACAACAGCAGCGAAAGCGCGCAACCGTTAACGCC
AGCCACACGACGAGGAATACCGGTCTTCGCCAGAAATAAGAGCAGAGGGTTACAATTTGC
CAACCGCTTGAGATAGCCGAATAGACCGGGTCTCGAACGTACGATGGAGCCGCATATGCC
ACGAATTTTATCAATTCATGCTTGTTCCTCCGGGAAGATGTTGAAGTTAAGTACGTTATG
CTCTTCTGCTCCATGGAGGCTACCATCTTATAACCTCCGAGCTTGTGAACGATCTCCAGT
ATGTACCAATAGAGAATTTTAATAACATGCTGCTCATCAGATTGAGATTCGGCTCTGATG
GGTTCCACAATCGCCTGCCACTTCCCGTTGAGTCAGCCCAGACCGATGGATGTAGTGTGC
AGCAACAACCATTACAGTTTTCTCTTTGAAATCCTTGACCGGATCATTCATGTTAGTCCT
CCTATTGCTCAGCGTTACTTTTGCCATCGAATACTGAATTGAGCGATCTCAAACTGATCC
GTCCAGCGGGTGTCCCGGAAAAGCCACTCTTCAAAAAAGTCCCGTCTTTGTTTAATATCA
GAAGTCATGAGGGATTATGCGAACTCCGTCGTCATGGATCAAAGTTCCACCAGAGTGTTA
GCTTTAGGTTTAACATCCCCGGTCACGCGAAATCAACACATTGACCATTTTCCCTCCTTA
TTTATGGTGGTCTACAACCACAAACTTGCTTCGCATATATTCCCCTCACTTCGTCGTAAG
AGAATACCTGATGATCTGCGGATTGTCAATACCTACATCAAGCAAGTGCTACCCTTTGAA
GGCAGGCTGCCGTGAGTGTGGCCGCAGGTGCTGCTTCCATGATGGGCAGTATTCCACGTC
TCGAAAGGATAGTGGCACATGACGATCTTAACTCCGTCAATTCGAATCTCCTGTACTCAC
GAATGTCTTCTACGAGAGATTGCTATCGCAGCGATCAACTTCCACAGACGAAAGTCGCAA
TGATTTCCCTTCAGGAAGGTGTGATACGGCTATTCAACTGTTTGATGATATCCAGCACAG
GCTGTAGCTTGTTCTTTCTGCAAATGCGAAGTCTCCCAGATGGTACACTTCGTCAAAAGG
CCTACCTGGGGAGTTCCACCGAGAAATAAGCTCCTCGGTTTGCTCCTCAAAAGTCCACGG
CCTGTTGCAATACTCGATCACATTCTTATGGAAGAAGCGTAGATGACGAAGAGAAAAAAT
ACACATTATGCCTCCATTTCAAATTCGTAATTTTGTTTAACCGTGATGAGTCGCATATGG
CTCCCTCCCAGCAGATGTTCACCCGGCTCCATACTAGCCATAGCCTTGAACTCTGATAAC
ATATCCCGACGCTCGGTGGAAATCTACTACTCCAGTAATGGTCCGCACTAATCTACCTTC
GGTACAGATGCTCCCGACACCCAGCGCCAGCGATCCACTGTATCTTCTTCAGTAGCTCTT
CTGGAGACCACTTCTGTCTACACCCCGCAACTGAAGAAAGAGTAAGGACGAGAATAGTTG
TTGATGGCTTCCTCTACAGCCGACTCAGCCTGCAATTTAATGAACTCCCATCTTGCAAGA
ACTTTTAATCTCGGTGGTGACCGGGGTGTAGCTGTACCGTTCTTTATATTCATTCCACAC
TGTACTGTTCTCCCACATAGCCTTTGAATTTGTCGGAACGAGTTGTCTTCTTTCCGTGCC
TTAAGTTTTCCGTGGAACTGATGCCTCCCCTTCGAGCATGCTCAGTTGGTTGCTATACTT
CTGGATCCGCTGAGTTACCACTATCACAGTATTCTGTAAGACTTGCGATAGTATGCAAAT
TTCACTTCTCTGCAACCGGATGATACGGCAAGCTTCGATATGGTAATTTACGGTAGCTCA
GCGAATTCTTATCGAGAATGACCAAAGCCTTCTACGATGAGTATCACGCCCATGGACTCA
AGTTCTCCCGTCACCCCTGTATCCTCCGTGAACGTCGTGCAGGAAGCAATGCGAGAAGAG
TCCTCATGTACGAAGGTCGTAAGCCTGACCTGGTCCACATCTGATGCTGTACACGCAGAC
TGTATGTAAATCTTTCGATTCAGATGGTAAGTACGGAAGTTATCTCTCCGTACCAAGGAC
CTTCGTGGATTTTGAGCGCATCCTCAATAGCGGCGATACCGCTGAGTGTTCATAGTCTTT
GTAGAATAACGTGTGGTTGCTCATCTTGATTGTGCGCTTGTATTTCCTAGCCCACCGAGG
AAGCTGCCATTAGCCCGTCTCACCTTCCTCTCGTTGAGGTAGTGATCGGCTCCTCTCCTG
TTGGATCGACAGTATACCCATATAGGGTTGTATGCAATATGTTTTCGCTGCCTCCCCACC
ACCCTGTCGTTCTGACACCTTCTGCCGCATACCCCATCGCAGGAATACTGGCACGGAAGC
AGAGCACTCCGGCTACTGCTCGGCCAATTCCGTCGTTTCATTCTGTTCACTATTGGTATG
AGCTACAGCACCTGACCGATCTCCGGTTCTCCCCGGGGCCTCGAAGTATACAGCTTCCAG
CCAACAACCTGGTATTTGTACTACTGGCAGTGCGCTTTGCTTTCTGCGATTTGACCGACT
GGCTTGAATTCCACCACAGGCTCCGTGCCGTATTTTAGACGAGTATTCCATGTCGAGGAA
CATCCCAATGAAGGCTAGAAGGACTATCAAAAAACGAGAGCTTCTAAGGTTTCCATAACA
CCTCCTTAATGTTAGCCCGCCTTGTAAGGGCTGTATATCACTCGGCTATTATACTTCAGC
CCAAGTTGTAACGACGGCGGTCTTTGTTGGGAACTCGACCATCATCGACTGGAATGTGAA
TGCGTTGCCGATCCTTCTGATTTTGCATTTTTCACAATCTTACTAGCCTGCGCTCTTGCC
ATATAGTTTTCCCGGACTTACAACCAGATCGGCTGAATTCTGCACTCGGGATTTCGGCAC
TGTGCCGGGCCCAGAAGCCGTACCAATACCGTCGATGTAGTACATTAAGGTACAGGTTGC
AGACGCACCGCAGTGTTGAAACTCAGTTTACTGATGTGCTTCGCTCCCCGGGTTTCAGTT
TCAAACAACCTGAAGTCATGTAATTGAATTTGTAAGTGAGAGCATCCATGAACTGAATGA
CACTTAAATCTGGATAGCAGAAGTATCCAAGAGCTGGACTTCTCAGCAGATCTTCGATTG
CAGTGGTCACATTGACGCAGACTCGAAGTTGAACATTCTATATCTCCTATTCTTCAGGAC
AAATACACCGCCGATTACCGGGTCAGCGCGAATAGTTTACCGTTGGGAACCGAGCACGCA
AGCGTCTTTTGAAACGACTTTGAATTTGCACACAGTCAGCCACTTTACCCCGGTAGTTCT
CGCAAAATTATGATCTGGTCTTTACGGGCTTCTCAAAGTCGCCATACGTCACCCTCGCTA
TGTTCTCGAAAGGGTCGAACACCACCAGAACAGCGTTTCCATTCTTGTCAACCACGTAGT
TCACGATCTGCATTTGTCGAAGAACTCTTTGTACTTTGAGACCGCTGGAAAGCGCTTACC
AGATTCGTGTACAGTTCTCTATTGCGCCACATGATACCCTCATAACCGTTCTGACGGTAC
ACATCATGAAGACGTTTCAGTTCTTCAAAGGTGGAGCAGAATACGTACTCAACAAAACGA
ATGCCTCCCCCCCAGACCACTGTGTAGTGCAGACTGGAACTGAAGTCTACCAGACGCTCC
TAAATGTTATCTTTGCTATACCAGCATTACGGAACCTCGTCTGCGCCAGCACTGTAAATA
AAGTTGACGTAAGGTCCACTTCAGGAGCATCGATCATACCCTCCTCCGTTCTCTAGAGGG
TAAGCTTTCAAGAGCCGGCCTCATCCACTTATCGTAAGCATCCTCGCTGGACCGCCGCCG
TGAGTTGATATCCTCCAGCACCAATACCGTGACAGTTCGCCGTGTCCCTAATATCATCAC
CCTTGCATGATCTCTTCGAGTTCTTGATGATGTGCGGTACGTTGTGCTTGCCCATACGAG
ACGCTACGTCACCTGTTGCCGACCTTTCTTAGCCATGCATCGCAGACCGGTCCAGCTAGA
GAACCATAGCCTGCTTTATACTGCAGGATCGAGCGGCTTGGCGAGCATAGCCATTACCGG
TGACCGTTGAGTTCTTCCTTGGTTGCACGATAACCCTCAAACTGCTTGCTCACCTTGACT
GAGCCTCAGACACGGCCTCAGTTCTCTACAGAGCTGTTTCTGCTTGCCCGCACGGATGTT
GGTAACCCCGGAGAGGTTTGCCTCCTGATGTTCTTGCCGTATTTCACGACGATATTGAAG
CTACCGGTCTTCCTCCTCTCTCCGGCCACCTTCTACAGTCCACTCCTTGAACCCGCCTTT
CTTGTCGAGTCCATACAGTCGTTGAAAATAACTCATTGATCCTCCTCGTATTTGATGACA
AGAACATCATTCTCCGTAGGTGCCTTCAAGACCGTCGAGCCGATATTCGTGCCATAGTAC
ACAACTACTTTTGATCCCGCAGCCAAACCGCACCGAGATAGCACAGCAAGAGTGAGTGAC
GAACAGGTAGCCCCTTGGGCACCTCAGGGCTGCAAGAGCCCTCAGTGCGTTTCTCGGCAT
GCCTCACACCTCTGCCTGTTAATTCTGCTCTTTCGTCCTCCAGCGCCCGTTTAGGTGCTC
TGGAAGGGCATTATACCCGCAACCGATGATACGGTTGGCGGCGCTTTTACTTAGAACGCA
CCAACCTTGAACGAGTCGAGTCGTATTTCTAGCGAAGGCCTCAGCGGCCTCCATGTTTTA
ATTATGCTTGACCTTTCACGACTAGCTCCACTAGAACCCGCGATCTCCTCGTAGTACCCC
CTCTTCAGGGCACGCGAATTCATGTAGTACTCTCGTCAGTGTCTGTCAAATAGACAACGC
TAGGCGGGTAATAGCTCCAGTCGGGTCTCCGTGTTCAATCTCCGCTACCTTCGTTGCCAT
ACACAGTGAAGAGTTCAGAGCCCTCGATCACATCGTCTATGCGCATTACAGTGGGTTCAG
TCGGTTCAGTCATATCTCCTCCTTAGTTTTCTACTTTACAAACGGCATCGCCCCGGCGAA
GGGAACACTTGCACTGATGGCTTTCCGTCTAATTTGTCCCACGCTTCAGCTTTAACACTG
ACAGTCTTTAGATTGATTGCAACCACCTCGCCTACCAGCATATCCATTCCAGTTCCGCTC
AGGCAGAATGCTACTGCGTCGCCGATCTCGATATCCCTTCCTGCTACGTCCTTCATTTAG
AAATTCCATCTGCACCCTTGATTAAAAAATAACGAAGCGTCAGAGGGATCATCATCGCTG
CCGTAGGCCTTTGCCCGAAACTCCTGCTCGTATTTATTCACTTCCGATGGCTCGCTACTA
CCTTCAAGGGTACTGTATAGTTTGCATGAATTTCCCAAGGTCCGGTCGTATTGTTGCCGA
CAGGTAGCCAAGAAGCGCTACCAGCATATCAATCTCTCTTCGCTTCCAGCTCCAACTTGT
AACCATCGTAATCGTATACTTTCATATTTCCTCCTATCGCTTCTGTCCGCTTACGTCAGT
ACGATTTTAATTCTCCGAATAGTTCTCACCTTTATCATCGTAGACTTTATGAGCCCTTCT
GCTGTTTTATAGCAACCGAGGTAAATTCTCTTACCTTCATACCTGATCCGGGCAACGTAC
CTAAAAGATACCGGATACCCGTTTGTATTACGGTAGATGGGTTTATTCTGCTGCTGCTCC
GGAGTCCGTCGCCCACCGGCAATTAGACTTGTACACCCTTTGTCGAGTCCTTTCTATCGA
GAGCGCCTTTTCTCGGGTCGTTCTCCATGTCCTCATAGAACCCCTCGAATGTCTTCCACT
TAGGATCGATGGTAACATCCTTATAATATTTGTAACTCTTTTGTGCTTTGCCTCGGTGTA
ATATTCTGCACGATCATTGTCCTCCACAAGAATTGTATGTCGGAGTTCCGTACATTCCAT
GGGGAGTGTGATAGTAGTTTAGACTGCATGCACCGCAACTCTTATTATCTCCTACCTTGA
GTGCTCCAGTTCTAATTTTCGTACTGTTCTCGCAGATGCATTCTCCGCATAGCCAGTTTA
AACTCTTGAATTACCTCGCTCCAGAGCCCCGACTACCCCGGAGATATGTGAAATCGCCCC
GTAGTGGTCTTTAACCGCCATCCTACCTCCTTACTTGACGAGTGGTTACGCCGTAAGCTG
GCTTGCTCCTCGCCCGTTGTGTTTCTTCTGCGCTCGGCTGGCATTGACGCAAAATGTCTC
GCCATGGCTCTTTCGTCTATCCACGCTTACCTTTAGCCTCAAGTTGGAGACGTGTGTGGA
CAAAGATGTAGTAGCCAGATGCATCCTGATAAAATCAGCGGCCGCAAAGGGTCCAGCGCC
GAAAACTCTTCGAACGATACCACAGTCACCTTCTTCGCTTTGCAACAGTGTATTGACCAA
ATACAGCCCTTTGTTACGTAGTTTATCTAGCATCTGAGTAAAGAGATCAGCGATTCTCCT
TTCGTGGCCGTAAACGAGTTCGCTCAAAGAGTGATAGGTGTTAATTCCGTAGAAATGCTT
GTTGCACAGAGCGCTCACTGCTTCTTCGTACTGCTCTTCTTCCAGCTGCCACGTCCCACT
AATTGCAGAGAGTATCTTCCCCTGCTCGGCTTAAGTTTCCGACCCACAGTCGTAAGCTTC
CGCCCCTGCAGTTCGCTACATCCTTCCCACACACAAGCTCCCCACACTTCCACTTCAATA
TTTTCAGACATTCTACCTCCTCTTTCCTGTATCTACAGGGAATCTTATATAGACATATTT
CTTTTCCGCCCTGATGTCTTCAAAGACCTTCCGTCTTCTGAAGATTCCTTTAGTGCTCTA
TCCAGCAAAGTACATCCTTTCGAACCCTGATGCTCTTTGATTACCGTCCAGTTGTGCCTC
GAGGGTGATTTCGTTGGCACTGGCTTACGCCGAGTCGTTCATCTGCCCCGTACGCCCTCC
AGAATAAGCTCCCATACTTCGATCATCGGTAAAACCTCCTTCTTCCGGATATTGTGATTA
CCCACTTCTTTTCCAGAGACTGGACACGTAACGTCCACCACACCCGTGTTTACCAGAGGG
TCAACATGGTCCAGTGTTCCTGCATCCGGGAGCAGGAAGTCCCGGTAAGTCGAGATACCT
TTTTACGGATTGTATCCGCATTAGTATTGCCCAAGACACCTATGAAGTGGAGATCAAAGT
CCGCTGCCCAGTCATCCCACTCTTGTCCAAAAGATAACCCAAACGATCTCATACGCCCTC
CTCAGAATTTACATAATACTCTTGACCGTCGATGATCTCGTATTGGAGGCCCCTCTCGCT
CAGTAAAACGCGAAGTCTGATTTTCAACGCCCCGGTGCACACCCTTTTGCAAGTATCGTT
AACACAGTCTCAGTGTTCTAAACGCAACTTGCAATATTACAGAACGAACCCTCCGAACTC
TGCCCACACCGACAGTAGCCTATCTGCCTGCCTCAGACATAAACTCAAGCTGCGGGTCAT
CCGCCGAAGCTTTGAGTCTGCTCATACACCCGTGACCTCCCTTTGCATCCTTTCGAGTAT
CACTTTCCAGCATCACAGAGAGTGCCAGCTCTCTCCAGAGAGTGAATGTAGTTTCCAAGT
AGGTCCTACCCTTGGAGATAATCTTCTGAAGGTACTACTGCTTTTTGCTGTTGTTCGGTG
TCAGTCTTCGTCCCTTCAGTTCCTAATCAATTCAAACATTCCTGTATACCCTCCTTAGTG
TAAAATGCATTGTCCAGCCCGATAATACGTACTCTGAATTTTCCCCATTGCAAGGCGTTT
CTATCAGAAAATTTGAAAGCTCGGGTATCCAGTTCGTCTCCTCCGGATGTAGAGTTCTTT
TCACCGGCTTTGACTCGCTCCATTTTCGCTCTCAGTTAGAAGTCCTGCAGGGAACATGCT
CTGAAATATAACGGTCGCAATTCATATTCTGTTGAATGCTGCGTTTTTTAGGTTGTTTTT
TGTAGTCAGCGGGAACGACTCCGAAAAGATGGGAGTATGGATCATAAAGTATGAATCGAT
CGATCGGACACGGAATCACAAGCAAGTGCAATTGCCGTCACGGTATTGTGATGCACACTC
ACCTTCCAGCCGAGCATGAACCGGGGTCACATTCCCCTGATCGCAATTAATGAGGACGTT
TGCAGTCTCAACAGACCCGCCACAACCATTGATTTGTGATGTGCACCTCGTCATTATGAC
CTTGCGCTTTCGCTATCCACAGCTCTTCAAAGTTAAGGTCTCTAGCTTATTTACGCTATA
GGGAAGCACTGATTGTTATTCTGCCAACAACGCTCTGTGTACAAGAAACAGGCATAACAC
CTCCTTTATTGAAAAATGGGGCCATAGGCCCCTTTGGCAGCTACCTTCGGTAGCAGTCTT
TGGCTGTGGTTTTAACCCAGCATAGCGAAGAACGGTAGAAGCACTTCTCTTTACTCGAGT
TCTGCACTGGATGGCCTCAGCTACTTCAGCGCCTGCACGAGATACATTAATGAACTCTTC
GGTTCGAACGTACTTGTCCAATTCTTCACAAGTGTCTTTGAACTCTACACGCCCAAGCAT
CGCCTTGCCTGCGGCCTTCTGGTGAGTAAGGTTATGAGGTTTTGGCAACCTCCAGCGCAC
GATCTAGAGCGCCTTGATCGATCTCCAGACCGTTTTGAGCTGCCAATAATGGTTGCGGTG
CTTTTACGCTCTGCAGCGTAAGTTCTTGAAGAATGCACAGTTGAGCTTTTGTTAAATTTC
ACCAATTTTCCTGTGCCACGACGGCGGGTTTTAGGTTTTTCCTCTCAGAGAAACTTCCGT
TTCAATCTCTTTCGTATCAGTCTCTCGCCTCTGCTCCTCTGCTCTTCGCCTCCTCGGTGG
TGACCCGGGTCATCTTTACGGTCTTCTTTATGAAGCTCATATTCGCGAATCCTGAGGTAT
CTTCTTTGTCGATCTTCGGAAGCCTGATCGAAAGCGTTCTAATGCCATCGTGAAGACTGA
AAACATCCCATTCTGCATCAATCACCGCTTCCGTCGCTCTTTCAATTTCCGCGTTAAAAA
TGCCGTCTTGGCGGAACATTTGACTTGACAGAGGTTCCGTACCGGTAAATCTTCAATCGA
ACGCATGACTCGAAACCTTCTTCCATGTGAGCGTGAACGGACCGGAGCCACACGATTGGG
TTTTCGTACTCGACGATATTAACAACTTCTTGCATTATTCTTTTACCCTTTGCGGTTATG
TTTACAATACCAATCGTTTTCAGGAATGTCAACCCATTTTGTTCTGGTAAAGGCTTGACA
TAGAGGAAATTCAGGTATTATCACTGATACCAGCGGAGATATGTCTTTGCGCACTTCACC
GGCCCACGCCTAGCGCTCATGAAGAGGAATCCAATAGCGCAACCTGAACTCGAATGCTGT
TAAAGGGTGGAGACGATTTAAAAGCGGAATGATTAGCAAAACTGATGCAGCCTGCTGCCC
TTCACCCGAACTCATCTGCATGAGTAAGAGGAATTGATAGAGCCATACCGTTCTAGGGCA
GATAAATTCGTGCTGGCGAGCCTTGGGACTCTAACTCTTCCTAGCCGAATCTATCTGCAT
TGGGTGTTCTCCTGATACATACACAAATACTCACCACAGATAATCCATCAATCAACCCAT
AAGGAATTTCTATGAGATGGGTGTTGTGATAGCGGTAACCTCGTTTGAGACTCCAGTCAT
CAATAAACATACTGGTAAGGAAGACGATCTATGCCCTTTGCCGTAGGTTTGTTCTCAATC
CCACACTGGATCATGAGTATTTTGGTGGTTGGTATCCAAGCGAAGGAGTTATCGTCTCTC
CCTACCGGGGACTAACATTGTGAGGGTAGAGTGCGCGTACTCTGGACAATAAGGAAATAG
TAGATTACGGCGAATAATTCTTTAAGGGTTTGACAACAGGAGATTTATGCTATAATCGGA
GTATATGGGGCTTGGCTAAAGCTTCAGAGGATTTATGACTCAAGAAGAAACAAGGGCGTA
CCGCCCTTAATAGAATGCCGAGCTAGCCTCGGGGTATCATTCAAACAGACCTGGAGCAGA
CCAGACTTCTAAAGAAGAGCTTTGCAGAGAACATTAGGTTCCTGGCCAAGAGCAATCTGA
CAACCGAGGTTTCTACAAATGAGAATCAAGCTCAAGAAAGAGCTTGATATGTTCGTCGCT
TACTGCCGACATTGCACTCGCGCATTTGCAAAAGCGAAACAGAATCAGGAGATAATGAGA
ATTGAAGTATATCGCTCCCGGAGTAGTTCCTCTCGCGTTTTGATTAATTCGTCGCTTCGT
TCAATGGTAGACGCCAGACTTTGAATCTGGAGATTTATGTTCAATTCCATCAGTGGCTAC
CAAATGTGGTAAAGAACATTCACCCCGACAAGCAATGTGTCTCGCCTCAGGACAGCGAGT
AAGAAATGTCCCTCCAGAATTAAGGGTCGGTGATGTAATTGGCAACCTTACTGGATTCCG
TAAATCCTCGTATTCTCTGCTATTCGAATCGGAGTCGGCCTGCCAAATTATATGGAACTT
GAATCCTAACGCTCGGCCGGAGAGCTATACGCGCTTTAATTTGATGTCTTTAGAGACCGG
TATTCAATTGGTGTTAATGGAGGAAGAGTAAGGCCCTGTATAGTGACAATAAATTGCTCT
CGTATAGTGTAATGGATGCACAACGGTCTTCTAGCTTCGGGTCTAGGTTCAGAGTCCTAC
GAGCTACCCGAGATGGACGGAAGCTAAAGTGGATCAGCATCTGGCTTTTAACCAGACTTA
TAGTGAGTTCGAGTCTCACCCGTCCAACCAAATTTAGTGTGAGTAAATCAGGATAGGTTC
CTGAGGCCCCCCGCTGGCGAGTACGTCTGTTAACGCGGATGTGGATCGAGACCACTGCTC
ACGCCAAAAATCACTGCCAAAATAGCGGATTTCATGTTGACAAACCGAATTTTCATGTTT
TAACAACACTTTACCGCATTGAAGAAATGACGAAGAGCAGTCCTGAGTGGTCGGGAACTA
GTCTAGAAAACTAGGCCGCTGTGATGTATCCAGGAGGGTTCGACCCTACTGCCGCCAAAT
TAAGGCCCCTTGTGGGTGGAATTGGTACACATCAGTCTTAGAAACTGACGCCGAGAGGGA
TTGAGGGTTCGGGTCCTCCAAATACCAAATTAAGAATCTCGTTATTTGGTTAGTTCGAGT
CCCCAAATACCGGTCACCAAGGTCGGCTCCATGGCGGCCAAGTAGTGAGAGAGATAGGGA
CTGACGAAGGTAGCGCTGCGTTTTCAGACCTCCCCGGTGCCATAAAAGCTATCATGAAGG
GTTGACAAACAAGAAATTCATGATAATATAGGTACATAGAGTACCAAATGTAATATAGCC
GGATAGCTCAATTGGTAGAGCACCCTAATCGATAATCGGATGGTTGAAGGTTCAAGTCCC
TTCTCTGGCTACCAGAACTTTACAGCCCATAGCTCAGTCTGACCAGAGCAAGCCCCCGTT
CAGGCAAGGTCGTCGGTTCGAACTTACATGGGTCGCCAACAAGGTCGTTGTAGAGATAGA
TGGTTACTATCACTGTCGCAAACCCGGACGCCATAGGTTGAGGTTCAATTCCTTCCTTCG
ACCACCAAATAGCGAGAGCGTTAAGACTGGCTGGTGCTGTCACTGGCTCGCGCAACCGAA
CACAAGTGGTTCGATTCAATCTACCAAATTGCAATCACCTGAGAACCCTATGGTGGGTTC
AGTGTCGCTAAATTCATCTCGGTAAGGGAAGCGCCTAAGCTGGCACGGTGGGTAATTGAG
TATTGTGAGGTTACTGGCAGCCAGTATAAATCGTCCGGCTCGGGCCCGTTATAGCTCCTA
GATTTGGAATTAATAGATGCTGTGGCCATAGAGGTGATCCAGTATCTCCCGGAGGCCCGG
GTTAACAACCCATGAATTTAGCCCGCGTTGGCCGAGAGGTTTAGGCGGTGGATTGCAAAT
CCGTCTCAATATCGGTTCAAACTGATACGCGGCTCCGTCATATTGGGATGTAGCTCCCAG
TTGGCGGTATATATTGTTAACTTCAGGTCGCAGGTTCGAACCCTGCTCGTCCCGTTAATT
TCAAAAGAGATTCTTTCGCTTTGTGAAGCAGAGTCGAACGCCCGGATACGGGCCTTTATT
ATTATCTCCTCGTAGCCTCAGTCTGGTTAGAGTGTCTGATTTGGAATCAGAAGGTCGAAG
GTTCAAATCCTTCCTTCCGGGTGACCACAATTAGGGAGTACATAGTGTGAAGATCAAATC
GCGTATGTCCAGCGAAGACTGGATATCATCGCAAACGAAACAAATGTCCTTTTGCTGTAC
GCGGCCCAATTACGTAATGGAGTTGGAGGCGTCGTCAGAACTCAAGGAAGCGACTTCATG
GTGTCTCTAGTGTAAAAATAAAAAGCGGGTATAGCTCAGTTGGAGCGGGCCTGCCTTCCA
AGCAGTTCGTCGTCATTCGAGTCCGTCTATCCGCTCCAAACAATGCATTTGAAGCTAACC
AGGTAGAAGCGCTATTGAAATTCCGTGAGGACTTGATCGTTACCAAGCAGATGCACCAAA
TAAAGCAAGCAGCTATAGATTAATTGGTTGAAATTCAGACTTTCAATCTGGTGTTCCGGG
TTCAACTCCCCGGTAACCGCCTTTAATCAAGTCCAAGCCGGAACATTCCTCCGTATGCTT
TCAGCCGGCTTGGCATTATTCGTGCGGAGATTGTGTAGCCTCGGATGCTGCCTTCGGTTG
TGACCCGATTGTTAGTTCGAGTCCCGCCTCCAACCAATGTCGTGCAATGGTCAGTGCTGA
CGCTTTAGCTCTGATCGTGTTTCTCAAAAGTTGAGAATAGCGGGCTCTCGCAGCAGAGCG
ATAGGTGGTTCGATTCCACAACATGACACTCTTTCCTCCTCGCCTGTGCTGCTGAACGGT
TTTCCCTCCTTCCGTCTCACAGGCCTCCTATTCCCCTGCCCTTGCTATGTTTATGGTGAT
GCACCGGCTTTGTAACCCGGCGAATTCTGTTCCGTCAGGAATGGGGCACCACTCCACTAT
CATCAAAGAACCTCGCAAGCTCCCCGATAGGGTTCACACTCTATAAGGTTGTAGCATGGA
AAACACTAAGGTTCCTGACAAAACTTCGACCAATCGCGCTAGCGACAAAGAGGCCAGAGA
GAATTCTCGATCTCAGCCCTCATGTTATTGGTCCAAAATCTTTCAAACAGAAAGAAGTTC
CTCACAGACAGCGATGCAAAGATCACCGTATTCGGTGGTGCTGCTGGTGCTGGTAAGTCT
TATCTCGGTGTAATTGACTTCATGAAATAAGTATCCATGATCCTAACTTCCGAGGTGTAA
TGACTCGTCGTACCACCTCCTCAGATTAGCGCTCCGGCGGTCTGCTTGAAAGCAACAGAC
CTAGCCTGGGCTTCGTTGACCCTAAAGTCGGCGCGGAAAGACAAAGACGGCAAGTTTTGT
GTTCTCTTCTGGTGCAGCGCTTCCTTCGACACTTCGAACAAGAATCTGACAAAGACCTTC
CAAGGTTGGTTGCAAGTTCCCAGTCGACGAAGGTCAGCAGTTCACAGAAGGCATGGTGAC
ATACCTATCTCGTATGCGTAACCTCGAAATGCTCGGTTGTTCCTGCAATACGAAGATACA
TGTAACCCCGATTACAATTCGTTCCCTTCGTAAATGGATTGAATGGTGGCTAGACCCCGA
CACAGGAATCCCCGATCCCTGAGCTGCCTGGCGTAATCCTCTGCTGGTTTGTACGCAAAG
GCGGTAAGATGTTCTGGGAGACACTGCTGAAGAGTGCATTGCCTCATGGTAATCCCAGTC
TAGCGCCTGACGATGAAGATCAGGTGAAGCCCACAGCTTCAAATTCATCGTTATTAACCG
TTTCGATAACCCAATCTTGATGCTCAACGACCCCTGAGTATGTAGCTAACCTTTAAAGCC
CTTCCTAGGTAGAACGAAAAGCTCCCTAGACGAAGCTGGCACGCTAGAGAAGAGGAGCTG
ATACTTCACAAGGGACTGGTGCCGGAATCGTTCCCCACCCGCCTCTATGGAAGCTTAAAA
GGGTACGCGGGGACATCAGCGGTAGCACGAATCCGAAACCAACAGAAACCCCGACTGACA
GCCGGCGTGCTGATGAGCCGTACAAAAGAAGGCTTGTTCACTGTCGAGATGTTGTCAGAG
AGCAGGTTGTTCGGAGGTGTTTCGACCTCATTCTAGAAACAGCTGCCAAAGACGGTCAAG
ACGTTTGAAATTCAAATCCCATGTGACCCGGGGCTGCTGGTGCTTTATGCTGCCCAGCTA
CTCAGGAGACCTAGCGGATCATGGATTCCACGCCAGACCGAAGACAACTAACAAATCGAA
AGCTACTCGCCCCGTTCGTATCTGTAGCTGAAACTAAATCAAAAGTCGCAGGAGATTGCA
ACAAAGATTTCACTTCGCGGATGAAACTTGAGCGATTCGGACGGAAGTGGGCTATCAAAG
ACTGCTGACGCTACATCAGATGCATTTAATGCTCTATCCCTTTGGCAGCTTGATCCCCTG
ATTTCCTACCGCCTGATATATGACTCAACCAACAAATCACCAAACCAATTAATAGGAGGC
GGCGCCGGCCGAGACTGAAAAAGACAGCACCGGTATCCCGCGACTTCAGGCGAGATTGGT
AGTACAGGCCTTAAACAGTCAATGGTACTATTCTGGAAAGAACGCCGACCAGAACTTCGG
TTCCTTAGGGCATGCAGAACATTCCAATGATGGCAGAAGACCCTACCATCAAATCAGCCT
TTGATCTCTTCGAAATGATGATGAGCAGGGTTGACTGGGAAGTTGATCTAGGAGTTGACC
CCCCGACGAGGCTATGAAGGCCCGTGGTAAATTCCTGAAAGAGTGCATGCATGACATGGA
GCACAGTTGGTACCCTTCATCAAAGAGGTTACTAGCTTCTACACCCTACGGATTCTCCGT
ACATGAAATGGTGTTTAAGCTGACGTGAAGGATAACTTTGCATCGAAGCAATAATGACAA
CAAATTCGGTGCATTAAAGTTGCCAACCGCTCTCAGTCTACTATCACCAAATGGTTGTAC
TCTGAAGACGGTAGAAACTTCCTAGGGTGTGAGCAAAGTCTTGCCAATGTTATCAATGGT
GACCGTTACGTCAACTTAGGTAATAAGGACGGAACTGTAGAGATTCCAGCTAAGAAGATG
TTTTTTTTCCGGGTCGATGCTAAACGTGACAAGTCCTTGAAGGTAACAGCCCTCCGTGCG
TGTTTAACGCTTGAGATATCGAGTGGAGATTGAAGAGCAAGTATCCGTTGGCGTAACACG
CGATATGAACGGTATGCCTACGCTCTATCTGCCTCCTCGATATATGTCCGAAGATGCCAC
AGAAGTTGAGAGGGCAGCTCCACGAATACTGGCTTAAGCGAGTAATTGCAACATTCAAAT
GAATGAACAATCTGGACTTATCCTTCCTCGCTAAGCTGACCCAGAAAGCCGACAACCCTG
TTCAAATTCGAACTGACTTCGCAGGGCAGTAAGATGCTATTACAGATTTTCTCATTCGTC
GCTGGGACAACAAAATTCTGCAAGCCTTGTTTGCTGCCGATATGCTGAAGATGGGTCAGG
ACCAAGTTGGTTCTGCTACTCTTCTAGCTGGTTGGGCATCTCAACATCATGGCTATGGCG
ATTGAATCGCGGCTCCGCGAAATCAAAGACGTACCAGATAATATAAGCTCATTCCTACGC
TGTTCGCACTGAACGGTGATTATAGTCCAGACTTCAAGCTCGAAGAGCTGCAATACGGTG
AGCCAGATGAAATCGATCTTGAAGAGTTCTCGAAAGGGAATTCAGAGAATCGGTTCTTGT
CGGTGGTCTTGAACGTGACCGTGAGGTTTAAACAAGATTCGAAAGCTCTCAAGATTAAGC
CTCGACCAGACGACGAGCCTGTTGATTAATATCATGGGTGGTCAGTCTCAAGCAGGTAAA
GCTGGAGTAGGTAATGGCGCATCAACATCCGCAGCCGGTAGAGACAACGCCGCTGCAAAT
AACGCATAAGGAGCATTGGTGAATGCGACTCTTGAAAGTGTTATTGAAGCTCAGTAATGC
TGGGCTCCTGCCACAAGGCGGAAGAAGCCCCGGCTGTAGAGGTCACAAAGTCCCTAGACA
ATGAAAAGGGATGGCTTTGTTTGTCGTTCTTGAGCCCCAAGAAGCGACCCACGACTGATC
TACACGTAACAGACACCTACTCCGAAGAGGAAGTAGAGAAAGCTTGCCATCAACTTCAAT
ACCATTGCAACGTAGCTAATATCTTCCACAAGATTGAAACACAGGAAGCTGAGATTGTCC
AGTCCTTCATCGCTCCATCCGCATTCACACAACTGGACGACGGAGAAGAGAGATCAAGAA
AGGTACATGGCTCCAGTGGTGGCACTTCCCTGAAGGCTCTGAAGTAGCCGATGCACCATG
GGAAGGCGTTAAATCTGGTGAATTCACAGGCGTCTCTATCGGTGCCAGAGCTACAGTCGA
GGATATCGAATGACCGTAAAAAAGCAAAACGTAAACTGACCGATAATCAAGTTGAACACG
AGGTGCTCATGTCGCTCTGGTCAGTAAGCTCCAAGGTGGTGCAGCCAACGGGCGGCACAC
TACTCTAATCACAAAGCTACCAATGGCGTAACTGAAGAGCTTTATCGATAAAGCTGCTGA
AGCTACAGTCACAATGCAAAGTTCTCGAGTTCTCTGAAGTTCTTCGATGTATTATGAAGA
TGCCGAAGTTCTCTGCTGCCATGGATATGGCAGAACGGAGTATCCAGAACTAGATCACAA
GACTTCGACCAGCGGTCGAGTCTATGTCCATTCTAAGTCGGTTTATAAATCGGTTGACCT
GAATCAAGCCTTCCGAAAGTTACTCCCCGAGTTGGCATCCCTTTCCTTAAAAGGGATCAG
GAACTGCTTGAAAAGGCTCTGGAGGTAAATCTCCGAGCAAATCCAAATGAAAATCCATCC
AAGGAGATACCAACATGGAAACTATCCTGAAATCGGCCCACCTAGAAGCTCTAGCTGACG
CTATTGCAGTTGAAAAGCTGCTGGTGGTCGCTGCTGTTGCAGAAGTTCAGAAGCAACCAG
ACGCCGCTAATGTAGAGCCGCCAGCTCTTCGTGAAATTTCAAGGCTGCTGAGGCAGAGAA
AACCGCTGCTATCGCTAAAGCCCGTAAAGAGCAACTGGCTGAAGTCCCTCCCGGCCGACC
GCAGAAGATAACTTTCGCCCTGGAAGTTCGACGATCAAGCTTTTAACAAACAGTGGAACG
CCCGGCATTCTTAAAGCTGCTGCCGACCAAAACGACATGCTTGTCGAGAAAGGTGTATCG
GGCGCTGGGGAAGAAGACGACTTCGTTGTCGCCGGTGTTGCCGCTATCCTGAAAGTTTCC
GCCACTTTCTGCCCAAGTAATATTTCCAGCCGGCCCAGGGAATTCCAAATGGCTCAAACA
TTATCGCAAAAGATCATCAGCGTCTTAGCAACTGGCTGAAAGAAGAACAAATGGGCCACC
GTGGCCTGTTCTACACTCGCGAAACTCTGCCTGTCGCCGACATTGATGTTAAAACAACTG
GTTCTTGTCCCTAGACAGCACTGGCAAGTTGGTAACTAAGGCTACTATCGCCGACGCTAC
CAGCATCCTATTTAATACCGACCTGCACGACTATGCCAACGCTCAGATGAGCCACGCTGT
CGTCCTTGCTCGCGGTTGCCGTAATCGGCTCCAAGGCTGTTATCTTCGGTGCTGACGTTG
ACGACGCTGATAAAGTTACCGTCTTTTAAAGCCAAGAACATCTTCGCCGTTGACCAGATC
GAAGTTGGCGCATTGAGAACGTTACCTTCGCGTAAGCCGAGGGTCGTTCCAGTAAATAAA
TACTAGGAGTAACTTTAAAAAATGGCTAACACCCCGTTCTACCTAAACGATGGTCAGTTC
TACATTGCCGACCAGACTGAAACCTGCTTATCATCCCGAACACTTGGACCCCGTCGAGAA
CATGGGCCGTCTTCACAAGTGAAGGTGTGACTCAGAAACCGTCCAGTTCGAAGAGATCGA
AACTCGCTACGGTCTGGTTAAGGATGCCATCCGTGGAAAACTCGTCACCAAGTTGCTAGC
GACCAACGTCGTCAACTGCGTGCCTTCGCGATTCCGCACTTCAACCACATCTTAATTACA
TCAATTCAGAAGATATTCAAGAAGCGCGCTGGTGCTGACCGCGAAGAAACTCTGAACGAG
GTTCGTGCTCGTAAGTTGAAACCATCCGTCGCAATCCGAACTGGCTAACACCGCTGAAGT
TGCTTCCGTTAGCGCTATTAACAGGTAAGAGCTACGCCCCATCCGAACCATCGAGTACGA
CTGGTACGACCTGATGGTAAAACTCGTAAGGTTGTCGGCTTCGACCTGACCAACCCTACC
ACGTTTGACGTTATGGGCAAGACCGAAGAAATCTTCGTCCATATGCAAGACAACAGCCAA
GACGGTCTGATCCGTGGTGACTCGTTGCCCTGTGCTCCTGGAAGTTCTTTCACCGCCCTC
TGATTAACCATCCGAGCATCAAAGAGTTCTACAAAGCTACCAAGGTTAGTCCTCAATACT
GGCGTGAACGTCTAACCGCTCGCGGTCTGACCTTCGCTTCCGTGAGTTTCTACTTCGAAA
CATTCACTTCATCGAATACCGTGGTGTTGACCCGTACGGTAAATCGTTCTGATCCCGGCT
GGCGATGCTTACTTCATCCCAACCGACAGCGGTGACCTGTTCGCTCGTTACTTCGACCGG
GCAGCACTTTCGATGACCTAGGAACTGTAAAGAACTGTACGCTACCGAGCGTATGGTTGA
AGACCGTCGTTCGATCCTGATCGAAACCGAGTCCAACCATCCACGTTCTGCGTCGTCCAC
AGATATCGTTCGCGGCACTGTGAATGCGTAAGACTTTGTGGGAGGTTTCGGCCTCCCCTT
CGTCGGGGAGGGTACCAAAATGGCTTAATTGGTGATCCAGCAAACAACCCTATCGACCGT
CTACGAGAGATTGTAGGGGACGTGGGAGCCTCCGCTCGATGCTTTCCGACGAAACCTATC
AATGGGTGTTGGACAAGAACGAAGGCAACGAAAGACGAGCCGCACTTTGAACTTATGCGT
ATGATGCTCTTCCGCCTGACAAGCGAGGGGAATGAGAACGTACAGGTGATATCGAAGTAT
ATGGTGCTGAGTATTTCAACAACTACTTCGAAAGCTCTAGCTCATTCTCAAAGACCGAAT
ATTACAATTTCTTTGGCCGTGCCATATGCTGGCGGTATCTCCAAATCGGATAGCTGGCTA
ATGACCTAGACCCCGACAACGTAAACACGGAATTCTACATCGGTTTTGCAAGACGGAGAA
GCTTAACCAGTGCAACCCCGGTCCTCAAGACCTTAGGCATGGGTGTGATTATCTTGGCAA
GCTTCAGTTTTAAAAGATCGCCGTCGCCTCACATCCTTGATTAAGAGGGTGGAGGCTCTA
GACGGAACAACGGTAGAAGTTGGTTTCTTCCCCTCGAGGACCGATATAAACGTCTCTGGA
AATGTTCCACCAGTTCACAAGTTGCAGCTTACAACGAATTCGGTACTACTGCAACCCAAC
CCGGCCATTCATGGCTCCAACCTTGAAGAATTCACAATCTCAATTCCACTACGCAAGACT
AATGAAGTCTACGTTTGAAAACGCTATCCGCGATGGAAGACAGGTTAATACTCCTGAAGC
AAGAATGGTTGCAGAGCAGATGCAAGTTAACATTGACGACTACCCGGCTCTAACAGTCCC
GCGCAGCTTACAAAGGGTTCAACGATCCGTTGTTCCGATACTGGCAAGATTTTGAGTCTG
TCAAGTTCCAACCATCGGAGGCAATAATGCTCTATCCTACCTTTCCATGACCAACTTTGT
CAAGCTAGATTTGATTAGAAGAGGGCAGCCCGGAGACGACGGTTTTGGAAGACCTACCCT
CCAGTTGAGACAGTAGTGACAATCACAGCTAACGTTCAACCTATCGAAAAAATCGACAGA
CACTCGTATCCTTCCAGAGGCCGACAGAAGCAAGGCTTTGCTTCAGGTAATATCTAGAGG
CGAAGAGATTCGCCAGTTAAAGGAAGGACCGGAGGTGGAGCGATAGATTCATGTGGAAGG
AGAGTTGTATTGAAGTTATGAAAGTCATCAACTATTCGATGGGAATCCTAAACCATTACA
AAGCAATTTGTATGAGTAGAAGAGGAATAGTACAGCATGATCCATACAGAGCTAGAAACT
CTCTCTATCTTATGATAAAAGAGTTGTTCCCTGATTGGCGTGTCATCCAAGCATACACAA
ATAATCAGGAACCGCAAAACCCCTTATCTGGCTATCGATATTAAGAAGCTAGATGAATGG
GAAGGGAAAAATGTCTCCAACATGAGCGATCCCATTAGGTCCCTTCGCATGGAACTGTTC
AAGTTCAACAGGACTTCGCAGCCAAGGTCGTATTCGAACTAGTTGGTAAGTATGGAGAGA
CAGCTGTCTCTGACATGGCAATGGCGATTACCGGGCTCTGCGTACTCCAGCAGGACACGC
CGCCCAAAGAAAGTTTAATCTATCCCTTTTCAAACTCCCTAGCACAAGACGAGTTCCTAT
GCTAAGAGAAACAGATATGTACATGTTCTATCAAGTTACATGTGAATTTGGATTCCTCTT
GTGATAGAAACCACCCTAAGAGTTTGTTGTTGGGCTGATATTCACGGCGTTTATTACGAC
GCTGGTCGCCCGGGTCACATTATTGAGTCCCACATCGACATAAACTTCGAACACTAATAG
GGAGACAGGAATGACCAACTGTCTTTACCGATGTAATTGACATTCAGATCAGCCGTGAGA
CTGTTGCTGTCGCACAGACAAACTTCAACGTTCTCTGTTCATCGCTTTCACACAAACTTC
GAACGTGCCAGAGTCTACAACAGCCTGAAAGGTGTCGTTGAAGACTTCGGAGAATCCGGA
TCCAACATATCTTGCCGCCGTTCGCTACTTCGGTCAAGCTTCCTTAAGCCACGCAGTCTA
GTTATCGGACGCAGACAAGTTCCTTCTGCTACCGTCTCTGTCAGTGCTGTTCAGGAAGCT
GACAAAGCTACGTCCCAATACCGTTAACGGACTACCTGTCAGCTATGTTAGCCAGCAAGC
ATCTATCAATTGCTACTGATTACAGGCCTAAAGGCAGCTTATGACGTACCCGCAGCCGGC
GTAACCGTCACAGACAACGAAGACGGAACTCTAACCGTCGCTTCTAACGAAGACTGAGCC
TGAAGGTTTCTTCTTAACCTGACCATATTGCTGCCCTACTGAAGGTTACGGCTGCTATCA
CAGCAGCAGTTCAAGGGAGAAAACGACGAATGGTATGCGTTCTGAGCATTGACAGCCACG
CCGATGATGATATCATGGCAGTAGCTACCATATCGAGGGCAATCTCAAGAAAGTGTTTAT
CGGAGCCACTGCTCAGCTAACACCAAGACTTCCGCAGAGAATGACATTACTTCGTCCCTG
GTTGCTGCCGGGTTCCAAACGTACGGCTCTAATTCATCCAAACGCTGACGCTCACTCCCT
GAGTGCTTTTGGTAGGGTACCAACTGCAAAGAGCAACTGCAGCAAACACATGGACCCATA
AAGCTCTGGCCGCTGTAGACGCCTACCGTCTGACTCCAACCGAGTCTACCAACCTGAAGA
ACAAGAAAGTTACCACGTTCGAGCGTGTTGGTGGTGTCAACCGTACATCTGGTGGGCTAT
GGCCGGTGGTGAATGGATTGACGTAATGATCTTCGTAGATTGGTTGGAAGCCCGCATGAC
CGAGCTGTCTGTGGTCCCGCATGGCCAACCTGAAAATCCCTACGACTCTGTTGGTGCAAC
AATTCTGGAATCGGAAATCAGAGCCCAGCTTAACGAAGGGAATTCGTGTTGGTGGTCTTC
GCCATTGAAGCCCAGCTCCCAGTCTTCGTAATTCGATGTTCTATCCATGTCTCCGAACAT
GAGAGCACAGCGTATCTTCGAATGAGTTTGAAGCCCGTCTAGCAGGCGATTCACTTTGTA
CACATCCGAGGGACCGTGACCGTATAAGTCTGGTCCTTCCCCATAAGGAGACTCATAAAT
GGCTGTTCAACGTCTAGCTACATCTTCCAGCCGATGTTACCATTGTCATCACCACCCTGC
AACTGGTGATATTCCTCGGCGGATTCAGCGAAGACAGTATCGTTAACATTGAAAGAAAAC
GCCGGACACTTTACGTGATGTATACCGAGCCGACAACACATCGACTCGCGTCTGTCCCGG
TTCCAACCACCTAATCTCAACCAGTTCGGTCTTCCATTCAGTATACCGCACCTCCGTTCC
ACCGTTCTTCCTGCCGTTCCAACCCCAAATGCCATCACAACCTGCAAACTCTAATCGGCG
GTAACGCCGCTGAGCCCGGTGATGCGGATACTCTTCGTAACCTAGGTGTCACACTCAGAC
CAGCGCTGGCTGTAATATAGCGCTTATTAATATCGACGGGAGCTGCCTTAACGGGTGGCT
CCCTTGTTGTTTCTGGAGGATAGAAATTGATTACCACCCACTGCGACGTGGTTGTAACTC
TCGCTGGTATCCATTCCGTGACAGGGTACGCAGAGGGAGAGTTTATCAGGAATTGTAAAA
GATAATAGTTTCATCAAGCACGGTTCGATGGATGGTGAAATCGCAAGGGTCTACAACAAA
GACCAAAGGCTGGCGAGTAGAGTTATCAATCATGCAATCCTCGCCGACCAATGATATCCT
TTCGATGCTTTACAACGAATATTGCAACCCAGTCGTACCCCACCGATGATTAAGGACACG
AAGGGTTCAGCTCTGGACAGCATGGGTGGAAGACCTACCTTAGGGTATCTTTCTCTTCTT
GACAACTGCATCCGCACTTTGGATTCTAGGTTCGAGGTCGCCATGCGAAATTATTGGCGG
AAACGTCGATCAAAGTTTGGTCGAGCAAGCTTTCATCCTGTTGGGAAGCTCTCTTCGCCA
GCCCTTACGCAATTCGCTGGAGGCTTCTAATGGCTAACACGGTATTGACATATATAGCCC
ATCTGATGTTAAAATTCGTCCTTGTGGGTATGCTCACTGTAGTTTCTTTCGAAATGTCTT
GGCTTTCGAGACCCACAATAACAATGGTTCGAGGAATCAGAGGGCACCACACCCGTCATT
GAGACCTTTCTTGCGCAGATTAGGAATCGAGGTTCTTCAGACTTCGGTGTTCAATGATGC
ATTATTCTCGCTAGTAGAAAGTTAGCATCGAAGAACACAATCCGCCCGAATCACCCTTGT
CTGTCAAGATTCACGGTAGCAATTCATGATGAGCAAGCACACAACGCTTATGTCAATGGC
CACCCTAGCATAACATTCACCGATGGAACCGGAGAACAGGTCTGACCATTGATGTTCTGA
CTGGACCGATGGCACGGTATGGAAACCAGCAAGTCGGCTTCGACGTGTTTGAACTGTTCA
TGCTCTTAGCTACCCTTGCGATAAATAAGTATTTATGTTCGGAAACCAACGTACCGTCAT
CCACAATGGGACAGAATACACTATCAACCTTTCTGCCAGCAACCTCGCGGTATCAGCGTA
CTGAAGCAGCTAACCAGCTTGTTGGGTCCATCCCCGTTGGGCATCGCTGACCACGACTTC
TCTGGAGCCATGAAAGAACTGTTCGATAACATCGACAAGGTTCGTTGAGAATTTGATCCA
GAATCTGGATGCCGACAGTTTTCAGCTGTCTGATGGCAATCACCTTCGACACCGAATTCG
CTGGCAGTATGACCTGCTGTACGCACTCACAAAGACGTGATCGAGTTCAACTTCGGCTCG
GTTTTTCTAATCGGTTTCGCAGAGGCACCGACGGTATAAAGACTGGGATGGCAGTCCGAG
ACTTCAGTCACTACCGATCGAGTTCAGAGTGATCGGAGGGTTAGAGGCTCAACAGAAGTT
CTCGCAGCATTGGGAGATTTATGTGGCTATCACTCACCCTCTCTCAAGCTAACGACGTAT
GGGAACTGAGTACCAGTCCCTACCACAGAAGATTAAAATAACATCCTGAGGTTATAGACG
TTCACGATACTATCACCAAGTGGCAAAGAACACGCAGAGGCTGATAAGAAATGATTACAA
AAGGATTGCCCAGCTGGGAACTTAATTTACAGTCGATTCCCGGCCTCACTGCGTTTTGAC
AAGAAGCTCGCTGGGGTCGAAGCCCGGCTAAGAGAATTTCCAAGCTGACGAACAAGCGGT
TTGAGTTAAGCTAACTCTAGATACAAAACTCTGAGAGGAGCTTGCCAAGGCAGCCACTCA
AAGCGGTAGTCTTGAAGAACATCGCGGTAGATGCTGCCGCTGTTCGTCTTATCTCTGAGA
AGCTTCAAGAAAGACTGAATGCAACGCCGATCAGGTTGAGTCTGTTAGGCTAGACCTTAG
CGGTATCCGAGATCAGAAAAAACTTCAAAGACGGCTCTCGGCTGCATCTCGTCGATCTAC
CGGTTGAACTGGGCTTGCCTTTCAGGCTTTAGCCACGCTGTATGAATGGAAGAAGCGCAC
AGAGTCGTTTTAAAATTCATCTGAATGTATGACATTAGCCGCTCTAAATTGCCCAGAACG
TACTGTTCATCACCTATGGATGCGTATTAAACGGTCTTGTTGTCGCTACGCCTCAAATTA
GCTGTTCAGACCGTGCCCATTCGTGATCAAGATGTTCTGAGCAAATCAGACGCGAAGTGA
GAATCCGCATTGACCTAGAGTCTTCCATCCGAGGAGGTGGTGGTGGATCGAGAGGTACTT
CCGGCCATATCCGTCAAGGTATGGGAATGGGATTGGTAAAGAGCTAGCCGGTGGGACGCG
GGTTTACTTCGCCCTTGGTGGTGCGTTCGCCATTATGCAGCTTAACCGTAAAACCAAGAA
CTGCTATCATGCCTAGCGATGCTTTCGTCGGAGGCGGAGCAATAAGGTGGCTTTCAAGAA
TCGTTACCCTCCGTGATATTCAGGGTCTCGACGACACGAGCCCTTGGTAGCTCCTTATGT
TAAGACATTGATACGCTGGACAGGCATCGGATTTCAGCAGGAACAAGTTGACAGCATCTT
CCAGTTCATGGCTGAATATGGTCGAGTGATGGCCTTGACGGCGAAGCGATGAAAGGCTCC
TTCCTCGAGCGGTTGAGCAGATGGGCAAAGGGCGATTATGTCCGAAGAATTGAAAGGTCA
GTTGGTCGAAAGATTCCCGCTGCTGTAGCTCTGATGGCCAAGTCTCGCCATCATGACTAT
CAAGGAACTGATGAAAACGATGGAAGACGGAAGCTTAAAAGGATGTCTCCGATTCCATTT
TGCCAGAACTCGAAGAAGCCCAGGAAAAGCGCGCTTTGGATGTTGCCATGTACGCACCGC
AGCTCAGCAAGGTCGATCAGTTCGATGGAACCGCACTATCGAAGCATCTACTGGCGGATT
CGATAGAGGTATGAGTGACTTCTTTAAGATTGCTTCGCCTCAAGTACGAAAGCCTTCCAG
TAACTGCACTTGGTGGCGGGTCTGAAGCCTTATGAGTATTCGTCAACGCTCTGGTCGGTA
TTGAGGGAGCTTGGTTCCCCAGTAAGAACATTGCCGCCAGTTCAACACGACCGGCAATAG
GGCTGACTCTACCACGGCTCAAAGTCCTAGCCTTGCTGACCCCTACAAGGTTGATCTCGC
TATTAGCCAGTGCGTTGGCACTGAAGACTTCCATTGTCTCTTGAAGGCGTATATTCGGCG
TTCGGGGACCCCTTGAACAACAACGCAATGCCTACATTCAACCGAAACCAAATAACGACC
CTGACGGTATTTTCTGTTGTCCCGCTAGCTGAAGCGCTCAAGCACGAAGAGTTCAACAAA
ATGCTGGTCGCTAATGATGAGAGAACTTGCTGCCATCATGGAGTTCTTTCAACAGTGTTG
TAGAGAGATTCGCAATAGCCGGCAAGTACAGGGACGCTGCTAAGATTGGAAGCCGGAGGA
GACAGAAGTAATTATAATGTCGAACATCGACACGATGTCGCGTTCAATCCGGAAGATGTA
AAGACAAGGCCACCTTCATCGGTGACAGGCTAGTAGCTCAGAACATTGACGCGATCCAGA
CAGAGACTTATACCCGTGCAACCAGTCCTTGACTCCAGACCAGTTTGGGTATATGATGCA
ACGTGGTCAAGTTAGAAACGAAATGAGGCGCCCCTCAAGAAGAGTGCGCCATTGACATTA
GTTTCAACCTCACGTTTCTGGTATCATGCTCAGGGTAACGTCATGACAACTGAAGCGCAA
GAAGCGAGTACGAGATCGTTAGTAACGTTCTTGAGGAAGAAATTCAGGACTTCGGCAAGT
TATAAGGAATCAAATGACAATTGCTATCAAAAGAGAGAACGGAGACCTAATCTGGTTCGA
CGTTGTTACAGAGTTCGGCCGTGGCTCTGTGAGTTCCAACCCAATCGAAACGGGAGGAAA
AATCACAGACCACATTACTACAGAAACCCAGTCTTCACTCTTACAGCCGTCAAACTTCAT
CTTGAACAGGCCCGTTATCAACGACAACGAGGCCCAGACATACAAGATCAACAACAACAA
AGAGCTCAGAATACGCAGCCGGTCAGTGTGCCGGCTGTTATCACAACTTAGATTTGATCA
GCCGAATTTTCCCGGAAGTTATTACCAGTTTATTCCTCCTGAGATTCCTGCAACTGTCCT
CCTCAAAAGGGTGATAAAGTCGCTTATGATATTGAGCGCCAACTGATCGACATGCAGCGT
AATGCTGAGGTCTTCAGTTTGCTGGACTCGAGAAGGTATCATCTGGGATCAAATCGAAAG
ATGCATCTTCACCGACTTGTCTTTCACTGAAAACGTTGAGACAGGTAGCAGTCTTCAACC
TGTATGACACCGAGGGGCCGTGACATTCACAGACACCGCTACATTGAAGTTAGGTGAACA
AGGGAAGAAAGACAGCCAAGAAGGAAAGAGAGACATCAAAGATGGTGAAGGGGCTAACAA
CGCTACTGGACAAGACCTCCCACATTCAAGCGTAGCCAGATGAAAGAGGCTCAAATTAGA
ACTCGTTGGCAGGTGATTAATGAGCATGACTTACATCGACACATCTCCTTTGGTACCAAG
ATAGAAGTATAGATACGTGGTAGCTCTGAGGGCATTTCCCGTGTCCTCAATTCTACTGGA
ACAGCCGCTCTAGGCAGTGGCACATGGACATATTCCGACGAGGAGCTTAATCCAATCCTA
ACAGGGTTGGCATTGGTTCCACAATACCCGATAATTGCAGATTACGCCATATACAATATC
AGTTTACTGGTACTTTGTCACGCCAACCTAGAACAGGTAGCACGATGCAAAGCGACATTG
TACCTCAGTTTTGAACTTCTGTATGTTAATGTTGATTTGGAGGAAGATGCAGAGGAGACA
ATACGACAGAGTATATAAATTGACGCTCGGTAATACTGAGTCTGGTCAGGAGTAGAGATT
ACAAACCTTCATCCTGACGGAAGTGTTAACAGAAGGACTTCAGTTCAGGTTCGATATCTC
TAAAAGCTCCGATAACAAAAGAGCGGCAACTCGGCTACTGTTGAGATATACAATCTGTCG
ATTGCAACTCTAAACCTTCTTGAAACCGAATACCTTACTTGCAGACTAGAAGTGGGGTAT
AAAGAAGCTGGAACTTCCGTTGTTCTAGATGGTAATGTTGTCGAAACATCCACAAGAAAG
AGTGGAAACGACTACGTGACTCAGCTTATTCTTGGTGAGGGTTACACTGCTCTAACTGGA
GACTAAGCTGAAGGGCACAGTATCTCCGGGCAAAACTGTAAAGGATGTTATCGAAGAGAT
TCGTCTTCAAATGCCGGAGTGGACAGAGGAGCTTATACAATTTCAATTGCACAACCCGAT
CACGTACGGCTAATAACCCGTGGTTCGGGCTATTTCTAAACAGCGTGTGTGAAGCGTAAC
AATATTGAATGGAACATCAGTGGAACGTTCTAACGTCACAGACGTTAACGGACCAACAAC
GAAGTGTTCAAATGGCTCTCGTAAACACGAGAGACCGGTCTGATCGGATATCCCATTTCT
ACGCCAGTGCCAGCGAACGGCACAGAAGAAAGATAAGCGGGAGACGGAGAGGCGTTCACT
CCAAATGCCTTCTCAATCCTGAGCTAACTCCCGTTCTTGTCCGGTAGAGTCGGATACAGA
TTGTCAGGAACTTTCAGAATCAACAACGTCCGAATCTCGGTGATACAGAGACAACGAATG
GTACACTGAATGTTGGTGTTCCGATTCCATAACCAAGAGGATATTGACCAATGAGGAGAA
CAGGCCTACAAGAGCTTCTGAACCTGCACTCGTCCACGGAAGGCTCGAAACAGTATACTG
CCATACCTTGTGTGGTATTGCGCGTTCTGGACGATTTTAGACGCCTTTCTGTCGATGTTA
GACCAGTGGTCAATGACCTGTACAAAGACGGCACATCAGAAGAGCAACCAGAGATTCTAT
CTGTCCCCGTCATTATGCTGGGAACAGCTAACACCCTTATCAGCTTCCCATTGAATGTCG
GGGATACGGTGTTGTGTACTCTCAAAGAACTATGGACGTTTAAAGGCTCTGCCACTGGAC
AGCCCTCACACCCAAACGATCTTCGTAGTTCAACATGGCGGATGCCATTGCCATTCTCGG
GTTGTTCACACTTCCCTAGGTCGATGAACGACCCTGCAAGACATATTGGCCACATGATAC
CGTAAAAGACCTTACTACTGCCCGCTACCAACCTGATGACGGGACAAGAGGCGGAAGTTA
GATCAAAGCCAATGGAGATATTCTAATCAACAGCCGCAAGACTATAAGCATTAATGCTCA
AAATGTCAACGTCATGTGCTTCACTCACTGTCGATGCAGCCCATACAACATGGAACGGAA
CATTGCACATACAGGTAACTACGTGCAGACTGGTGGAACTTCTACATTCAACGGTATCTC
CATTCCATACCCACAAAACACGGTGGTGTTATGCCGGGCGGTGGTGTTGATTGCTGTCCC
ACAAGCTAAAAGGAGATCATATGGACTTGTTTGTCAACCCCGACACACATGACTTGGTTT
TTATAATGGTGAAGCTCCAGTCACCAACGAATGGTTGATATTGTTGCTCAGCGACTAAAG
ATCAAACTGTACACATTCCTAGGTGAGTGGCTCTTGATGATAGGATCGGCATCCCTTTAC
TTCGAGAGGATTCTTGGTAAGTCTAGGAGCCTTCCCCGCTGCTGACGCGACATCCATCTG
AGATTACATCCCCGGCGTCCTGAGATACACATCTTGGCAGTCGGGGATCGACCCCTCACC
ACGTGAATACCCATGAGTTCACAGCCCAGAACCACAGACAATGAAATCCTTCCCATCACT
TTCAGAATGATAGGAGTTTAATATGGCTGGAATTACAGCAGAAGGTCTAACGATTAAAGA
TTCTGGACCAAATCCTGACAGACTACAGAAACGTAGCCTCAGGTCTTCGCCGACCTGTTT
CAACTGGCACGAAGTTGACACGTCTTATAATCCTGCTCTAGCCGTCTGATCGGCGTAGTT
GCCCATCGACGAAGCTATCTGGGAAGTTATCCAGATGGTGTATAACTCCTCTCAACCCGC
AGCCGCAACTGGCGGCTCTGGACAACCTAGTGTCCTCGGCAATTAGCCGCAGCATGCCGC
CCGTCCGACCCGGCTCAGGTTGTTCTAGAGGGCAACATCGACACCGTTATTAACTCGCCT
CCCGCTAAGCATGCCGATTTCCAGCAGTACAGGCCGAGTGTTCCACCTGCTACAAGGCGT
GATCCTCACTCCTAAAGCTTGCTCTGGTGTTGGAATCTTCCCTCAGACAGTAACGACCTT
CCGACATAATGAGCTTAAGATGTACGTTGATGACATTAACACAACGTCTATCAAGTACAA
TAATAAGCCCTTACCACTGGTAATAGTAACATCCGAGTCCAACTTCTAGCAGGACTGGCC
GCAGACGTAGCTACAAATCACGGAAATACCTTGACAAGCTACGAACAGAATGGCATAATT
TTCATAGTACCCATTGACCCATTCACCAAGACTTTCTGAAGAAGCCCAACCTGAGTATAT
TCAGAAGGTTAGAAAGCTTGGTATCGCTGTTGACGACGTTATTGGCCCGTGGTGCCTCAG
CAGCCTAGCTATCGATACGATCTCCATTCCTATTGCCGGATGGGACAGCGTTATCAACCC
TGTTCCAGCTATCACTGGCCGTCTGCGCGAGACCGACGATGAGCTTCGCGAGATTCCGAA
ACTCTACCCGTACAAGCCACCGATTCCTTGGAGTCCCTAATCGACGGTCTGATGAACGTA
GAAGGGGTAGAGGATGTGCGATTTATTGAAAATACCGACAACCCAGACCCCGTTCATGGA
GTCCTGGACACTCGTTCCCTTCCAATCGTTCTGTGGTATTCCCACAGAGGTTGCACAGTC
CATCTGGCTGAACAAGCCATTCGGGATTGGTTCTGTCGGAGATACAGAGGTTCAGGTAGT
AGACAGTCTAGGCTACACTCAATAGTAACTACCAGCGACCCGTCGAGGTTCACCGAGATC
AAGATCAGTGTAACAAACACAGGATCGATGCCAGAGAACATTGAAGATCCACGGCCAAGT
TGTAGCGTACGGACCGAGAATTACAAGATCGGAGACGACGTAATTTATTCTCGATTCTAT
GCTCCAATCATGGAAGTCCCGGGCTTCCAAGTTAACAGCCTGACGATTGCCAAGAAAGGA
CAGACTCAAGGCATGGCGAACATCGAGATCGGGTTCAAAGAAGTGGCTACATTCGCCGCA
GCAGATATCACCGTAACTACGGTGTAATGATAGAAGGAGAATTCCATGGCTGTCAACCAA
TTTGACAGAGAAGATTATTATCTGAGGTGGCCCGGGAACGGTCACTGAACAGTTTAAAGA
GAAGCCGATTCATCGCTTCCTGCGCGTTGGCTGTCTGGTAAGTTTGATATCCAGAATGCA
CTGAAGACCTCCAGACTCCGGTCTCTGGACACAGCCACCGGAGACATTGTAAGATTAATT
CACGCGGTCTAGTGTACCAAGATATTTTCAACTATTTTGATTCGCTGGAACGGAGCGTGC
AGGTTCTTTCGAAGCCTGTCGGACCCTAACGGTCGGTGCTCCATGGTACTCGGTGTCGGT
GCCCAACTGGTAACGCCAGAGAGCCGAGAGCGATGAAGAGTATCGGATGATCCTGAAAAT
AAAGATCATCAAGAACAGAACAAACTCAACCCCAGAGCAAGCTATCGAAGCCATAAATCT
GTATTCGGTTCCTGAAGTATTCCTAGAGGAGTACGCCCCGCGCCGTCCGTATCGGTATAT
CGGTAAGATTCTAACGAACGTAGAGCGTAGTCTTCTATTCGACCTAGGTAGGTGCAGGTG
CATTGCTCTAAGACTATCGGGGGTTAACTACACATACACTGAGTTCCAAGCTGGCCGGGT
ATTTGCTACAGAAGGCTTCCCCGGGGACAAGGCGTTGGAGACCTAAAACGATCCCACTGT
TGGTGAATTCGACCAACCTAGTGACATAAGAGTTATAAATGGCTGATATCGGTCAACTAC
CTATTGAAAATATTTTCCACAGGCGGGGATATGGTAGCCCCGACCCCGCGCAGCAGCAAG
GCGGATGGGTATTCAGTCTTCCTCGCCAATGGTGGAACTGGAAGTGGAACCTTCACCGAT
AATACTAACCTTAGCGTATTTGCTACCAGAAGGGCATCCCAGAGTGGACTAGCACTCAAG
AGTATATTACTGCAAACAAATCGTTCTGCACAAGAAACGGTTTCGTCTACAAGGCTGTCC
AAAATTCATATTGCGGTAGCGACCCGGCCACCGTTAGTTCTAACTGGGTCCGAGCTTTCG
CAGACTTTTACCACAGCTAGCTCTGCACTTTGGAAGCCTGACTCCGAGAGAAGGAGGGAT
TCCTCTTCATTAGCGCATCTGGTGCAGGTGTTTGACTCTCTACGGCTTATGGATCGGCAT
GCTGAACGTAGCCAACGCAGCGGAGCTAGAGACTACATTTCGGCTCAAGAGAGTTCTGTT
GTCCTGTTCAACCTGGGTTCATTGTGATCTTCAGGGCTGCCAACGCGGTTCCGTACTTCA
ACACCGACACCCGATGGCTACCTTCAACATTACAGCGTTCGAAGAGGCCTAGTCAACGCG
GGTGATGCAACCAACGCAAAGAACCCTTCCTAGGCCTTCCAGCTAACTCTGCTACTATCA
CGGTTGATCCAGCCAACAGAGTTATCACACACACTCTGGTCTATAGAGACGCTGCTGGTA
ACTTCAACGCTGGTGTGATTACAGCCACTCTTTCTGGTAACGCGACTACAGCCAGCAAGC
TCAGGCTCCAGTTACGATTAACGGCGTAGCGTTTCGACGAAGCCAGAACATTGTTCCCGG
CCTAGGATACAAGCTACGCCGGTGTTAGGCGAGGCTCCATTAATGGATTAACATGACCGA
ACAGATAAGACTACCCAGTTGGCTCTTAGAAATAAATTGATACAGATTGGATTAGCTCGG
TGGCCCTGGATGACAGCTCGTTGGTGCTTCACTTAGAGGGCCAGAAGGCTAACGCCACAC
TCGCGGGTTAATCCCCAATGTTGTGTTCCACGCGGAAACCAGTATGGACTAGATTACCAA
ACGCAAGCCAGAGAGCGGCCTTGGTTGACAGATCAATATAAATGCAACCGTCCTGTACAA
CGCAGATAAGAGCAGGTACTTGGTTGCAAAGATAACGGTGTTTCCCGGTATCTGGGACGC
AACGACTAACACCCCTATGGCGTTTTTTCTAGACTACTAGGCCAGTTCTCGACTACGGAA
CAGTCCCTGTTGCACAAATACAGGATTGGCCAACCCGCGACAATTCCGGTGATCCGCCCA
AATCTGACTAATCAGATTGCGAGAGCGGAAACAGGAGATATCGCAGTGCCGCTGCGTTAC
AGCGTTTGGCGCTGTTCTGGGAACAGACCATATGAGTAAGAGCCAGCACTGGTAACGCTC
TCACCTAGTATTCCAGAGGAATGATGGAGCAGAGGTAGGGCTTTATTTGGGGAACTGGCT
GGCCAACTCTCTGAACTTCAGGATCGCAGGCGGTGCGACAGGCATGTCTCAATAACAAAC
TCTGACTGTAGTTGGCAGGGTGAATGCTGCGACACTCACCCGTCTGGCAACGTCAACTCT
GGCAACAGCGTGATTGCTGCCGGGAACGTGCAGGCTGCTGGCCGTGTACCGCGGCGATGC
TTTTATGAGCAGCAACGGCGCAACCTTTACTGGCGGGAGCTGGCTCTGCGGGACTCTTCT
TACCAACTGGTAGACTCTGTACACGCTGCAGGAAAACTGACGTAATGACTGATGCCCAAA
TCTTGGCTTCGCCACTTCAGAGGTAGTGCTCAGGCTGTGGGGAACATATGTCTTGCGATT
GCAGCCAGCGGAAGCGGGGATGTTGGGACCGTGGTAGCTGGTACGTCTCTGTCTGTCTCC
GTCAACTACCACGGAACTACGCTATCCGGTAGCTGCTAGGCATGGGTAGGTTCGGAGCCG
GAGGTTCTAACCAGATTACCTTGTTCCAGAAGGTTGCAGATTATCAAATAGGCCCGTAAG
GGCCTTTATAACTGGAGGTGATTTTAATGGAATTCAGAAACGTTGTAAAATTAAAGCGGG
GTTCGAGGTGAAATAAACCATCCAGAAATTGATGGATTCCTTACGGCGCTGTAGAGGGAT
GCCCTACGTCTCACCCATGTAATGTGAAGATCGCCGGAAAGCGATTGAAGATGGCTCTAT
GGAAGTGGTAGAAAAAGAGACAAATATGATGACTTTGAAGCCAGATTGTGAGAGACAACG
ATAACCCGGGCTGACCGTCAAGTAGAGATTGCTATCGACGATGAAGACGATAAGAGAGAA
GGCTTGGCGTAAGTATCGTTCTGCACTACGTAAATGGCCAGAGCACAAGAACTTCCCATC
CGAAAAGAGCAAACCTAAAGCCCTAAAGAATAAGGCGAGGTAATATATGCCAAACATTAT
GAAGCCTACGGGTATTAACGCTATCTGGTCTGAAACGGCCAGAAGGTTGACCCGGGTGCT
GTAAAAGTTGGGCTTGATGGTGTGACAGAACACTACCTCCCTACCAAACTGCCAACTTCA
TTGAATACAAGCAAGACTTGTTCAACGCGCACGTTAACCAGCACGGTATTCCCGAATGGG
ATAGCGTCACAGAGTATCAGGGTAACCTGAGCTACACTCAAGGCGCTAACGGGATCATCT
ATAAGTGCCTTTAGAACCCATTCGCAAGATTCCAACTGACCCTGAACATTACAGCCGGAT
ATTGGCGGTGGCGTTTGAGGATGCGGGAGAGCTAAGGTTCGTCAACCTTGATCGGGGCAT
GTAACAAACTACAACACCTCCTCTCTGGATTGGCAACGTAGTTATTGCAAGACAAAACCT
AAGTGTGTATAGTAAGCTGAAGGCGACGCCCGGTACGCTATGAAGCACGGGAACGGCTCT
ACTGTGCCAGCGTCGCCACACTGCCAATAATAGCCCAACTCTGACCGCGATCCCGCTGAG
CCAGCTATCGACTTCCGTTCCTCCTGCTACCGAGACTGTAGCCGGGGTTATGGCAGTTGC
TACGACTATCGAGACAGAAGCTGGAGCCACGATACCAAGGCTGTGAGTCCGCTCAAGGCC
GCAACAGGTGTATCTGAAGAAGAAAAGACAACCTTTCCGGTCTGTCTAACGTCACTGCCG
CAAGAGCTAATCTAGACTGCCGACGGCGACTATGCCTTCTTCTACATTCCTGAAGGCAGG
TAGCAATCTGGCAGATGCCTAACAAGGCGCTGGCAAGATCGAATCTTGGAATTACAAGTA
GTGCTACCCAGCCGGAAACCTATTTCTTGAGGAGCGCTCAGAACCCCTAGCAGATGTACC
TAACAAGGCACAAGCTAGAAGTCAACCTAGGCCTCACTGGGATGGTTACAACAGACCCTG
CGGTGATGAAGGCAGACAACCTTGCTGGATTGGCTAACACTGCTACCGCTCGGTCCAACC
TAGGGGGCTAGGCACAGCTTCTACTAGAAATACAGGAGACTTCCTTTGTCGTCTGGGGCT
AACCTGTCCGACCTCACGAACGTCCAAGCAGCTAGGAAACAACCTAGGGTTGAAGGGAGC
GGCTACGCTCGATGTATGGGGTCTTCCTGCGAAATACAACTGCTATGGACTTCAGTCCAG
TCAGTCGGATATTTCCAGAGGATGGGCTCGACTACCAAAACGGCCTTCTGCTACAATGGG
GAACTGGTCCCCGGTCTGTCTGATGACACAAGGACGAATATCCAACTCCCAGCACGAATC
TTGAACGTTCAAAGTGACCGTAATGGGGACGTTTAACAACCCATCGGCCCGCGCTTCATG
ACGGATATGTGGAGCAACACCGGGTTTAGAGTTAGCTGCAACTGGGGCAACTGGTCTTAC
CCGTTCAACTGGTTTGCTATCACTTCCACCCTGTAATTCAGGAGTATCAAAATGGCTCTA
ACTGAGCAAGACTTCCAATCGGCTGCCGATGATCTCGAGTCGATGTTGCCAGTGTAAAGG
CCGTCACTAAAGTAGAGAGTCGGGAGCGGCTTTCTACTTTCTGGCGTCCCTAAGATTCTA
TTCGAAAGGCACTGGATGTTCGCTTCCTCAAAAGCGGTGCTTTGTGGTCATGACCCTGAA
ATAAACGACGCTTCTGCAACCCTAAAGCTGGAGGATACCTCGGCGGACAACAAGCGGAGC
ACGAACGTCTAGATAAAGCAGTCAAATGGATAGAGACTGCGCACTTCAAAGTGCCTCTTG
GGGCCTATTCCAGATTATGGGATTCCATTGGGAGGCACTAGGTTATGCGAGTGTTCAGGC
ATTTGTCAATGCCCAGTACGCCAGCGAAGGATCGCAACTAAACACTTTTGTACGCTTCAT
CAAGATCAATCCTGCAATCCACAAAGCTCTGAAATCCAAGAACTGGGCGGAATTTGCCCG
GAGGTATAACGGGCCTGATTACAAGAAAAATAATTACGATGTTAAGCTAGCAGAAGCCTA
CAAATCCTTCAAGTAAATCTAGGAAGGTTCCTAATGAAGAAGCTATTGAAAAGCTGGAAG
TTCTGGGCTGCTGTAGGCTCTGCAACTTTATGGCTCTGGAGGCCATGGTTCATCTTTGAG
GCCTATCCTTCCTCCGGCGTATTCGCCGCAGTAATACACTGGTAGCTGTCGGTGTAAAAT
TTCGGCAGTGTTTGTAACTGCTGGTAAAAGTGGAGGAAGCGATTTCGGAAACCATAGAAG
ATGGCTCAATAGAAAATGATACTAACTAAACTCAAAACTACGCCCTCGTAGTAGCTGCCG
CAATGGCAGCAGGGTTTGAATATGTCGTTCTCTTTGTACGGCGGCTTAGCTGTTGCGAAA
AGAATGATATCAATCTCTTCAAGCTGCGTCTCGACAGATGGAAGAGCAGTTCAGAAAAAA
GAGCGAGCAGGGTGTGAGATCACCACTGGGAGACTAGAGGCACATATAGCCCAAATGAAG
AGCCGACGACAGGAGCTTCTACAAGGCCACCTGTGTGAGCTAGTCTCTACCAGCAACCCA
AAGGGGCCAAGAAATGCCACAGAGACGATCTCTGGAGGAGCCTTCTACTGGGGATAGTCT
GGACCCTGCTCCTTACAAGCTTGCTCGACAGGCTTTCTGTTCCACAGTACCAAACGATCC
GCTGGTATTGCCCCGGCAAACTGACCGAGGAGGGTTAAAGGTATACCGAGTGGAGCAGAT
ACAGTTAAAGGGGCTCGCTAGAGCATTCTAAATACTAACGGTGCTGCCATGTGCAATAGT
CAACTTCACAAACAATAAAGCTATGGGCAAGAAGAGCAGAGGGCTCTATATGGAAGTAAA
GACGGCAAAGGCCTAATCAAGGTAGCTACTACACGGGGAGTTATCTCTCATAATTGCTAT
CCTAATATGGCTTGGTCTGGATTCTAAGTTCCAGTCTTCCTAAGCAGGAAGAACGTATCT
TTGCGATGCAAAGAGATATGGTATCCGAGGCGAAACTTAACGCACTAGAGTCGAGATTCA
ATAGCGACTGAAAGTGGGGTGGTAACGTAAGAAGAGAACAACAAGAAACCAACCGGTATT
TGATTTTGATTATGAATGCCGTCAGGGGTCGGGATACAGAAACTCAATAACTATAACCCG
TTGACCCACACTGGGAGACAATATAATGACGAAACAAGACTGGCCGCTAGTTTCAAAGCG
GTCGGGGCTTTGTTATCTCCCTCCTTGTCTGTATGGCTATTCTGGCTTTCACAGCGATGA
CTCGAGGCTCGGTTTGACTCTGTACGCCAGACCTACGAGGTCGAATTAGCGAAGATCTGA
GCGGCAGTATGAACTCAAACTGAACAGACTACAGGATCAGATAAACTCGGCCTCTCCGTA
CACACAGGATCCCGGCAATCCCGTTTGCAATATAGAAGAACTCACGACTCGCTTAAAAAG
GAAGATTAGCCGAACTTGAGCTGAGGAGAATAAAGAAACAAGAGTAATTAAGCCCCGGAA
GCGAAGCTTACCGGGGCTGGCCCCCTGACCTGTAGGTTACTTCCACACTTCGTCAAACAG
CTTGTCAATTTTTTTCAGAGATAATCTTGTTTACCTTTTCTTGACGCTCATTATCTTCTG
GATCGGAATGGATAAGCTCGATGTCGGCAGCGTTACCCAGTCCAGCTCCCGTAATGGGGC
CAGCACCTTGACGTTCAGGCAGGTCGCTGATCTGTCAACGCCTGCGACAACCCGGTGGGC
GCGAGTTGTGTTATCGAATGTACTTCCGATGGCCGGTTGGTACAAGTCGCTTACCTCTAA
CTTGCTTCTTAACGTCTTCCAGTTTCCATTTCCTATGCCTCCTCAATCTAGTTTCATTAG
CGTATTGAACTGGTGCCTCAAAGACTTGAAAGCCTGTGGGCCATCGTCCATCCGCTCCTT
CATGGATTATGATGGTGATCAAATTAATATCAGTCCTCAGTCTCCTAGTAACACAGAGCT
AGGAGTCTCTTTTATCAAGCCACAAAGCAGCAAGTGCAGCACCTCCGGCATGGAAGCCTT
GAAGCTGGAATCGTAGCTTCGATAGGCGTTCATACGTGGCTTTGAGGTCGGGATAACTTA
ACTGATGTAATATTGGCATCATCGTCAGCGTATGCTGATCCCCTCTAACTACATGCCAAC
AGCTCATACTACACTTGCCTCTATATCGTTGCACCATTACACCTTCTTGCCGCCTTCTGC
AAGACATTACTTACTCTCGCTTAATGGTCGGAACGGGTCATGGTTGTACTCGATCTTCTC
GGTAATTAGCCTGCAACATCAAACCCCGTACATTCGCATAGTCCATGATGCGAATGATAG
CGTCAGCCAGTTCCACCTCTTCCATCTTCATCTGTGGCAAGTGATCGTCCATCAAATCCT
TACGGACGCCTTCAGCTTCCGCAATTTCAGTGGTAACGAGCATCAGCATATGCAGAGCAT
CACGTTTAATCAGCTCGCCACCAATGACCAGATCGGTGTTCCACTTGCGGTTAACAACCT
CAAGACCAGTCATCATTTTGTTAAAACCGCTAACAAACTCAGACGGACTCTCGTTCGAAT
AGTTCACCGAACGTTGGCTCTTGATGTTCGGCAATTGCGAGGTGTGGAAGGAGCCACTCC
ATCCAGCGTCATAGCACTTTTGATAAGCTCTTGTTCATCAATGTACGAGGAAGACGCCCT
GCTCCTCAAAGCTGACTAATAGCTTCCAGCCCCCCCCCTCGACCCAGACGCGCATTACCA
ATAAGCCTTGGATCGATTCTCAGAGAAGTCTTGTGGAGCTTCTTTCCACGACCTCCATCC
TACCCTACCATTGCCAAAATACACAAGGAGTGGCACATAGCCTTCTCGCTTTCATATCCG
GCGTTTCTATAACTACAACAAGCGCCGGAACTTTCTCCCATCTGGACGTTCAGTTAGTAC
GAAGTCTCCCCAAGTTGATATTCTCCGACTAGCTGGGCGAGAGATTCCTCGATATGGTCT
TTAACTTTGCTCATTAACTTCTTCACTCCTCACAGAACATTTCAAAATGGCAATCACAGC
ATACCAACATGCCGCCGTCATTTACAATTTCTTCGACCGGAGAGATGCTTCCACAGCATT
CACCCAGCCGTTCGACAGCATCTGCACAGGCCCAATAGTCATCTTCACCCTCCTTCCTCC
TCCTTCAGAAGGTACTCGTTGCTAATAACCTTGAAACTAAAGTCTCGGCTCTTATGCTTT
TGAACGCGAAACCTTCCGAACACCGTTCAACGCAGACTCTCCATCTAGCCATTTCAATTA
CATCTGCATGTCTTTTGGAACGCCACGATCCCACATGTACACCGGCACATGTTTAACATC
CTCTTCGCCGTCATCAGCTAGCGCGTTCAGGATTCCCAGAGTGGCCAGTCGCTCTTCTGG
AAGATAGTAACGACTCTCCAGTATTTGTAGATATCGTACACATGGTATTCCGGTTTGTCA
ACTCCCTCGAAGTTGCCTTGAATATTCGGTGCAACCAGTTCACCCTGAAGGGCGATATTT
AGACCAAACTCCGGAGACGTTCGCAAGATTAAGCTCTTCTGCCATCGCGGTGAAGTGATT
GGAGTCTTTCTTAATCTACACGCTTCCATACGACCCTTAAAGAAGTTCTTGACAGCCGTG
AAGGGCCGATCTTCTCGTCTTCTAGACGGAAACCGACATTTCGAGACGCCACGCCTGCTT
CTCCGTCCTTGTGCCAGATAGTGAGAGACGAACCGTCCAGATTTGAATGTCGCTTCAAAC
TTCTCGTCCTTCTGATGAGCCTGATCGTAAGCCATCTGAATATTCTGTACGCGAGCCTGA
TGATCCGTCTTCGGGATGAAGTTGGGGAACCCTAGCTTGGAAGTGTAGTCAGCTGCCCTT
GTTGCCTCCGTTGATGGCTACCTGCTCGGAAGGCTTTACATACTTCAGGATGCCCATTCG
ATCCGGTAACATCTTCGTCTACTTTCGGCTCTGGACTGCCCACGCTGCATGAACAGGTAC
GATCAGTCCTTGGCTAAGCTCTTTGCGAAGCTTCATGGTCTTGATTCGAGAATACTCTTT
TCCACCTTGTTCGACCATATTACGGCCGCAGGAGATTCAAAGATAGGGTTGTCTACAGGG
ACCATAGGTCCACTTCAATGTAGATTGCCAGATCGCCAGCCTTATACTCCGTTTGATTAC
GCACTGCCAACCTCAACAAGCGCCAGATCAGGCTGTCAGCGTTAGGATGGGTCTTCACAT
CGTCGATACGCACCACTCCGGGCTGAGTACGCCGGTCTTGGGAATTGCTCATATTTCCTC
CTTTATTTTTAAAATTTTACTAGATTAATTGTCAAATAGCCGAGATTAAGGGCGTGCTCA
GGCTGCGAAGATTCTCAGCGTCCATGCGGTCGCTTGAATTGACGCATGGCGCCATGTGAT
GCCCTCTTTGTTTCTAGCTGCAATATAGGCCGAGGAACTATCTTCCTTTATTAACGAGCT
TGCAAACTCAGTCTTTCCCCGAACACTATCTCGCTAACTTTTGGGACGGCTCTCGAATAT
CAATCTTCATCGATGCTCTCCTTGTTAAAATTGTTAGATTTGATAGATTACTTGTTAAAA
CCAACCGAGGTCAATAGCTCGTTCTAGGCTCATGTAGCAGATTCTCAGCATCTAGAAGAT
CACGGATCGGCATCAACTCCACTATTCCCCGGTAAGCCATCTGCGATGTACACAGGTACG
TCAGTATACTCGCTCTTTAAACCCGCAGGCACAGGCTACATTGTCTCCGAAGACAAATCT
CGCTGACTTCCCTTGCCTCGTCTCGAAGATATCAATCTTCGTATGTTTTCTCCTGTTGTG
TTGAAGTCGTTGTATTCTGCATGGATTCATCTGCGCCTGTGTCAATAGCCTTGACAGAAA
ATAATCCGTGGTAAAGTGTAATGGAGAGAAATGTCCGTCTCACCGGCCAACGGTATAGCG
TATGAAGGAAAGCTGCAAGCGCATCCTGAGTCGAAGATCTGAGAACAGGGCAGCGACGAC
CCGAAAGCTCAAGAATATAAGGAGCCCATGCTCCCCGCTCACCGACTCATCTGCATATGC
GTATATCTGCATGAGGCGAAGGAGCAGACCAGAGGCATGTCTTAGGCGAATCCGTATGGC
AAGCCTTGGGACGGTCTGCCTCCACTACCGATCTATCTGCATACAAGAAGCTTGACAGTA
TCCTGTAAGCCGTGTAGAGAGTAATCAAATCAACCGCAGAGGTGTATAAATGAAGCATAT
TTTATTCTGCGTGAAGACCTTATCGACCTACTACGTGATCGTATGAAGCGGCTCTAGAAG
CTGGCAGGGGTGGACAACTGGGACTGGTATGAGGCCTCGCTAATCGACTGCGAGATGCTT
CATTGACGATGGCCGGGGCTAGAGTCGAAAGCTCTTGCAGGTGCTTCCCAACCGTAGGTG
CGTGACCGTGGAGAGTCGAAAGCTACCTTCAAAGACCCTTACCCTAGGTTCTTCGGCCTT
CTCGTAGGTATAGCGAAACCAACGACTTCTGCATGGTGGTGAGCTTTGCGTCGTATGGAA
CACCACCTATGAAAAGGCACACCAGCACCTGAAAGTGAAGTGCAAGCGCGGTTACCGGCA
GGGGCTACTCAGAAGCCTTCAGCTACGCAGACACTTGGTGCCCTAAGACCCGGATGCTCT
ACCACCGGGGAGGGATACTAGGATAAGACTCTTAGGCAGTTTGCTGGGGAGAAAACCCAC
GGTGGTTCTGGATCGCGGCATGCTGTTGCAATCGTCGACGGAGTGTTGTACGATCCACAC
TAATGACAAAGAGACGTACCATCTGGCACTGCTGGCAAGTGTAGTAATGGCCGGGGGAGG
CACCGAGAAAATCGAGAGGAAGCCTGATCAATCTCACCTCCTGTGAAAGGCCCCGGACTG
GTATGTCTAAACACAAATCTGAAGTACAAAGAGGAGGATTTATGGAAATTATTTCGAGAG
GGACGCTTCCTCCAAGGGCTTTGTTTACTGCAAAGGTGTCACCATTGCCCTAAGCATTCT
CAGGCTAAGAGATCGGAACTTGGGTATGTTTCGTTCTCATTCTGTCGCCCCGGGAGACTG
GGTATTATTTCGCAGAGTGCCCTGTCTGTCACGAAAGGTGTCTGCAGGTTGCGGCTCCTG
TCATTCCTGTGGCACCGGCCACCACGGGTATAACAAGGAGCGTAAATAATATGGACCAGT
TAGCAGGATTCATGGGCGAACCTTTCGTAATTGCGTTCGACTACGACGAGACGTCAGTCT
CTACCCTCTTGCCTTCGAATCGTCATGGATACCTTCCAGGGGCTTTGGAGGCGCTTTCAA
TGTGATCGTAGTCACTGCACGCCACCCTGACAACAGCGGAGGTTAGAGTGGCTACGGGAC
TACAAGGTTTACGATCTATTTCACGGCACAGAAGGCAAAAGCGACCATTCATGGAAAATC
TTGGAATAAAGTCTCTGTATGGGTTGACGACAACCCGTTCAGCGTGGATAATGATGACCT
TCCCTCCGTGGACAGTGGAGCAATACGGTACTACATGGAGGCAAAAGCAACAGGCTATCA
ACAGAGGAGTAAAGCATGAGCGAGATTATGTGAAGGTTGAAGTGGGAGATCGGGTGGTCC
TTAAAGGCTATTGCGATACATACACTGGATGTGCAAAGCGATGGGCGCAGGCGCATGGAC
GTTTGGATGAACTGCTGGCTACGAGTTCGTAGAGAAGATAGCTGGGTCCACACCGACGAA
CTGGCGGAAGCGAAAGGCACCGTTGTGATGACTGAACTGGGACTGGAAGGAAAGAGTGCT
GTGCGAGTACGTCTGGAACGCCTACACTGACCACAGAACAGTTGTTGACACTCTGATCTT
TACATCGCATGTAAGGCAGCAAAAGCTCCCGTAAGCACCCTAGACAGGGCCTTCCGGTTT
GTGACCACGACTACCTTATGGAATCTGGCTGCTCAGCGACTGAATAAGGTCCGTCCGAGC
AGCTACGAACTGGCCAAGTCGTAGAAGTGGACGTGCCTGTGAGGGTGTAAATCAAGACGA
AACCTCGCCTATCGTAGTGTATGTAGTAGAGAAGATTTACGATAGGAAGGTAGCAATGCA
CCTCATTCTACAGTATGAGGTAGCAGGGGCGCTAATCAGGACGGTGGTGGAGCAGGGAGA
ACTCATTTCTTGGATGAAATGCAAGGTATGTACTTGACAGATTCAACTGGAGGTGAACAA
TGGGTTGTATGACCAGTGGCGTAAGTATATGAGCGTTGTAATCTTAAGAAGAAGAAGATA
ATGAGCGTCAGTGCATGCGGCTATTGAGGCAGTTGGCGAACTCGATCCTATCAAGATTTC
CTAGATTCTTTCTCTATTAAAACTGAAGGAGTTATTGTAGCATGGAGTCAGGTAACGTGA
TGAGGATTGTAGTTGAAGCACGTGGAGAAACAGAGCTACTTCATTTCCACTGGAACGGCT
TTGGGATGTGATGGACACTGCTTGTCTCGAGTTTTATATCAAACCTGGTATGTTCTTTGA
CGGATTATTCGAGAGCAGGCCTGCTTGGAGCTTGATTTCCGAGGCGTTGCCGTTTCCGAT
TCTGGGAAATGAAGACGAAGGCGTGGACGGCAAACTCATGGAGGGGCAAGTTGCAGATTA
TGACCAACTCCTTCGAGTACGTCTTCTTCAAAGGAGGGTTTGAGTGGCTAGACAGACTTA
CGAGTCTGCATCCAGATAGGAGCGGTCGAGGAGGCCGTCCGTTCTGAAACTTGAAGGGGC
GATGGAAGTGTTGGCCCACTATATGGATTATGGGCAGCCTGCCGGAATGGAAAGGTTGTT
AGCTTTGTGGAGCTTAAAAGGCTCGGAATAATGAAATGCAAGAAATATCCCGACTTCTTT
GTGTCCCAGATGAAGTGGCTCCATGGGATCGAAATGCAAAGGGGTGTTTACGACATTCCA
CATTCCACTTGTGTGCCAAGTGGACGGACTATACAGGATATGTCAAAATGACGTAATGGC
GTCAACTACATGAAGCATGGGTGGTAGAAGTTGACCGTGGAGACTGGCAAGACCAAGAAG
TTATGGTCCATATCCGCTGAAAAGGGAACTTCACACGTTTATAGGAGGACAAATGAAGCG
ACTCTGCTACCGGTGTATGCACCTTCGAGGGAGCCCACCATGCACCGCCATAAGACGGGC
ATTTGGTATAAGGGTTGTAGTAAATGTGGATCGGGAGTATTCTATGGCTAAGAAGAACCC
TGTGTTTAAGTTTCTGAAGACACAGTCAACAAAACCCTCGGTAGAGGGATAAAAAAACCA
AATACAGGCGGAAGCCTAAGCATAAACAAGAAGGAGCGATTAAATGAAGAAGGGGTGACA
AAGTGAAGATCAATGATGACGCTGATACCATCTTCCGGGGCCGTGTTGCCACTATCATCG
CAGTAGACGAAGAGGGTTGCGTTATTGGTGTGGGCAGCTACGAAGACGAAAGCGAGGAAG
CTTATCGGAAGTACCTTCACCTGTTCTTCGAGCGTTCTGGAGTTGTCAAGCAGGTGTAGG
AGGGTATAATATGAACGGACCCGAAGTGCAGATGGTGCGGAGAAAACTGAAGCTGAGTTC
GTAGACGTTGGGCTTGGATGGACGCAACAAGTCACTGGAGAATATGTCACCAGTGTGGAG
GTACGAGAACAGTTACTACCAGAACGACGGAAGGCTCACAGAGGTTGAGTTTGCCACCCT
GCGCAAAGGTGGTCCGTTCGAAGATTATGCGAATTTCTCGCCATTCAATCATATGAGGGA
AGGCGACTCGCCATGAAAGGCTACACTGAAACCACAATCTACTGTACATCTACTTCCACA
CGTTCTCTCAGAAATGAATGAGTGGTTGACAGAGAACGCTGTAGATCAATGGACAGTGGA
AACTCTGGGCTCCGGCTATCAGGTGGCTGTTCCTATGGACCGATACTGTACGGGACCAAT
ACGTCTCGGAGAGGTTGACACGAACACAAAGGTGATGCTAAACTCCGTGGTTGTCTGAGT
AAAGGTTTTATGTCCAAAATGACCATTATTTAAAATTGCGGCTATGCACGGTATCGATTT
GTATTCTGACCACAAGACCGCTTGTCCCCAATGCCGGAAGAAAGGCGCTGACAACAGCGG
AGACAACCTAAAAGGTCTATGGTACTGATCGTAATACCGGGGAAGAACACAAAAGGTGCC
TATTGTTGGGCGTGTGGGTACACCTTTGCTCTCTGCTGAAGAGCAGGGTGCGACTGGGGA
GAAGACGAAGCAGGAGTGGAAATTGTGGGAACTGAATTAACCCGCAGAGATCACAACGCT
CAAATTAAAGAGCAATGCTCGTATGATCCGCGTGGTTATCGTGGCTTGTCTAAAGAGACT
TTGCCATTTCGAGTGCTACATGGTTTCGACCCGAGACTGGCGAGATTGCAACTCAGCTAT
ATCCTACTACTACTAATTACGAACTCACCGGTTACAAACAGTGATCATGCCGAAGAACTT
TCAGAGCCTATCGGCGAGACCGGAAGGATTGCGAGCTTTTGGTCAGTTCAGGTTCAAGAA
TAGCAACAGCAAGAAGGTGCTTATTGTAGGCGGTGAGGTTGACCAGCTATCAGCATTCCA
GATGCTCTCAAGGAGTACGCATTAACGCGCAGGTGCGTGCAAGAGTGATTATGAACCGAC
TCCAGTGGTCAGCCCCTACTATCGGTGAGAGTGGGGCATGGAAGCAGCTACAGGCTCAGT
ATGAGTGGCTAGACCGGTTCGAGCAAATCATTCTCTGTTCGACAGCGATGACGCAGGACG
AGAGGCAGCAGACAAGGCAGCCGATAAGCCTGAAGGGCGTTCATGATGGAAATGAACCGT
AAAAGACCCACGAGCATTTGAAAGCTGGGCGTCAATCGAGTTTGTCATGCGATTCTATCG
AGCCCGTACATGGACCCCTGGTATATTGTAGGGTCTGATGCACTCGAACGCTCGAATGTA
TGAAGCTGTGCAGGTTGAGAAGATTCCTCTGCCACCGTTCGCCAAGAACAGAAGGCTATG
GCAGGAGGGCATCCCGTTGGGCCGGATTGTGAATATCGGCGCTGCATCGGGCATGGGTAA
ATCTACTGTAGTGGATGAGTTCACTCTGTTTTGGATTTATAACCGCCCCTCATATGCCGG
GTACTGTGACTCTGAATCGGACTCGGTGAGTACGCAATCAAGCTGCTGAGCCGTAAGGTA
GGTGAAGAAGGCAGACTTGCAATGAGACCGTTGAAGAAAGCGCGGTTCCTTGATCGGCAA
CGACGCTCGGCACGACTTTAGCAATAAGGAAGACGGAAGCCCACGCTTCTATCTGATCGA
TGACCGAGACGGAAGCCCAGCAGCCCTCTCGCTCAAATCGAACAACTGATTATTCAGTTT
GAGTTGCCGTTATTATTCTGGACCCGCTTCAGGATATTCTGGACGGATTGAGCAATGAAG
AGCACCGGTGTTCATGCGCTGGCAGAAGGGTATGACCAAGAGCCTCACCGTGACGTTCAT
CAACATCAACCACGTTCGTAAGAGTGGTGGCGGTCAAAGGCTAACTCGGTGCGGAACTGT
ACGAAGAAGATTTCCAGGGTCTTCGGTCCATCTTCAAATCTGGTGCAGCTAAACATTCTC
CTGATGTGGCGGAACAAGGACGCGGAGAACGAGTTCGAAAAAGAACCTGATTAACGTGAA
GCTCTCTAAGTGCCTGGACTGGCCGCACTGAATGATGGGCAATTGGTACTACGACGTTGA
GACTCATACAATCTGGGACTTGACGACTATCTGACCGATACCCCGACAAGCGCCGTGAAT
ACGAGGCTGATGGCTCAGGAAGGAAGAGTGGTCACGGAATACCAAGGTTGACAGAGGGCG
ATGCTTATGTATCATCCCTGTCGCTTTACAGGAGGAAAGCGAAATGCAACAACGATTTGA
AACAATCGAGCAATACCTCGAATGGATGGAAATAACAATTTCACCAAAACATGACTTGGG
ATATCGAGGCCACAGGCCTGTTGATTTAGAAACGTCTATCGATACACCGCCAGCCCCTAC
AAGATTAAGCCTAGCTACAAACACCACTGCATTGTAGTGGGGAGCACGGTGGCAATATTC
TGGCAGCATTCTACGATAAGGCCGACCTACGTCTTTGACGGCGAGAGTACACTGAGAGAC
TGCCGAAAGCGTCTTCCATGCCCACACTGAAGAAGTTGTGACTCTCAAGGAACACTCCGG
TAGAGTATATTCACCCGCCGCTGAAAGAGAGTTCACAACTATGTGCTCAAGCGCAAGATC
GCTGCTGCAGGCTCACAACATGATTTAACTTCGACCTTTATGTCGATGAAGCTTGTGGAA
GATATGGACTTCACTCATCGGCGTAGAGCACAGGATGGCGGTCTGACTACGTGGTCTGCT
GACACCTGGATGGCAGTTAGCGGGTATTCGACGATACCCTCGTTATCTCCAAGACTTGTA
ACCCTGACCTGTTCGGCGGCCAGTCCGGATAAGCTGTCTCGTCGCAGGTGGTGACACCAA
GATTGACTTCCGTAAGCATTTGGCACCGGATGCTCGATTCCTCGACTCTCGCCGATATGC
CTCTTACCACTCGTATCTATGACGTAAAAGGCGAACACCGCCAGCATGGCATAATACTGG
TTGCAGGACCGACGAAGATTACCAACTGTCCGACCGTGACAACTACATCAAGAATTGGCT
ATTGTCCCCGATTCAGTTGGAGAAGAAGGTTGCAGAGATCATCACCTATCAGGAGCACCG
AGGGTTTGTCTCTGAATGCTGATCTCTGTGAAAAGCTGGTGAAAGACTTTGGACGCCAAG
ATGGAAGAGCGTCGGGCCCGGTAGAGCCTGTGCTTCCTCCTCTCTGACCAGCTACCAAGA
AATTCATGGCAGACTACACCCACCTGTTCGACAGTTCAAGAAGAACGGGAGATCACCACT
TTACCTACAGAAGTTCATTGAAAGATCAAGCTCAACAATTGAAAGAGGGCGATGATCGGA
CTATGATCTTGAGGGTAAGGGAGCATTGCTTTCGCCTCTCCTGGCAGACGTACCTCTGAA
AACGGAGATGCCTGCTAAGATTGGAGATACAACTCCATCGGGCAGTGTATTTATGGCGAG
TTCGGTTGATTCCTCTGAGTGGAAAGAGACGGACCTCACTGTCGACCGAAGAAGATCAAG
CTGAAGCCGATGAAACATCGTTGCTAAGATCGATCGCTGGCTGGATGTAACGTATAGCAC
AGCGTACAAGGAAGAGCGGCTGACGGGTTCAGATTACATGAAGATCACCCTCGTAGCACC
CGCGCGTATGTACGTCAGAGGTTGATTGATCGTGCAAGCGGGGAGCTGGCACTCACCAAC
CCTAGCTTCACAAAGGGCCAAGAGAAAGAAATGTGTCCAGACTCGAACGCATTGCAGAAC
AGTTTCCGTCTGAAGGATGTGATTGAGTACCTGACCTTTAAGCACCGGCGAAGCGCAATC
CTCGGTGGCGGCATGGACTGGGGACGAAATGGAGGATGGAGGAGCCGAAAAGTTACCTTG
TAGCATTCGTCAGACGGCAGGATTCCCTAATGCCTGCTGACACTTGCGGGCTGCTACTAG
CCGGATGAAGCACCGGAAGGTTGCTAACGTTCCTCGGATCACCCTCGTTGTACGGGCTGA
GCTGAGAGTTGTTTGGGTTGGAGATGGGTTCTTCCAATTGATACGACTTCGATTCCTTAG
CACGTAAAGAGTCGGCCTACTGCTACTCCGTAGCACGATCCGACAAAGGAATATTGCAAA
TCTCTTTATGATGGAGAAGCCATTTGACGTTCACACAATGATGGCTGCTGCATTTCTGAG
ATCATTGGTCGCCAATTTAACCGACTTGCGAAAACGTAAAATATGGGTAAGAGATCACCC
ATGTAAACTGTGTGAATTCAGGAAGACTAGAACAGTCAATCCTGACAACGCCAGAGTGAT
CTAGAAAGGTGCAACGATTATCGAAACCACGGCGGAGCCGGAAGGGAGTAGAGTAGGGTC
ATGACCCGAAGCGCCAGGGCGCGAGAGCGTCATGATATAGTCTGGTCTGCATGGGGAACA
TGCAGCGGTAACCTGAGCAAGGTTACGGGGATGATTAACGACCCTCCTGAACACAACGGT
ACATACGAGCTCGCTGGTAAAGTGGCGAAACCATTGGTGCTGACTTGCAAACTGGTCAAC
TGGTGTTTGATGCTTTCGGGATGCTGCATCTCATTGAAAAGCCTGGAAGGACGATTCGAC
CAAACAGTGGTGCCAACGGTAAGAAGTATATTGTTGGAGTGGACGGTCGCCGGGTTCCTA
ACTGCTCGGCTCACGCTATCCTGAACAGCTTGTTCCAGAGTGGCGGTGTTATCTGTGCTA
AACGTGCTATGGTGATTCATGACCAACCGCTGGAGAAAGAAGGTCTGAAGGTTGACTTTT
CAAAGAAGACTGGAAGAACAAGCCGGAATTCGCGCCAACAAATGATCGCGTACCACGATT
GTACCAGCAACTCCGCCAGCTTCCAAGATGTTCCTTGGTCCTTTGTGGTGGCAGCGCCAG
TAATGGCGCGAACAGGAGGAGGCGGAGAAGAAGCCGGAAAGCTCTAGCCTCAGGCTTTAC
ATGACGAACAACTGGCTAGCACTGGCAAGGTGTGGAGTGCGATATCGCTACAGCAAAGGT
GTGAAGGCGGGGTGTTTAGAAGCATTGCCGCGCTGGAGAACTTGCTACTGAAGGCCGTGC
GGAGAGCTGCGGGAGAGTTCACTTACTCCTCTCGAGTCATCGAGCTGACCGCTGGCTACA
TCGTTGGCCTATCTTGGGCCGATTGCCACTAAAAAATCAGTATTGTAAGCGAGAAAGGGC
TTCTGACAGGCCCCTCCGCCTCCTGCCAATGGCCAAGATAGTCTGCCAAAATAGATACAA
GGAGAAACACAATATTCTGGCTTTCATTATTCATCCGGTTAATGACTGTATTCCCCAGCC
TTCGTCGGCTGGTAGCTTTGCCCCTGTTCGTCACCATCATCGCATGGGTTGCAGGAGGGT
TCGTTTACTTTGGCACGGCCGAGAGAATGCGGCAAAGCAAAGCTCACACTTCCAAAAAAT
CACCCACAGCCCTGGATACTGCCGTTCTCCCATCATTGTGAAGTCGGCCATCTGCGTCCT
TTCACAGACCGCATGGTGGATGGTTGGCGGAGTACGCCGCATCAGAGCCTCTATCAGACG
CTACTCAGCAGGTTCTCAGCGAATTCAATTGAACTGGGCGTCAAAGCCTAGCTACGGGCT
AAGCAAAGAAACTCTGAAGGCTGTTGAAGGCAGCAGCGAGTGATACGGTAATCACAGAAT
AGGAGGTATGGTATGAACACGGCTCGACTCTACGTCTACGGCAAATCGTCCATGGTAGGA
ATCAATTGCTGACAACAAGGCCAATCGTATACCATACCTCTAAAGGCTTCTGAGGTATCG
GAGACACCGTTAGCCCACAAAAGCGTGGGCTAACAAATACAAACAGAAAGGAGGTAAATA
ATATGTCTGGTGTTATTCCTGACCATCGTCAAACTCACTCAAGTGGATGACGTCACTGTT
GGTTGGCCAAAGAAGCCTGAGACATGGCGCAGTCGCAGTAGATGGACGATATCGGTCTCC
CCGGAAGGGAAATCCGGTTCTGCTCCCTTCCATCATCCATTGACCGGAGACGTCAATAAT
GGACTTGGAGATTACCAGTCGATGCCAGCGATGCACGACCGCTTCGAAATTGTAGCGGTC
CTGGCAAGAAGTGATATGTTAAGGCTGTTGCCGCACGCCCTGACTTGATTTCCCACTACT
GGTTATTTCGGAACCAGCCCAGCAGTACGGAAGGCTTCGAGTCGTGGTGTTGGTTGAAGA
GCATGCACGAAGGGGAGCCCGTTCTGCATGATTTTTTAAAGGACGCGTTGACATTGGCGG
TGAAACCTCTGACGAGTTGCAGTTCCAGACTCTCTATCCCGAAGTTTGTGCTGGAGGAGT
TCAAAGAAGTGACGAGGCAGAGGTTGTTGAAGCCCGGGTTGACGAAGAGAAGAAAGAAAA
GGTTGCAGCCTGGGCTGTAATGGTTAATGCTGTTCTCGATGCAGACGGAGTCCTCTTAAA
TTCTGCCTCAACTTCGCGAAGAAGCGCGAGCCATGGTGGGGTGGCAAGGCTGAGGAGTCT
CGATTGTAAAGTAATCAAAGGAGGAGCACTTTGAAGACCAACTGGAATGTCCGGTATAAT
CGTCAGTCAAGTGGCTGACACACTCGCCCAGTCTAGGGTACTTAAATAGGAGAAATAAAA
TGGCTTTTAAACTGAACGTAACTACCAACACCAATCCGGCAACGGCGGCATTCGCAAGGA
AGTCGATTGGGATGCTCTGGAACAACCATGTCGTTGAAGCTGCCGGCACTGCCGCTAAGG
CGCGTTCGATCCCGGTTATATCTCCGGTATCATCGATCTCGGCGAGCAAGAGCAGAACGA
TGCAGAGGTTGTGTTCACTGGCACTGCCGAAGATGAAACTAAATCATCAAGGAATATCCG
AACACTACTTCGCTGGGATGGACTGGACAAGCAGACTCGCAAAAGCCTGTACGTCTGAAG
TGTTACCGCAGCGCGATATGCAACAAATCGCGATCACTGTGGACTTCCTCAGATCGAGGT
AGACAAGAGCCTGTACCTGACCGGTAACAGCAACAAAGCTCCGCTTCGTGTCCCAAAATA
ACTATGCGACTTTACTCTGCCGGGTCAGAAGACTAAGATTGTTGGTCAGTCCGTTTACCA
AAGGAAGTAGAAGCACCTGAACGGCAAATGGGCGTTCGCTAAGAACCCATGCTGCACAAA
CTGGTTAGCTACTGGCGTCATCAACGAAGACGAACTCTTTCACCAAGGACCGCGTAGGCG
GCTTAAAGCGGCTCAGTTCCAAGTTCGAGTGTGGATGAAGCCGGGCAAAAAACGACATGA
AATTCCTCACCGGGATATCATCTGGTCGGTATGGTGCCTGAAGGTGTTCCGGTCCCTGAA
CTGGATGAGAAGTACATCTACGGCGTGAACCTGTATGGTGAGAACGACGAAGAGTAAGTA
GCTGCTAACTGGTGTACAACGTCATCATCAAGCGAGCCAAGAACTACGAAGGTTCTGATA
TCAAGGCGATGACGAAGCTGTTGAAGGCACGCGGTGGTAACCGCTCCAGTGGCGACAGCG
AAGAGCAAGCTGAAGATAAGCCGCGCAGACCCAAGCCAACCTAAAGTGGAGCCGGTTCAA
ACCAACGTAGATGATGACATTCCGTTCTAAAAGACGGTGGTGTAAGACAAGGGGCTTCAA
CCTTTTCAAAATTCAAAGGAGGCAACACATGCAAATCAATTTTTTTGGTCCCCATCTTTC
CTTCTGGCTGCTATCGTTCTGTATCGAAATCTGCCGGAGTTCTCGCTAATCTTCTGACTG
TGGCAATCTCATGCCCATCTGGATTCCTCTTGTAATTGTATTGTCGATTCTCGCAATTGT
TTCTTGTAATTGTGGTCTGATTTACGCCATTCGGTGACGTAGTAAACGAACTTCTAGCTT
CTTAAAAAAGCACTTCCGGAATAAGTGAGGACTAATGGATGAGTAGTTTGTTATTGTTCG
AGTACCTGAGTAAGACATTCTGGGTAAAAGGTCCAGTAAACAACCAGTTCAGCGGGTGAC
CTGTGGGAGCGAAATCTCTTCAAAGATTTGAAGAACGCTGCGGAGTGTATCATTAAAAAA
GGAGAGCCGGTGGCTTATGCTGCTCTTCCTAACAAGGTAAACCCCTGACACTCTACAAAC
AGGAAGCGTGGGACATTCAGGTTGTACAGTTCTAACCTGTTGGGGAGCTTCGCCCCTTTT
CATTGGAGATAAAATGAGTGAAAAGGAAGAGGATATTATCGCCTATGACCTATTTCGCCT
TTGCGTGCAAGTGTCAACGAGACCCGCTCCATCATTGTCAGAAACAAATTGACGGGAGAG
AAGAGGAAACTTTGGAAGAATCGGACGACTTGGCGGGAGAATAACAAAAGACGAAGAGGG
ATTCAACGCGAAGACAACTTCGAAATTGAGGACCATCAAGACCCCAAGCACGTGTCCTAC
GGTATCTCTGTTGTTAAAGACCATGATATCGACCGAATCTGCCGCCAAGCTGGGTGCAAG
CAGTTCAAAGAATTCTCCTGTCCGGCCTGACAACTTCCAAGGGACTCCATTCCCTCCCGA
AAGAGTACGAGGAGATTAAGGGTAAAAAAGACCTTCACTCGTGGCGGCAGGTACAAGGGT
GGTAAGCGCGGGCAGTGATTTCATGCTCTTCAGCTAGGTCAGCTAAGGCAGTATATGGAT
CGAAGCGTATGACACCATCATCCATCCCGGAGAAGCGGACGACTTGGATGGCCGAAATGA
TAAAAGCAAAGAATGCGTAAGCTACCCAGAGGGGAGACTACTCAGCGCGTGATCGGGGCT
ACCATCGATAAAGACGCAGACGGCACCTAGGGGATGGCTTTGTAACTACGAACGTGAGCC
TGTTCAAGTCAAGTTCATTTCAGGCCTAGGGATCGCTCTACAGACCTCTATAAGGGCAAG
GTGAGAGGCGAGGGACGTAAGTTCTTCTACTTCCAGAGTTGCCAAGTTCGGTTTAATCCT
GTTGACTGCTACAGACCCAAGCCGACCTGTGCGTAGGAAAGACTTTGGAGAAGTGGCGGC
ATGGCCAACGTCATCATCCCTGCACAACGGACAAGGAGTGCTGGCAAGCAATCTACGACA
CCTAAATCGTGGTATCCTTGAGCCTGTCACTACACAGCATGGGGACGACACAGAGCACAC
CAAAGATGCAATCGATCATGCAAATGTATTGTGACTGTGCTCACATGCAACGCTGGGCAG
GAGACAGAGCGTGGACTGTAGGGCGGTGATGGGGAACCTGGGGTGTAGACCTCTTGTGGG
GACGGCAGAGAATGAGCGTAAGGCCTCGCCCCTTGGGAAGACTTCCCCGGCATTCTGGGA
GACTGAAGCTGCGTTCTTGAAAGCACAGAGGAGGCATTCGCCGCTATCTCTGGTCTAAGA
AACCCAGTCAAGCTTGAGTTTGCTAAACTCGAAGGATTAGATGTAACTAACCCCAGCGAA
AAGAGCAAGCTCAGGAATCCCACTGTATGGGGCTATGTGAGCAGTGTGGAAAGCGAAACC
TCAAGCTAACGTCGAGATTGGACCACAAGACAGGGGAATTCTCCCTGAAGCGAGGGAGGA
CATCCAATCGTTCGTGGAAGGTGTCAGTTTGTCCGCATGAGGATTTTCAGTGCTGTGCAA
AACCGCTATGAGATCAAGACATGCCGAGCGCTACGGGCTGGACCCCGAGGAAGCAGAGAT
ATCGTAAAAGCAGGCTATTGCAATCCAGAAGCAAAAGGGATATGATAAGGTCTTTGCAGG
AAGTGGGAATCAAACCCGCATCCGCAGAGCTTTAGAAAAGCATGGTGATCATCGAAGCTC
ATCTTAAATCAAAGAAGGAGGGTATATGAGAGAGAAGTTTCTAAAATCATGCGCAAGCTG
CCCATCAGGTGGCCTTTGTCTTCTGGCTTGATTACCTGTTCTTCTTGGCTCCGGTTGTAG
CAGCATTAATTGCCGGAGTTAGACTTTTGTACCGCAAAGGAGCAGCTTGGAAGAGGGCAA
TTTGTTCTGTTCACGCCACTCAGGGCGCGATTCAAGCTGCATTAAAACGGGGAAGGAGCT
GGAGTTATGACCAATCTAGCTACATATGTTATCCGCCACAAAAGACTAAAGAGCTTTGAC
TAATTCTAGCGGGGAAACGTCAATGGACCACGAAAAGGAGGAGCGGCCCAGTTTGAGGAA
CGCATATGATAGTACCACACTGGGAGCGTACTATTAAAAAAAAAGAGATATGGAAAGTGG
CCCGACCTGAACATCTTTGATTGTAGAGAGACGGGCATCCATCGTCTGGCTAGCTGGGAA
GCAGCATCTTTTAAAAATCAATCTGTTTTGAGATTGTTGATATTGCTGAATCCTTGAAGC
ACGAAAGCCAGTTGGCGCTCGACCTACTGAAAGATGTTATTAGTTCGAAGTGCCAGATCA
CCCGGAGACGGATACGTCCGACTCACCATTAAAACGTCCACATACGACGACATCAAACTA
CTGAAGGAGGCAAAATGAGCATGACTGACCCCTCGACAGTATTTCATCAAACAGAGCTGG
AGGAAGCAACGAAGCTTCTAGAAAGAGCCCTCAACCTTCTAGATAATGTCCATTGCTACG
ATACAGATGTATGAGGACATTGCAGCAATTCTCTACGGTCAAGCATGAGGAATAATAAGG
TGCAGCGATATTAGTAAACTAGCAGAACTTCGGGACTTGATCGAAGCTGTTCTCTATTCG
ACGAGGCTCCTTGGTTATGATGCAGAAAAACGGACTATATGGATACGGACTTGTACAAAC
GTATCGATGCATTTTGTATTATCAACCAAGGAGGCGAGTGGAGGAAGTAGAATGAGCAGC
AAGAAAACACTTTGTAATCTCTGACAATGCAAAACCGGGTATCAGTCTGGATTACATGGA
AGCCATCGAAAATATAAGTCAGGAAGTAAAACGTCCCGATGTTGTGATTCACATCGGGGA
CCATTTTTGACCTAGCTACCTGTCATCCCACGATAAGGTAGCGCCCTCTGAGGGCCGTAG
GATAGCCGAAGACGTTCAAGTCGGACGTGAGGGTCTGATCGGTTGTTTAAGCCTGTGGGA
GCTACAGGAGCGTCAATCGGGCTAATCGGAAGAAGGTGTACCAACCTCGGTTGATTTTCA
CACTGGGCAACCACGAAGAAAGCGGGCTGATCGAGCAGCGAACGATAACCCCATATTGTG
TATGGCACCGTGGGTAGCGATGAGCTAGGGATCTGTGGACTACGGTTTTGGCGGTTGGTC
CCGTTCCTCGCTTCATTAAAGTAGATGGCATCTACTACGTCCACCATCTTCAAAACCACT
CTCCCCACTGGCAAGCCTCTAGGTGGTACAGCGAACACGCTCAAGGCTGCTGGTCATTCG
TTTCCAGTCATGGGCCACCGTCAGCTTCTTGACTGGGCAATCCATCCGACAATCGACGGT
AAACAAAGGCTTAAGACAGATTGAGCGTGCTATCCTCACGACGAGGCTTACAAAGGCTAT
CAGGGCAACAACAATCACTTCCAAGAAAGCCATGATTCACGAAGTGAAGGATGGTTTTGG
CCCGCTGACGCCAGTGAGTCTAGACTTTATGATGGAGAAAGGAGGTTTCAAACGACAGTT
TATAAGTTCTGGTGAATGGGACATCGGTATCAATGAATGTTCGTGGCGAGACCACCACGA
TGGAAGAAGATGTAGCTAAAGCCTTGTCAGACTGGTGGATTGAGGATACCATTGAGGAAC
TAGGAGGGCGCAGGCCTGCTCGGCTCGACTCTGTTAAAGTGATTGGTTAATAGGATGGGC
ATATTGAGTTTTTCCTTTGGGCGGCCCCTTGCAGGCCTTTGTTCTTTATGTTTAGTATCA
CTCGCGAGCTTTACCGCCGAAGATATCGAGAAAGCACTTCAACATGCGAGAATAACGAAG
GCGTCAAGCATTCTTTCGAGTTGACTTTCGGAGACGGTGCGCGACACTGCAACAGCGGCG
CTGATAAAATCGACCGTAAATCTAAATAATCGAAAAGGAGATATAAAATGACCTATTTCT
GGGCCCACCCCTGAGCAAATGGAAGGCGAAATGGGTATGTGAACCCGGAGCAGCGTACTC
TGGTAGAGAAAGCCTGCACCGACCGTAAATCTTGAAGATTCCATCGCACCGAGGACGGTG
AACTGGACTATGGCATGCTTGCACGACAATATCTGCACCAGCTTGGGTGATCTGCCTCTG
GTAAATGTGGCCCTGACTTCCTGAAGCTGATGGATTTTGTTGCTGCTATGCTGGAGACCA
AAGACGATCTCCCGGATTCCCCGCACATGAACCTGTCCTTCGGCCCTGGACTGCACTGCA
ATCGATTAGCGACGAGAAGTACCAAGTGGCCGAAGAGATTGTAAAAGAAGACCCGACCAT
GACGATTCATGAGTTGACTCAGCAGGGCTAGATACCCCATGGCCTTCCTAGAGTCAGTTT
GGGTATCCATAATTGAAGGGATATGTCACTATGAGAGCGATGTGCCAAGATCGGCAGCCC
GGACGGGTTTCAAGAGTTGAAAGATATGGAGGAACTGGCAACGATATCATCGACGTTCAT
GCTGGGCAACCGATTTCTGGTAACGGTCGCAACCTTTATCATTATCAATAATATTGGGAC
GCTGATACCATCCCTCACGGCACAGTTCTCGGCTTGTTACTGAGAAAAGTGCGATATCCA
AAGGAGAGTTGGTCGTAAGGCTGGCGAGTGGTGCAGATGACGAGCACTCTGTTAAGGTAT
GTAGATTCTCTGATTTCTTCCTCCTGGGAGAGGTTATAACCCAGCCAGTCTCGGCGACGT
TGAACAAGCGTATGATGTTCTCTGTTCGAAGACCCTCCGGCGACGGCCCTTTGGTGAATC
TGGATTGGCTCTCCTTTAATAAACAGTGAGCGCTACTAATGGACTTTTCTGATTGCTGGC
GACCCCGCGCGATGCCACTATTCAACATGGCTGTTCTTAAAATGTTCTGTCGCCTTTACA
CTGCCGGACGATGAGGAACTTTCAGCTATGTCTGGGAATCCTTGAGGCAGGAGCACAAAG
AAGTTATCGAATCCATGCAGTGACGAGGCTTTAGCCAGAGGCTGACAGGACTCCACCGAA
GAGCTTGTTGCACTGGGTAAGAAGGTTGTGTTCAACCCTAGAAGATTACCTAGGCAAAGA
AAACTATGCCACATTGCTACGGCCAACCACAAGGAGGCTGTAGGTAGCGGAGGCTCCTAG
TTACTACACTGTCAAGGTGAACAACCCCACTACGAAGGCTAACATGCCGTATTTTGCAGA
GTGCAACGATATCATCGAAGGCTGATATGCGATTCAGGCAACATGTTCAAAGCGTTGTGG
TAATAGTGGCAGCACAGAACCCAGTATTGAAGGCCGGTAACGATGCCATCCGGGACCACG
AGAAGTCATCTCTTCGCTCAGTTGGAGATCGATAGATTTCAGAGAAAGGGGTTGACATTC
TCCCGAGGCTTGCGACAATAGGCCCGTTGAAACTAGCTGAGGTGTAGATATGATACGGCG
AAAGAAACAGAAGTTCTTTACGGTGCATCCTATCCTCGCTAGCGAGATCGTCTGGCCTCA
CCTCGCAATGCTTCAGTAAAACAAGGGAGCCGGCCCCTTATTGTATCAAAGATTTAATAA
GGAGAGCTTGGCAATTTTAAAAGTGATTCAACACAGTTCTCGGATCGGCTCTTAGGTACG
AAGAATCACAGATTCATCACTACATTCGAACTGGAGTATCCCCGGTTTATTCACAGTGAA
CTTATGACTCACCGACTTTAGTCGAAATGTTGCAGTATCGTGCCATCTCTGCTGCCCATA
TGATCCGACAGGTGGAAGAGAATCCCGCGATGCCCGTCCACCGGAATGAATCAACCGCGT
AAGCTGAGTTCGAACTGATGGCAGTGTTTGCAGCGTAGCTCAAAGTACCGTGAAGATACG
CTTCGCAAAGAGTGCGGCTCTGATCGCTGGGCGCAATTCCAGTAGACTCCAATAAGCAGG
TTAACCGTCTCCTTTGATTTCTTCGGCCTCCAGATGATGAAGACCGTTGTTACAGCCACG
GAACTAATAGATAACTTTCTTCTACCTGCGTTGCTACAAAGACGCACAAACTGGAGATCA
AGGTTCCCGCTGAGAAAATGTATGAGGTTCTTATTAAAGCGGGCCTCATAGAGGCTCTAT
ATGACGGAGATACGTTCCTTATAAAATCGGTTCCGCATTAGGATGGTAAGCTGCGTTTAC
GCAGGATTGGTAACGGGCAAGAACTGAGCGTAGAGGATGCTTATTACAGGTCTTGCTAGC
TGCTGTGCTCAGGTTAGTTAGCAGGAAGAACGACGACTCTGGAGAAAGTCTTTTAATCTA
CAAAACCGATTGGTATTATCAGCTCGTCTACCGGGTTCGAACAGGCAACAATCACGGATG
CTCCGCATCTCGACAAATCAAACGGATGCGGGAGATGGTGACGCACTTGAATCAATATGG
TGACCTTCTGGTCTGGTAACTTCCGAGGTTTCCATCCAACATCGTCAACTAATTCAGCGG
CACGTATAATGATACTACGGCCAAGAAGAGGAAGGAGTTTAAAATGGCAGAATATATCCT
GAGTCTGGAAGACCTCATGCTGGTCGATGGCTTCAAAGAGGCATTCCAGGAGTAATAATG
AGAAGGTAGTGAGGGAGCATCTAGACCAACGGCTGGATGTTAAACCACTCGTATGAAATG
GTTTTCTGTCAACATCGCACACTGATTGGCCGGATCGTAGAGGGTCTGGCTTGATCTCTG
GCTTTGAGCGGACAGATAGCAAGTGGTTGGAGCCTCGGTTGCGCCCCTCTGGAAGCCTTC
CATATTGCAGCGGTGATGATAGTAATCTACGGTTCACTCTTCAAGATGACCAGAGGGATC
GACAGAGGCAACGTTCCACAAATTAATGCAGCAGGAGTAGATATGGAAGCTGCCAGCGCT
CTCGCAGATGAGGCCGATATTTTCAAATAAGATCATTAAAATCAGGACTCCAATCGGAGT
CCTATGCCCGAAATATCCGTCATTGTCGAACTAGCAAAACCGTTAAACTCAGGAAGAGAA
GCGGTGGCCCCAGCGAAATGAAGGTGAGCTGGATAAGTTGAACCTGAAGTTTGAACCTCA
TCAGCTTCACGCTGTACATCGTCCTTCAACTGTTCCTCAAATACGAACTGATCGTAGGGA
GGAGTTTTACGGGTAGTGAAGTCCGAACGTCTCGCCCAGAGGTTAAACTAACGGCTTCGA
TCCTGCATGATGGAATTGGCAGTCCACGCTGAATCTTTACGCAACCAGATCAACGTAGTG
CTGGATGGATACAGATGTGAGGACTCATGTAGCTTACAAGGATTAACCGAGCTTATGGGT
CGAATACCGCCTGAGCCCTGTCCCCAGGCGATGAAGACGATGTTCTTCGTAATTATCTTC
AGCCTAACAGAGACTGCCCTTCTGTTCAGTTCTTTCACATCCGAAGACTTCCAGTGCAAC
GGGTATAACGATATCCCTGTGGTCATCGCACGCGGGCTAACCAGAGTGCTGTGGATGAAG
ACTTGCACGGTGTAGTTTCGCTGGACTATCAACCACATTTCACGCAGAGATTGGGAGCAT
TGTCTGAAGATACTCGGCGTGTCGAGAAGATTTCTCCGACAAGCTATCGACCATGTATAT
GCTCATGAATGTCGTATTGTCGATATGGCGATCCCGGGCGGAGAACTTAATGGGGAGTCG
GCTGAAAACTATAAAGCGTTTGTTCGTTATCGTTTGAATGTCTGGTGCCGAAGACTCGGC
CTAGAAGATCCACTTCTCAAAAAAACGATGACACTGATCAAGGATTGGTTCGAAATGAAC
ACTTATGCCTACAAGATGATCGACTTTCACTCCGGGTATGGGGCATGGAATACGAACCAG
GGTGGGATAAGAGAATTGGCAAAGGCTTGGGAAGAGGAGCTGAAATATGAGTAAGAGAGA
CACGTTCAACTATTCCGAAGCTAGAAGAACAGCCAAGCAACCGGCGAGACTCCTCTATGG
TATACGAGACGGCCGGCTACCAGCTGTTCATGAAGAAGCATTCGAACGAGGGCGAGCCCT
GTACGCCTCTGCTTCCAAGCTGTGTAGCTCGCGCCATGGCTCAGCACGCCTTCTGCGCGG
TGTATCCTGAGTGGTGGGAGGAGACGAATACACTAGAGGCAAGGACTGGGAACAGGTATT
CTTCGACGTTATGTGGGACGGTTTTGTAAGCCCATCCACCCGCTTCTGTCGAACGGTGGG
CCTGCAAGAAGGGCACTACGGTATCTTGTGCTGGCGGTCTGATGGACAACAACCTCTATG
ACCGTTAAGCAATGTAATGACAGAGATCGCAGGTGCGTTAACGAAGCACAGCCATGGCAA
TGCTTTAGCCTGGACCAACTGGCCATCAGAAGGAGACGCTTATCCGAGGCGGTGAGTCTC
TGAAGGTGTATTCATTGGCCCGGGACGTTATCAACGTCATGGAAGAGGTAGTAGCACAGG
GTTCTAGGCGTGGTAGCTGCATACAGCATCAACCCCGCCGGAGATCTCTTCTGGAACGTT
ATCGATCACCTGTATAAGCGCACAGAGTCGAACAACGTCGGATGGCTTCTTAGACGACCG
AACGGTAAGGATATGGCCGAGAAAGACCCGGAGACCTTGAAGCGATGTGGAAGGAATGAT
GTTCGTCAAGCTGGCCAGGAGGAAAAGGCTACTCACGTTTATCGATAAGATGAATCGGCA
CCTTTGCAGAGCCGTTTAAACGGGCGGGTCTACGCTGTGAAGGTCCAACCTTGTCAAGAG
ACTGTTCTCCCGGCAAATGACTGGTATACTTTTAGCTGGGTGTTATCCTGAACTACAACC
TCGAACTCTTTACCGTTCTTGGCCTAAGCACCTTGTGTTTATTGGTCAGGTTATGTCTGA
TTGCAACATCAGCGAATACCCAGCAACCATGGGATGAGTGCGTCAGCGTTCAGACCGCCG
AGCACCGGGAGAAGATTTTACCATCCACCATGACTTCAGGGCGCTTGGCAGCGGTGTTCT
AGGTTCCACACTTCTGCCAGCAGAGCGATTCTCGGTCTGGTAGTATGGATGCTGCGTTCC
TGAACAACGCCATCTTCAAGGGTATGAAGGATAAGCGAAGCCGTAACAGTTGCCAGCTGG
AGGTTCTAGGGGGAGCCAGAGGGCTGCCGTGGACTAGGGAAGCGTAATGCCACTACAATG
ATGATGCCGCCAACTAAATCGACGGCAGAACTCATGGCTAGCTTCTGAGGGCATAGACTG
ACGTTTCGCTATGTGCTTCACCAAGCAGAGCGCTGGAGGTGAATTCTTCCGTGTCAACAA
GGTGTTGCTGGAGATTATCCAAGAGCGAGGCCTCGATTGGGAAGAGGCAAGGCAGATTAA
CGAACGTAAAGGAGGTTCAGCACGTAGACTGGTTGACTGACCACGAAAAGGCTGTGTTCC
GTACCTCGCCTTTGAGGTGAGAATGGAAGACTACCTGCGTCTGTGCTCTCAGCGGCAGAA
GTACATCGACCGCTGTCAGAGCATCAACCTGTACTTCACGTCGAACGACTCGCCGGCTTA
CATTTCGTACATCCATCGTCTCGCCATGGAAGACCCGAACATCCTATCTTTGTACTACAT
CTACAGTATGAGAGGAGTGGAGATATCTCCAGAACAGAAGAATGTGAAATGTGCAAATCA
TTGGCCCGGGGCTTGACAGCTTTCCGGCCTTTGTGTATTCTGAGCACATCAAGGAGGACT
AAAATGAACAGCCCTCTGAAGTGTACTACACTTTGAGCGCAAAGCGTGCTTCCTCGTACA
AATAATATCTTGATAGATAATATGGGATGGACTGCCACAATCCGTCGAGACCACTGGCGG
GATCAACCCTGTATGGGTTGTGGAGTTCACGCGATGAACAGCAAACCCGCAAAGAGTTCG
ATAAATGGTGGGGACAGGACGAGTAAGAAGAACTTCGTAAACTCTGCGCCAAAGGATGGG
CGGAATATATCTGGATGGCTATCGAAGAAAAGTGAGTGTTGAGCTTCCCGCGCCAGAAGG
TGGATTTATCGACATCCAAAAGTACACAATCAGATCGCTGCAAAGAAGCTATCCGCGAAA
CAGGGACTGGAGGTGTTTTAATGAAAGAATATTTTAAAAAGCGACTAATGCAGACCAGTG
AACCGTTCGATTCAGCGACGCAAGCTATGGACGAAGCGATTGCGGGAGGGGCTATACCGC
GAATTCACTTGCGTAACTGTACCCGGGAGCACAATGACGTAGAGCCCGATAAACCGGTAT
TCAATGGACAGGCAACGAATCTTAGTTCCAAACTTCTTTGAGGAGTGGGTAGTATAATGG
AACAAACTATTGATGGGCCCGGTATATTGTGCTTGATAACGAAGGTCGGCACGTTCTGAC
CTTTGTGGCGAGAAGGCCGCCTATAACCCGCTTAGCGTTCAGTGCTGACAAGCATGGTCA
AATCCATGTAAATGGTGTCACAGGCGTTGAACTCGGAGTTCGTCAAGGATCGCTGAAGTA
TTCCTTGTATCCGGCTACATCATCCCAGAAGAGTAAATACATGCAAGTTATGACCGACGC
TTCAAGGCGAGTCGGTGAGTTAGAAAGAGGTAGCCGAACCCGCTAAGGTGGCTATCGCTA
TGTGATATGCGTGTCGTGAAACCCTACTGGAAGATATCCAATGGCGGTATCAAGACGAAG
CTATCTATACTCTACCGGCTACGTTTGCCCTTGTTGCGGGAATCTGCAAACTATGGGCAT
TTCCAAGGCAGCTTCGATAAGAGCCCCCGCCTACCAGCTTCAGTACCGAGCCGGAGTGAA
GCATACAGGCTTCCATGTTGTAGACTCCTCGCTAGGGCATTAACATGTGCTACGCCTGCG
GAGGTAAACTGTACGTCCGAGGAGTATGCACTATCTACTGCCCCTGACTGCGAGAAGGCA
GAGAAAGATAAACCGTTCGTCAGGATGCAGCTTCTACAGGATATCGCGACAGCAAGAGGG
TTGACAACGAATAGAAGTGCTAGTAAGATGGGTCAATATCAGACAGAGGAGGAGCCATGG
CTACAACAGAGAAGATCATCGAGTATGTCTCGGCCTGTATCGAACGCTTCAAAAGAGGAC
GTAACTGGGTACTGGAGAACTTCCGTGACAGGGCGTTATCTAATCGCACAGGGTATATTC
ACGGGCTTATCACTATGGCTGAAATGAATGAGCAGGTGAGTATCGAGGACCGCGACAAGC
TCCGTAAAAGTCGTGAAGCTGCTGAGGCTGTGTTGGAACGTACCTCGACTCCAAAATTAA
TCCAGGGAGGTGCTCTGATGAATAAGGAAAGAGATTGTGCAGGCTTTGATTGTCGCTGTC
GCTCTGACCTCGCAGCAATAGGTTTTGTAGTCGGGATTACTGGGTGTTGGCCAACAAGAG
CGCGCCCGCCGAGGATATTGTCGTGTCTACCGAAGACGGCACCATCAATCTCGGTCGCTC
CGTGAAGAGCGAGAAGCCGCTGTATAGCATGTGCATCAGGTAGAAGACCGCAAACCTGCT
GTGAATTCACCACCAAGGACCGTGTTCTTAGCGAAGTGAAACAGGTTATGCGCCCGGGCG
AGGCTACGGCCCGCGATATTAAGATTGGTAAACGCGGCTGTGACGTATAAATTGGTGAGA
ACGGGCAGGAAGCAACTTTACTACCCCGAAAGGTAAGTATCTCCCGGTTGGCACCCCGTC
TGAAGTACATATTCAGGTATTATTGCGAATCTGTTCGACATGTGTACAATGACTGGCCAA
ACAAAACTTCGTGCTAAAGATGTGAGGAGGACTCATGAGCACAGCCTAAGAAGTAGAAAC
CGTCCGACAAGCCCCAAGGCAGGTGATGTTGTTCTCGACTGCGATCTGATCGGTAAAACC
TTACGATAGATATCCCACGGCAGGCTGGAAGCGATTCCTCCGCAACATGTACGACAAGAC
TAAGACCGTCACCGTCAGCATGGAGTGGTGAAATGGCAAGAACCGTCAGCGCGTAAACTT
CCTACCTGTCAAATTCGGACGGTCGAGTAATCGTCCGATTCGCAAGAAGAGTATTAGGCT
GGCTTGGGGAAACAGGGTAAGAAGTGGCATTACCACCTACGGATGCGAAGGCAAGATTTC
AAATCAGAGGGTTTAAGACACCTCGCCGAGATCAAGGCTTGATTCTCCGGTCCGCAAGCC
TGAGATTACCAATTAGCCGACGAATGGCAATGGTATGTAGGAAATTCACCAATATAAGGA
AAACTAGCAATGACTAGCCGCTGGAAAGAGGCCGTATCGTAAGTACTGGTGCGTCGTTCG
CGCAGGAACTCGAAGAGTTCAAGAAGCTAGACGCTTTGCACCAAATCAACGCATCCGTGC
ATGGTTTGATGCTCATATCGACTTCTAGAACGCCACTTGGCTATTCGGAGAGTCCGGCCA
AGCTCACCCAGACGACCTTTGGTAATTAGGTAATTAGGTGTGCGTTGTAGGTAGAGATTC
AAATCATGGTTATGGCGGGGACGTTAATATCTCTCAGCCCGCCCGCAAGCGCAAGCCTTT
GCCTGAAATTTGTGGTTGACAAGGTTGGCCGGAATATAAACTTACGGCATCCAACATCAT
GAGGAGGGAAGAAAATGCATTCAATATATCGAAGCAACTATGGGTAGCTGCGCGAGTTGA
AGGGCGACTATAAAGGGACGCTTTTGGCATACATGTCTCAAGTGGACTTCAATAAAGATG
AAGCATGCCAGCTTCAAGAAAAAAGCAGCAGACTGGTATGAGCTGGGCAGGTAAGAATGC
CGAGACTTGCTCATAGACAACATCCCTATCTCGGGGCATTCATCGGGGACAGTAAGTTGG
AACGCTGGGTCACTGAGAACAAATATTTCCGTGTGACGACCCTAGGGGCTTTGTTCTAGA
GGTTCCTACCGAATATCTCGACCTTGCTCTACAACCGCACAGTAATCAAGGGAGTTATTC
AAGAGCCTTGCGTGTGGGTTCGATGGGCTCTCAGCACGTTCTACTGCCGGAAGGCTCCTC
TCACAAAGAAGCTTTTCGTAAGTTTCTGTAGAGCGAAAGAGGCGGCCAAAACTGTTAAAG
ATATGGTTGCAGGATGCACCTTCTTAGCTATGGGACAACAGAGGAGCAAAACTAGTATTG
CCCACCTCGACAGGTGAAGATCACTTGCTAACTCCTAGCTAAAAGGGCCGGTACTCTAGC
CGAGGGTGGGCGCGGTCGGTGGGGTTACCACCATCTAGAGAGGGAAATCCTGTGGGATAG
AAAAAGAATCTCACTGGAGAAAGATTCGAAGTGGGTTAGTGTGTTCCGCTAAGCCGGTAG
GAAAGCGGTGGAGTATCCCTGATTTATCCCCAAGTTCCAAAGGCAACCGACATTCAATCT
GGAAGCGTCCCGGATGAACTTCAGAATCTCGACCTAGTGAATGGTGTAAAATGGAGTACA
ACGAGAAAGACGACCGGTCCCACCTCCTATTACCTGTGCCGGAGAGGGTAGTTAAGGTAT
TAGTGTAGATGATCCTCTATGATAATCTGCACAGCTCGGAGGTGCGGTGGACCCGCGGAA
TGGACCGTGGTCGGAGTAGAGTGGCGAAAATAAGCCACCATTATTTAGGAATCGTTCGGC
GAGTACGGGCTTTTCATGGCAGGTTATTTTCAAATTATTTTTTGTGATTTCGGGAGTTTC
GGCCAATATGGGCAATATGAAATTAGAAAGGCCTCAGAATGCTCGCATAAGAGCCGTTCG
AGTGTAGGTATGGTGAGCTACCACTTAGCCGTAGAAGGACAGTGTAACGCTTAATATATG
CTAAATGAAGATTGACAACGGTAGCGCGTATGCGTATTGGCTAGCGGATATGAAAGAGTT
TGTTTCTCAGATGGATGCCACAGAGATTGAGAAGAGTGGGCTTGCATAGCATACCTCTAA
TTAGCTGGTATCAGCGAAGAAAGCAATTCGCACAGAATTAAACGGAGGAATACGAGGCGA
TCTAAGCCAGGGACCGACAGATTTTAGGGACTGGATACCACAGGCTGCAAAATTAGAACT
GGGCAGATTTTTGTGGAACTGGACAGTTTTTTCACAGAAGTACAGAGGAATTTCCCGAAA
TTTAGCCGGATTTCAGAAGGGCGGATCGTTAGCAGGCTATTTCTCCACTGGTTAGCACCT
TTAATCGTTAGCACACCAACTAAAAATTCTAGGACGGACCCTCAGCTGGCACGAACGTTG
CAAGCCCGCACCAGTTTCCCGGCAGGCGTAGCCCCGACTACCCGTCGTGCCAAGTGATAT
GTAGTTGGGGACTCGCACCCCGCGTTTAAGATGCGCCCATTCTCTACCATGACAAACCCC
TTTGTCAACATAATTTTGGCGGCACGTCTTTGCAATTGCATTAGCGTGCCAATTCCAAAC
TTCAGTTCCCTCGGTGTTTATCTCCGGTGCTCGGCCTCCGCCTGTGTTGCCCGCCCGCCT
GTCATCATTACAATAATAAGCCATCACAAGCAAGAAAATTATAGAGAAAATCTACATAAA
ACAGGTTGACAGGCCTTTATATATGCACACGACCACATTCAACGGAACGGCAGGTGTTGC
GCCATGCTACATAGTGAAGCCTCGGGCGATGGTGGCCCCACAAGAGATGGACAAGTGGGA
GCCTCCTCGAATAAGGTTGCACCAGTTTCAACGCAGGATGAAACGACGCGAAATGCTGTA
ATCGCCGCTAAAAGCTCATATAGAGCTAGGTTACAGCTACGTATTCGCCAATGGAGTGCC
TGTGGTATAGATACCATCCGCCATGAAATAGCTCACGCTAAGGCGGGACCGATCATGGTC
ATGATTCCGTATGGAAAGAGTGGTGCGGATTGATTGGCGCTAAACCCGAGCAGTACGCCA
CAATAAAAGGAAAAGTAGTCGTCTAATTGCGGCGACTGGCCATCCACTTGGGTGGCGGCC
GCTTGAACTCACTCAACCATTACGGTTTCAGACGGACTAGCATGGCGAGAAAACAGTGCC
GAGGACGGCCTGAAACGTTGGCAGGTTAATTTGGGTGAAGAACGAAAATAAGGTTGACAC
AGCTTGGGCCATCATGTAGAATGGCCCCGCTAAAAGGGAATCACCCTGAGCACCCACGCA
GGAAAGCAGATATGAAAGCTCTTGTAATCATCGGGCACTCTACGCGGCTTTGGCTAATCG
TATGTATTTGATCGTATTGCGGTAGATTTGAACCGCTACTTCCCTATCGAGAAAGCGAAT
GGGAAGACGGCGTATACATGTATCGTCGCCGCACCTATCTGGTGAAGCATTCGAAGGGCG
CTGTTCCGTTGGCACAGCCTTTACCGCAATGGGACCGTCCAGTGTCGGGTTATCTTTTGA
TCGAAATCATCGAACCTTTCCGCACAGCATAAGGGAGAGATTCAGAAATGCAAGCTTGGA
ACGTATACCAGAATGGCCAGTTGATCGATACCGTTTCTTCGATATCATGTGTGCTGCCGA
AGAGGTGCGGAAATCGTTGGCCAACCATGACGGGTATCCGTCTGATATCACCGTAGAGGA
GGCCGAGTAATGGATAACCTGTCCGTTAAAATCGTTCTGTCGGAACTCAGCTACGTTTTG
ATTCAAGCCTGCCTTGCTTGGCCGAACGCTCGACCTAGACGAGGGTTGGACGATATAATT
TAATCTTATTGCGGATGAGATCGCTTTCCGCGACGGCCTGCCGCCTTTCGCAGACGACTG
CGATAAACAGAATGGATGCTCCGTCGATGGGAATCGCTCCCGGTGGTATCGTGTACAATA
CTGGCAGGACGCACCGATTGTCGCTCCGGTCTATCGAAGTAAAACGGCATGAGGGGAAAC
TGATGACCGTCAGAGTAGGAGATATCGTGGCTATCCGGGGCGACATTCGAAAGCTCGACG
GAACATGCCAATACACGCCCGAACAATTGGTAGGTGGTAAATCTCGCTACGCCGGCATCG
GGAGAAATATGGACTGCCGAGTGAGTAAGATACAAGGTGATATGGCCAAGGTGGAGGGGC
TTGGCGCGGGATCGAATTCTATGTGCTCATTATTAGTGAAATATAAACGCTTGACAACCT
GGACCCAATTAGCTGCAAAATAGCACCCCAGACAACGAAGACGCCGATAGCGAGGAGAAA
GCAGATGCAATGTTTTTCAAACCCGTACCCAAGCTCCGTGCAATGGCCACCAATGGCCGC
AAAGTGGTAGACAACGGCGCTCGCTGAAAAGCGCTGGGCTGTCAAGCTGAACAAAAAAGG
ACTAAGTAATGGCTAAGTCTGTTAGCGTAGACCGCAGCAAGCGATCATTCTCGACGAAGC
GAAGGATGGGAGTTTCTTCTGTGGAGTTTATCAGGCGGACGGCACCGTTCGGAAATGACG
TGTAAACGTCAGATCAAGTCGGCGCATGCTAAACGGCCAGTTTGCTACCCGCAAAGCCCA
CCAGCGCCGGCAAGCCGCACCTGTATACCGCCGCCGAAGTGCTGAACATGGAAGAGGGTA
AATCCGCATTCCGCACCATCAACCTTGAGACCCCGATCCCCAGCAGTAAATGGAATCGAA
TATAATTGATTAAAAGTTTGATATTTCAGGCCACCATTCTGTAGAATGGCCATCAAGCAA
GAATGGCTTAAACAGAAAGGAGATTAAAATGGCACGTTCTATCAAGGCTTTCCGACTTCG
ATTCCGCTTACCAGTTCGAGGCCGCCAAACGTTCCGAACGTAAAGAATCCGCAATCGCAC
AGTCGCTAGCCGAGGCCGCGCTTTCGACTTCCGCGACGATAAAGGTTTGTGCCTAGCCGG
TGGGCCGATTCGCCGGCAATCCTAAGCCCATTGTCGATGGTTTTAGATTCAACCCCTGCA
GCGGAGATACCAAAATGGTTCGTCAATGCGTACCCCGTCCCGATGCTCGCCATGCTTGCC
TGCATGGTTGTTCGCCATGCCGGAGTTCGCCGGTCTGCCCGCTCAAGGACATAAAACTCT
TTAAGACTTCGGGACAGTGGTATGTTAGTTAGACGACAGCGGCTCCCGTCGGGTGCAGAC
CAGACTGAGGATGAATTCGCTGCCGGGACAAGATAGACCCCTACCTTAGCAAGCTTGGCG
AAGTCGATAAGCTAGAGGGCCAATTGCGACGGGTCAAGGATGCAACGGACCCGGATGAAT
ACAACGAAATGGCAAGAGTGCTGAAAGCTCGACGCCGGAAAATAATGCGGCAGAGGGCCC
GGGCCTACGGTCTACCAGAGGAAGAGCCTACCAACGTCAAGGCTACGTCCCGGCAGAAGA
TTACCGCAGGGTGATGAGGCTGAAATGGGTCGAGCCTCCGGATGTTCTGGGCAGTCCTAT
CTTTTCGTCATTTTCGTATGGTTCATCTCAAAAACAGTTGACACGCCACAGTTACTGTAG
AATGGGCGGCACGAGGGATAAGCCCGACTGAAAAGGAACAACGATATAACTGTTCGCGTG
CGTTCTCCATTGAAAACTGGCGATCATCGAAAAAGCTGGCGGAGTGGTCTATACCGCCGG
CTGCCTCTGGCTTCCTACTATGCGAAAGAAAAGATTGTCTAAGGCTTGACAAGTCTCGCG
TTATTTAAAACCAAGAATACATCCGCTCACCACTCACAAGGCGAACCAAAATGAATTTCC
ATCTTAACCTCGTCTCCCTATTCTAAAACTGGTCCGATCCTGTCAGCACGTCTCCACCGA
AGACACTTGTCGGACGCTTGCCGCTCAGGCTAAAAGGCTGCTATGCCTCTGCGATTCGGT
TAATCTCCATTGGAAAAATAAGCAATGGTGAACGTGGCGTAGAGTGGAAAGAGTTCCTTC
AGCAGGTGCGGTCCTCTCCCGTGAGTTTGTGGCGTCATAATCAAGCTGGCGATCTCGTAA
GGTCAGGATGACGGCGTTATCGATAGGATCGCCCTGATGGAACTGGTGAAGGCTAACAAA
GGTCGTGCGCGGCTTCACCTATACGCACTACCCGATGAACAATTTCATGAACCGCCAGCA
CGGCATTGTCGGCCAATCGTAGCAGCTTCACTATCAACCTGTCGGGCAACAATGTAGCGC
ACGCCGATGAACTGGCCGACCTGAACATCGCCCTGTAGTGACTATTCTCCCGATGGACGC
GGAGGAGAATGGCTTTACGCCGAAAAGGACGTAAAGTGGTAACTTGTCCGGCTGAAAGCG
ACAAGGTGAATTGTAAAGTCGTGCGGCTTGTGCCAGAAGTGGCCGACCGGGAGTATATTA
TCGGCCGGTAGCACGGCACAGCAAAAAGAAAACTGTCGATCTCGTACTTTAAGGGTTAAC
ACAATGGACGGGCATCTGTTTACGCACCATTCAATCGGTAGCAAGATGATGGGCCTAAGA
ACGAACGTGCGAATTTTGGCGACCAACGGATGCAAAGGCTGAGTCTTGTATCAGGATCAC
AGAACAGGCACAAGAATTGTCGTATATGACGCTCTAGGGGCGGGAGGGTATGTCAGGTCA
TGGTGCAAAGCGGATGGAGAAATTCACAAAGGAAACTCGCAAAGGCCAGCCAGGGCACCA
CGACAAGGCAGCTACAAGCTAACCGCGTGGGGGGTGAAATTGGTTTCCTCTCAGTACCAG
ACGACAGCAGGCTGCTTACAAAGGAGGCAACTGATGCGACAGCTTAATAAATCCCAGCTA
AAGGCCTTGGGGCCTAAGATCGACCTAATGTAGAGGCTAGCTTCTACTGGCCGAGGAACG
ATCTTATAGACGTAACCCACAGCTCTACCTGCTACATTACAAACAAAGCTGGACCTGGCA
TCTTGCCCGGATCAGCTATCGCAACTCCCGATTCGTTGCATATGGTTGCTGAAGTGTCCG
AGGTGACTGGGAATGTCATTGCAGCATGGGCGGAATGGAAAGGGGTCAACCGGGCCGCAA
TCAACGCTCTGAGTGGTATGGGTATCATCCCTGGCTGGGCATGGGCACAACGATGCTCTT
AAGACTCTGCGTGATATCGAGCGTTACCAGTGACGGCCTCTTACTCGACAGAGAAGCAGG
GCCAGGTGGAGCCATCATCCGTACTGAGCCCGGTTATAGAGGTGACCGGTACGTCTTTAA
ATTCTGTATCAATCAAACACTTGCAGCGCTCTTAAAACGGTAGCCAAAATTCCGGGCTTG
GCAAGCGCTTTAGGCTGGCCTACACACTGAAAGATGACAGAAAAATAAATGCTTGACAGC
CTAGGCCATTTCATCACCAATAGAATGGCCTCAACAAGACAAACCAACCATCAGGAGGCT
AGAAAAATGGAAGCTGTAGCTCCAGTTCAAAGTGAAGATTACGCAAGCGGTGATATACAC
CGCCGCCGTTACAAAGACGTTTGCAGCGCATACGTAGTGAAGCGTTTTCGGAACTAGCCT
GGAGCGAGCTATTGCAACTCCATTATGGGGACCGTTCGAGGATAAAATCTGCAATCGATG
ATGCCGCTAAGTCTGCTATCTAACTGAAAAAAGAACCTGAGGGTAATCTCCGCTATCCTG
TATGAAGGACCAGTTGGTCTAGCTATCAGCCGCATTCGTTTATGTGTGCTTGTGTTATAG
AATGGACTTAGGCGGGACCAACGGTCTGTAGTTATGAAAATTTATCAGGAATTGCTCAAC
CCCGAAGAACAGGACGAATGCTTCCCCACGTTACGCCAAGCTCAGGGCAGAGCTTCCGGG
GTTTATCATAAGGAGGCGTGGGATCCCAGGAAGGTGGGATTTCTTCATTTCCCCATCGGC
CTATTATGCCGAGGTAATATGGTGGAAACTGTCATTGCACAACTAGAGGAACAGGGCAAT
GACTCCAAGCTAACTGGAGCAAAGGCGTCCGGGTTGTCGGCGGAAAGCAGAGTGGGTGAA
TCACACTATTTACCACGAT

[0134] In another aspect, the invention provides an SFA1-1 bacteriophage targeting a Shigella spp. Bacteria. In certain embodiments, SFA1-1 binds a molecule of OmpA. In certain embodiments, the SFA1-1 bacteriophage has a genome comprising a nucleic acid sequence comprising SEQ ID NO: 6.

SFA1-1
(SEQ ID NO: 6)
GTACTATATCAATATCAACTACTGATACAGAAAACAACTTGGAGAATAAAATGGAAAACT
TAATTATCATCGAGCAATCTTTCAACGATTATGGTATGGCTTACGGTTATCGTGCGATAA
TGGAAGATTCTCGTGGATGTGTTATCGATATTGCTGAATGTAAAGATTTACTGCAGCTTT
TGAAGATTGTTCGTAAAAATTGGGATTGTGAAAATATTAAAGTTCGAGTTGTTACAGAAG
AAGAAACTGTTTTTCATGATGTAAAATTCGCCAAAGGTGCTGCTACTCTTCTGAAACGTA
TCGCTCCACTGTTCAATTAATGAGGAAATTGTAATGAAACGTAAAATTGTTCAGAATTGC
ACTAATGACGAATTTGAAGATGTATTATTTGATCCAAATTTGGTAGTAGTTCAAAAGGAA
CATACTAGCAAGTTTACTCACTTAACTTCGGTTTATGTGTATGAGAAAGTCGGTGATAAA
CAGCCAATTTACGGTGTATTTCGTGAAATTACTGAAGACGGCACAACTTACTGGAAGGAA
ATTTATTAATGGCTATTAAATTTGAAGTTAATAAATGGTATCAATTTAAAAATAAATAAG
CTCAAGAAAATTTTATTAAAGACCATACTGATAACGGAATCTATGCGCGACGTTTAGGTA
TGTATCCTTTTAAAATTTTAGATGTGGATGCTCTTGGGCGTCCTATTAAAATTTTGTCAT
CTACTGGAAATTTAGTACTATCTTCTGGTAAAGATGTTTTGGATGAAGACTTTATTTGGC
TTTCAAAAAGTGAAGCTGGGTTCTTTGATGAAGTGGAAAATCCATATCAGGCAGCTGAAG
AGCAAGAGCAGGAAGAGCAAGAACAAATAGAAGATTTCACAGAATTCCCGGTAATGAAAG
TTACTATTGAAAATGATGAACAGGCATGGTCCTTGTATCAGATGTTGAAAGCTCACTTTA
AGGAATAATTATGCCGCTTTATGATTATAAATGTCAATCCAAAGACTGCACAAAAGAATA
CGAAAAAATCAAGAAAATTTCTGAAAGGGATACTGATGTATGTCCTGATTGTCATCGGAT
TGCTATTCGGTTAGTTTCCGCTCCTAAGCATGTGAATGGTGGTTTTTACGACTTACTTAA
AGGGTGATTATGTTTAAAATCGGTAAGAAATATCGTATTCGCGAAGGTGAAGAACAGAAA
TTTCTACTTTCTGCTAGTAATAGGAATAGTTCTATTAATGTTGTAATATTGACAAACGAA
TTTATCGTTGAAGATATGAAAGGTCATAATGTTACAATGATTGGTACAGCATCTGGAAAT
GCTGGAAAAACTCTTCATAGTCTGCAAAGTAGTGTTCTAATTTATGATGAAGAATTTGAC
TTTTTCGAAGAAGTCACAGAAGATTTTGATTTTGAATGCACTATTACTATGAAATCTGGC
GACCCTCTTTCCTTTACAGTTAAAGATGAAAGAAGCCGCTTGAGAGTTATTAGTCTTCTT
CAAGCCATTAAATTTGAGTGAAATTATGAAATATGTTAATCGTTCTATCGCAGCATTAGT
ATTAGCAGTGTCTTTAATAGGATGTACTGATGCTGATAATGCAACCAAAGTTTTGTCTTC
AAGTGGTTTTACTAATATTGAAATCACTGGATATAATTGGTTCGGTTGCTCTGAAAATGA
TTTCCAGCATACTGGATTTCGTGCTATTGGACCTACTGGGCAGAAAGTAGAAGGAACAGT
ATGTTCTGGACTATTCTTCAAGGATTCGACTATTCGTTTTAAATAAAAGGCCTTCGGGCC
TTTAGCTTTATGATTACCGGAGTATAATATTCCCGAAACCAAACGAGGATAAGTGATGAT
TAAGAATGAAATTAAAATTCTGAGCGATATTGAACATATCAAAAAGCGTAGCGGCATGTA
TATTGGCTCTTCTGCTAATGAAATGCATGAGCGCTTTCTGTTTGGTAAATGGGAAAGTGT
TCAGTATGTACCTGGTCTTGTTAAGCTTATTGATGAAATTATCGATAACTCAGTAGATGA
AGGTATTCGTACTAAGTTTAAATTCGCAAATAAAATTAATGTTACTATTAAAAACAATCA
AGTAACAGTTGAAGATAACGGTCGCGGTATTCCACAAGCGATGGTCAAAACACCTACTGG
TGAAGAAATTCCTGGTCCTGTTGCTGCCTGGACTATTCCAAAAGCAGGTGGTAACTTCGG
TGATGATAAAGAACGCGTCACTGGCGGTATGAATGGTGTTGGTTCTAGTTTGACAAACAT
TTTTTCTGTGATGTTTGTCGGTGAAACTGGTGATGGTCAAAATAATATTGTAGTTCGTTG
TTCAAATGGCATGGAAAATAAATCATGGGAAACTATTCCTGGAAAATGGAAAGGAACTCG
TGTTACTTTCATTCCTGATTTTATGTCATTTGAAACTAATGAGCTGTCCCAAGTTTATCT
TGACATTACACTAGATCGTCTCCAGACACTTGCAGTAGTTTATCCTGATATTCAATTTAC
CTTTAATGGTAAAAAGGTTCAGGGCAATTTTAAGAAATATGCACGCCAATATGATGAGCA
TGCTATCGTTCAAGAACAAGAAAATTGCTCTATTGCGGTTGGTCGTTCACCGGATGGTTT
TCGTCAATTAACTTATGTGAATAACATTCACACTAAGAATGGTGGCCATCACATTGACTG
TGTTATGGATGATATTTGTGAAGACCTTATTCCACAAATCAAACGTAAGTTCAAAATTGA
TGTGACTAAAGCACGCGTTAAAGAATGTTTGACTATCGTTATGTTTGTCCGTGATATGAA
AAACATGCGATTTGATTCTCAAACTAAAGAGCGTTTGACTTCTCCATTTGGTGAAATCCG
TAGTCATATTCAACTTGATGCTAAAAAGATTTCACGTGCTATTCTAAATAATGAAGCAAT
TCTAATGCCGATTATTGAAGCTGCTTTGGCTCGTAAATTGGCAGCAGAAAAAGCAGCTGA
AACTAAAGCAGCTAAAAAGGCTTCTAAAGCTAAGGTTCATAAACATATTAAAGCGAATCT
TTGCGGTAAAGATGCTGACACTACATTGTTCTTGACTGAGGGTGATTCAGCTATCGGATA
TCTTATTGATGTTCGCGATAAAGAACTTCATGGTGGTTATCCATTGCGCGGTAAAGTTCT
TAATAGCTGGGGTATGTCATATGCTGATATGCTTAAAAACAAAGAACTATTTGATATTTG
CGCAATCACTGGATTAGTTCTCGGTGAAAAAGCTGAAAACTTGAATTATCATAATATTGC
TATTATGACTGATGCTGACCATGATGGTTTAGGAAGCATTTATCCTTCTCTGCTCGGATT
TTTTAGTAATTGGCCAGAATTGTTTGAGCAAGGACGAATTCGCTTTGTCAAAACTCCTGT
AATCATCGCACAGATTGGTAAAAAACAAGAATGGTTTTATACAGTCGCTGAATATGAGAG
TGCTAAAGATGCTCTACCTAAACATAGCATCCGTTATATTAAAGGACTTGGCTCTTTGGA
AAAATCTGAATATCGTGAGATGATTCAAAATCCAGTATATGATGTTGTTAAACTTCCTGA
GAACTGGAAAGAGCTTTTTGAAATGCTCATGGGAGATAATGCTGACCTTCGTAAAGAATG
GATGAGCCAGTAGTTTACTTTACCACAAGGATGTGGTATAATTAATTGGGCAAATGAGGA
TATTGAAATGAAATCATATAAAGTAAATTTAGAACTTTTTGATAAAGCAGTTCATCGAGA
ATATAGAATCATTCAACGCTTTTTCGATATGGGAGAAGCCGAAGAATTTAAAAACCGCTT
TAAAGATATTAGAGATAAAATTCAATCCGACACTGCAACTAAAGATGAATTACTAGAAGT
TGCTGAAGTTATTAAGCGTAATATGAATTAATGAGGAAATTATGATTATCACCACTGAAA
AAGAAACAATTCTTGGCAATGGTTCTAAATCAAAAGCATTTAGCATCACAGCATCTCCTA
AAGTATTTAAAATTCTGTCATCTGATTTGTATACAAACAAGATTCGTGCAGTAGTCCGTG
AATTAATTACTAATATGATTGATGCCCATGCACTTAATGGAAATCCTGAAAAATTTATCA
TACAAGTTCCAGGACGATTAGATCCGCGATTTGTTTGTCGAGATTTTGGTCCGGGTATGA
GTGATTTTGATATTCAGGGTGATGATAATTCTCCTGGGTTATATAATTCATACTTCAGTT
CATCTAAGGCTGAATCTAATGACTTTATTGGCGGGTTTGGTTTAGGTTCTAAATCTCCGT
TTAGTTATACTGATACATTTAGTATTACTTCGTATCATAAAGGTGAAATTCGTGGTTATG
TAGCTTACATGGATGGTGATGGTCCACAGATTAAACCTACATTCGTAAAAGAAATGGGTC
CAGATGATAAAACTGGTATTGAAATCGTAGTTCCAGTTGAAGAAAAAGACTTTAGAAACT
TTGCTTATGAAGTTTCTTATATCATGCGACCATTCAAAGATTTGGCTATCATTAATGGTC
TTGACCGCGAAATTGATTATTTTCCGGATTTTGATGACTATTACGGTGTAAATCCAGAAA
GATACTGGCCTGATCGTGGTGGATTATATGCTATCTATGGCGGTATTGTTTATCCTATCG
ATGGTGTTATTAGAGACCGTAACTGGCTAAGCATTCGCAATGAAGTGAATTACATTAAGT
TTCCAATGGGTTCACTTGATATTGCTCCATCTCGCGAGGCTCTTTCACTGGATGATCGTA
CTCGTAAAAATATTATTGAACGAGTTAAAGAACTCAGTGAGAAAGCATTTAATGAAGATG
TAAAACGATTTAAAGAATCCACATCTCCCCGTCATACATATCGTGAATTGATGAAGATGG
GGTATTCTGCTCGAGATTATATGATTAGTAATTCAGTCAAATTCACGACTAAAAATCTGT
CATATAAAAAGATGCAGAGCATGTTTGAACCTGACAGTAAGTTATGCAATGCAGGAGTTG
TGTATGAAGTAAATCTTGACCCTCGACTGAAACGCATTAAGCAAAGTCATGAAACTTCAG
CCGTTGCATCAAGTTATCGTCTGTTTGGTATTAATACAACAAAAATTAATATCGTTATTG
ATAATATTAAAAATCGTGTTAATATTGTTCGTGGATTAGCACATGCGTTAGATGATAGTG
AATTTAATAACACTTTGAATATTCATCACAATGAGCGTCTTCTGTTTATTAATCCAGAAG
TAGAATCGCAGATTGATTTACTTCCTGATATTATGGCGATGTTTGAAAGTGATGAAGTTA
ACATTCATTATTTGTCAGAAATTGAAGCTTTAGTTAAAAGCTATATTCCAAAGGTAGTTA
AAAGTAAAGCTCCTCGTCCTAAAGCTGCTACAGCATTTAAGTTTGAAATTAAAGATGGGC
GATGGGAAAAAGAGGAACTGTTTACGCTCACATCAGAAGCAGATGAAATTACTGGTTATG
TAGCGTATATGCATCGTTCTGATATTTTCTCTATGGATGGTACTACATCTCTTTGTCATC
CATCTATGAATATTTTGATTCGTATGGCTAATCTTATTGGTATTAATGAATTTTATGTTA
TTCGTCCGCTTTTACAGAAAAAGGTAAAAGAACTCGGTCAGTGCCAATGTATTTTTGAAG
CTTTGCGTGATTTATATGTAGATGCTTTTGATGATGTAGATTATGATAAGTACGTAGGTT
ATTCAAGTTCAGCTAAACGATATATTGATAAAATTATCAAGTATCCTGAGCTAGATTTTA
TGATGAAGTACTTCAGTGTAGATGAAGTTTCTGAAGAATATACACGACTCGCTAATATGG
TTAGTTCATTACAGGGTGTATATTTCAACGGTGGAAAAGATACCATCGGTCATGACATCT
GGACAGTAACTAATCTTTTTGATGAATTATCACATAATGCTTCAAAAAACAGTGATAAAA
TGGTTGCTGAGTTTACCAAGAAATTCCGTATTGTTTCCGACTTCATCGGATATCGCAACT
CTTTAAGTGATGATGAAGTTTCTCAAATCGCTAAAACTATGAAGGCCCTTGCGGCCTAAT
AAGGAAAATTATGTACAATATTAAATGCCTGACCAAAAACGAACAAGCTGAAATTGTTAA
ACTGTATTCAAGTGGTAATTACACTCAGCAGGAATTAGCTTATTGGAAGGATGTATCGGT
TGACACAATCCGTCGTGTTTTGAAAAATGCTGAAGAAGCTAAACGCCCTAAAGTTACTAT
TAGCGGTGATATTACAGTTAAAGTTAATAGCGATGCAGTTATTGCTCCAGTTGCTAAATC
TGACATTATTTGGAATGCATCTAAAAAATTCATTTCAATTACTGTTGACGGTGTAACTTA
TAACGCAACTCCTAATACTCATTCAAACTTCCAGGAAATTCTTAATCTGCTTGTAGCGGA
TAAGCTGGAAGAAGCTGCGCAAAAAATTAACGTTCGTCGCGCTGTTGAAAAATATATTTC
CGGTGATGTTCGAATTGAAGGTGGAAGCCTGTTCTATCAAAATATTGAATTGCGGTCTGG
TTTGGTTGATCGTATTCTCGATTCGATGGAAAAAGGTGAAAACTTTGAATTTTATTTTCC
GTTCTTGGAAAATCTGTTGGAAAACCCAAGCCAAAAAGCGGTATCTCGACTCTTTGATTT
CTTGGTAGCAAACGATATTGAAATCACCGAAGATGGTTACTTCTATGCTTGGAAAGTAGT
TCGTGACAACTACTTTGACTGTCACTCAAACACCTTTGATAACAGTCCGGGTAAAGTAGT
TAAAATGCCACGTACTCGTGTGAATGACGATGATACACAAACTTGTTCTCGTGGTTTGCA
TGTGTGTTCTAAATCTTATATTCGTCACTTTGGCAGTTCAACTAGTCGAGTTGTAAAAGT
TAAAGTACATCCGCGTGATGTAGTATCAATTCCGATTGATTACAACGATGCTAAAATGCG
TACCTGCCAATACGAAGTAGTTGAAGACGTTACTGAACAATTTAAATAAGGGCTTCGGCC
CTTATCGCATTAAGGAAAATTATGTTAGGTTATCAAGCACGAGTAAAAGAAGAATACGAT
CAATTAATGCTCAAAATTAATGCACTGAGCAAATTTTTAGAAAGCACAAAGTTTCTAACG
GTTAGTGCAGTTGAGCAAGAATTACTGCTTTCACAGTTCATCTCAATGAAATCTTATGCT
GAATGTCTAGAGAAAAGAATTGCACAATTCAAATAAAATAAGGGCTTCGGCCCTTTTGTT
TTAAGAGAAATTATGATTTATATGAATATCAGTGATTCCGACATAAAGGAAAGTTTAAAT
GCAGAAAACGAATCCTGGGTTACAGAGACTATTTCAGATTCCGACATTTACTCTATCGAA
CAGCGATTTAACCAATGAAATGAAGGTCAAAATTGCTGATACAGCAAGATACTCTTTAAA
ACAAAATCCGAACCAGGATAAGGCTGAGGTCATCGAAAGATGTCGTATCGCAGTGTATGC
TGAGTATGTTGTAGCAGATTGGTTAAGTGGGTATGTTAACAAAGGTCAAGAAGACGTCGA
TGATCCGTACACGTATGCATGGGATGTTTTAGCACATCCAAAATACTGTGGGCTCCGTGT
AGAAGTTAAGACACATCAAACTGACTCACGTTGGATTTCGGTAACAACAGGATGCAGCGG
AGAGTATCCATATGGTTCTGGAATAAATCTAGGGCCCATTCTAAATCATCAAGTCGCGGA
CTGTATAATTATATTCAACACTAAAGAAATTCATCCAGGTGTCATCCAGTACACTCCGAA
GTTCATCGGTGACAGAGAAGACCTTCGTAAGGTTGTAAGAAAAAGCAACTACAACGGATG
GTATCTTTCCATTTAAAAAATTTCATAAACTAGTTTACATACCACAAGGACCGTGGTACT
ATACAACTATCAACTACAGAGGAACAAAAATGAAATTTAAATTCTTTTATGTTAAACATA
AAATCACAGGTGAATTTGTTCATGTACAATATTCTGAAATTGACGATGCAACATCATTTA
TTTCATTGGGATTGTCTAAATATGAATCAGACCAACCATATCTTACTGATAAATTGCAAC
AAGAGCGTTTGTTGAATGGTGATTTAAACAATTCTTGGGAAGTTCTTATTTACGATGATT
TAGAGAAAGCTATTAAAGAAAATAATCTTGAAATCATTGAGATTGAACTATGAGTTCATT
ATGGTGGTGTTTTGTTTGGTTAATTAGTATTCCAGTAATTTGTTTAACATTTACTTTTGT
GATGAGGTTATTATTAAAATTTTGAATTCTGTACTTATTGCTTGTGCGTGGTGGGTTGTG
CAAGTTTCAGCGGTAGTAGTTGGTATTCACATTTATTACGAATATTTTTAAAAAAGTTGT
TTACAAGACTGTTCCTCTGTGGTACTATTACCCTATCAACTACGGAGGAACAGAAAATGA
AAAAGATTGTTAAAGCTATATGGAATGTAGTTATAATACTAATAGTTTTGAGTATATTCC
CAATCGTTTTAATGATTGATGTATTAAACGTTTACTTTGGATTTATGTGAGGAAAATATG
AAGCGTAAACGCAGTGCTTTTACATTTATTGAATGGTTTTCGATAATATTTTTCCGGCTT
TATTCATTTTCATGCTGATTTTTGCCTTAGGTTCAGTTGTAGTTGGAATCTATTTGATGA
CAGTAGTCGGAATTGATATTCATCAAAATGGTTTAAAATCCGTAGTTGAAACAATTTGGA
ATGGTGTAAAATGATGAATTTGCTGAGCGGTTGGTTTTATATTCTCATGTTTTACATTGG
CGCAAATTTCCCGTATTGGATGGGATGGTCAACAACTGCATTTGGATTTTATACTCCTTG
AGGTGAATTATGAAAATCTTTAAAGATGTAAAAGTTGGTGAAATTTTTTGTTTAGATAAT
GGTGATCAGTTAATTCGTATTTCACCTCTTAAGAGCACTAGCGAGAAACCGACAGTTAAC
GCTACTTTAGCAAATAACAGTAATGAACGTTTCTGTATTGAAAATGATACTGAAACTTAC
ACCGTAGAAGAATTCTGGGAATTAAGCGTCGCAGTCGACGCTTAATTTATCGGCCGTATG
TATTCATGCGGCCTTGGAGTAGAAAATAATTTAGAGGAAATTAAAATGAAATATATGACT
GTTACTGATCTGAACAACGCAGGCGCTACTGTTATTGGTACAATCAAGGGTGGTGAATGG
TTTTTGGTAACTCCGCATAAAGATATTTTATCTAAACCTGGATTTTACTTTTTAGTAAGT
GAATTCGATGGTTCATGCGTATCTGCACGATTTTATGTAGGTAATCAGCGTTCTAAGCAA
GGATTCAGTGCAGTTCTAAGTCATATTCGCCAACGCCGGTCTCAACTTGCGCGTACTATT
GCAAATAACAATGTTCCATACACAGTGTTTTATCTGCCTGCTTCTAAGATGAAACCTCTG
ACAACGGGATTTGGAAAAGGTCAGTTAGCTTTGGCGTTTACTCGTAATCATCATTCTGAG
TATCAAACACTTGAAGAAATGAACCGTATGTTGGCTGATAACTTTAAATTTGTTTTGCAG
GCATATTAATGAGTAATTTCCACAACGAACACGTGATGCAGTTCTATCGTAACAATCTTA
AAACCAAAGGCGTCTTCGGACGCCAGTGAGGAAAATATGAATATCGCAAAATTATTAGGA
GTTATTTCATTTATTTGTTGGATAGTAGCATGTGTTTTAACTATCTGTATTGATGCCAGC
AGTGTGTTTTCGCAAGCTTTAGCTCAGGGTATGTGTGCATATTTAACATTTGTGTTGTTA
TCTACTAATGATTAAGAAAATCTTGGGCTATTCATTAGCCCTTGCTATTTTATTGATAGC
ATTATATTACGGAATAATGTTCGGATTAATTCAAGTCGTGCTTTTCATTTCTGATGTTAT
TATGGCACTACATTCACTAGTATGGTAAATTTATGCAACTGAATAATCGCGATTTAAAAA
GTATCATTGATAATGAAGCATTGGCTTATGCTATGTACACGGTTGAAAATCGTGCCATTC
CAAATATGATTGATGGATTTAAGCCAGTTCAACGATTTGTTATTGCTCGAGCTCTTGATT
TGGCACGAGGAAATAAAGATAAGTTTCACAAACTCGCTTCTATTGCAGGTGGTGTAGCGG
ACCTTGGATATCATCATGGTGAAAACTCTGCGCAAGACGCAGGTGCTTTGATGGCTAATA
CTTGGAATAATAACTTTCCTCTATTAGATGGTCAAGGAAACTTTGGTTCTCGTACCGTTC
AAAAAGCAGCAGCAAGTCGTTATATTTTTGCTCGTGTAAGTAAAAATTTCTATAACGTAT
ATAAAGATACTGAATATGCTCCGGTACATCAAGATAAAGAACACATTCCGCCTGCTTTCT
ATTTGCCTATTATTCCTACTGTTCTTCTTAATGGCGTTTCCGGTATTGCAACTGGTTATG
CAACTTACATTCTTCCTCATAGTGTTTCTTCTGTCAAGAAAGCTGTACTGCAAGCTCTTC
AAGGAAAGAAAGTAACTAAACCGAAGGTAGAATTCCCAGAATTTCGCGGTGAAGTCGTTG
AAATTGATGGGCAATATGAAATTCGTGGAACATATAAGTTTACTTCACGAACTCAAATGC
ATATCACTGAGATTCCGTATAAGTATGATCGTGAAACTTATGTGAGTAAAATCTTAGACC
CACTTGAAGATAAAGGCTTCATTACATGGGATGATGCTTGCGGTGAGCATGGTTTTGGAT
TCAAAGTTAAATTCCGCAAAGAATATTCTTTGAGCGATAATGAAGAAGAACGTCATGCAA
AAATTATGAAAGACTTCGGGTTGATTGAGCGTCGTTCTCAGAATATTACGGTTATTAATG
AGAAAGGAAAACTACAAGTTTACGATAACGTAGTTGATTTAATTAAAGATTTCGTTGAAG
TTCGTAAAACTTATGTCCAAAAACGAATTGATAACAAAATTAAAGAAACTGAATCAGCTT
TTCGTTTAGCCTTTGCCAAGGCACATTTCATTAAGAAAGTAATTTCAGGTGAAATTGTTG
TTCAAGGTAAAACTCGTAAAGAACTGACCGAAGAACTTTCTAAAATTGAGATGTATTCTT
CTTATGTTGATAAACTAGTCGGAATGAATATTTTTCATATGACTTCCGACGAAGCAAAGA
AACTTGCTGAAGAAGCTAAAGCTAAGAAAGAAGAAAACGAATATTGGAAAACTACTGATG
TAGTTACCGAATACACTAAAGATTTAGAGGAAATCAAATGAGTCCATTCATAGGTATTAC
AAGCGCTGCATTAGTATCCGGTAGCATTTTACTGGCGGGTTTAGGTGTTGTTCCAGCCGT
AGCAGGAGGTCTTCTTGCGTTCTGCATTCAACGTGTTATCATGACAGTTATCACAGTCAT
GCAGTAATTTTAGGGAGAGCCGAGGCTCTCCCTTTTTTATTTCAAAAATTTTTTTCACAA
AACGGTTTACAACCAAAGCATACTGTGGTACTATACAACTATCAACTACTGATACAGAAT
TACGGAGATTAGAAAATGTCTAAAGTAACTTACATCATCAAAGCTTCTAATGATGCTCTG
AATGAAAAAACTGCTGCGATTTTAATTACCATTGCTAAGAAAGATTTCATTACAGCTGCA
GAAGTTCGTGAGGTGCATCCAGATTTAGGTAACGCAGTAGTTAATAGTAATATTGGGGTA
TTGATTAAAAAAGGCCTGGTGGAGAAATCTGGTGATGGATTAATCATTACTGGTGAAGCT
CAGGATATTATTTCAAATGCAGCAACTTTATATGCACAGGAAAATGCTCCGGAACTGCTG
AAAAAACGAGCAACTCGTAAAGCTCGTGAGATTACTTCTGATATGGAAGAAGATAAAGAC
TTCATGTTAAAACTTTTAGATGAAAATGGATTTGTTCTTAAAAAGGTTGAAACTTATCGT
AGTAATTATCTCGCTATTTTAGAAAAACGCACTCACGGAATTCGTAATTTTGAAATTAAC
AATAATGGAAATATGCGAATTTTTGGATACAAAATGATGGAACATCATATTCAGAAATTT
ACTGATATCGGAATGTCATGTAAAATCGCTAAAAACGGTAATGTGTATCTTGACATTAAA
CGCTCGGCAGAAAACATTGAAGCTGTAATCACTGTAGCATCTGAACTGTGAGGAATAAAT
AATGAACAAGTTAGAAATTGTCAATGAACTTCGTCGTTGCGCAGAACCCACTCAAGAGGG
TTGGGACATCTGGTACCATGGAGCTTATCTTGGAACTATTGCTAAAGTTAGAACTGGGCT
ATATTTCATTATTCGTGAAAATTCTGAATTACCTAACGGAGTAGCTTATGGCGGTGTACG
TAAAAACTTCATGGCAGCGATTAGTACCTTTGTTCAATCGGCTTACGAAATTTACCTTGC
TGATTATAAAGAATTCCAGGAATCTCAACCAGTTATTCGCTCAATTGGTGTTAACAAAGC
TCAACAGAAAACTTTGTGGCAGCGTATTAAAGGATGGTTTAAATGAACCCATTTATTAAT
CGTTTAAAAATGCTGAATGTTCCTTTATCTCGTGAAACTCCAGAAAGTTTTGTTGAAAAA
TTTAAAGCGCATGGTTATAAATGCACAGAAGAAGATATTCTAAAAGAAGTTCCTGAAATA
TGTTGGCAGACTGCATATTGGGATGAAAACCAAAAGTATCAACGACGAATTGTCTGCGCG
GCCAACCGTTTTAAATTAAAAGATGGACGAACTCTTATTATTCCAGGTGCTCGTCATTAT
TCTAAAGATATGGCCGAAGTTTTAGATGTAGTTAAACCTCAATTAGTTACTCAACAAGTT
TGTGATGATGACCAAGGGTTTATTGACCAATATAGTAATTATTGGACACGTGAAGAAGCA
ATGATTATTGCAACTTACGCTGGACAAGTACGTATTGAACGCGGTGGTAGTGAAAAAGAA
CTTTACTCTGAGGACCTTTACTAATGAATATTAAAAAGTTTCAAATTGATGGAATTACTA
ATCAAATCCAGGCACTGGAATATGCTAATAAAATGATGTCAAGCAATTGGGGAATTTATA
CCAATGAGCCGGGATTTAAGTTCTGCGATATGGAATTCACCAAAAAGCTCGTAGGAAAAG
ATTATGTATGCCCATTTAGTTCTCCGGTAAATGGAATGCTAAAACCTGCTTTACGCGATC
TTTATATTGCGATGAACGAAGAAATGATAGAAGAGCTAAAACGTCAACTGAAGGTGATTC
AATTTGGCCAGGGAAATTAATTCAAAATCTGATTATTTTAATTCTCTCAATGATAAAGAT
AAAAATCTAATACGGCATTTTATTGTTGAGATGGGATATACCGATACACGCGATTTAAGA
GAACATATATTTGAATGTGGTGTAGCTAAAAAGTTTTCATTCACATGCAAATGTTTAAGA
GAGGTAATTCAGCACTATGAACAATTTAGTCGCAAAACATAATTTTAATAAAGCTTCTGT
CCATAAAGATAAGAAGAAAGCGTTTAAAGAATCTAATCGCAAACAGAAACATAAGGGGAA
GGTCTATGATTATTGATTCTCAATCCGTGGTTCAATACACAATCAAAATTGATATTCTAG
AAAAGCTATATAAGTTTCTACCAAATTTATACCACTCAATTGTCAATGAATTAGTTGAAG
AACTACATCTCGAGAATAATGATTTCTTGATTGGAACTTATAAAGACCTCTCAAAAGCAG
GATATTTTTACGTAATTCCAGCTCCAGGAAAAAGTATTGATGATATATTAAAAACTATAA
TGTTTTATGTCCATGATTACGAAATTGAAGATTATTTCGAATGAGTCATAATCTTGAAAA
TGTAATCGAGCACAATGTAGCTCAGGAACGTGAGTCGTTCAAGGAATTCGTAGAAAAAAT
TTTTGAAGAAAATAACACAGACCGGTTTACAAATCAAGCGTCTGATGATATTATAACAAA
GTCAACTAATTGAGTGGTATAGTTAATGAATAAAAACATTGATACAGTTCGTGAAATTAT
TACTGTTGCGTCTATTTTGATTAAATTTTCCAGAGAAGATATTGTTGAGAATCGTGCTAA
TTTTGTTGCATTTCTGAATGAGATTGGAGTAACGCATGAAGGTAGAAAGTTAAATCAGAA
TTCATTCCGTAAAATTGTTTCTGAATTAACTCAGGAAGATAAGAAAACCCTCATCGACGA
ATTCAACGAGGGTTTTGAGGGTGTATATCGATATCTAGAGATGTATACGAACAAATAATT
ATTTAGCCCTTCCTAATATTCTGGCCGCCTGAGCACATATTGATTCAAGACGGTCATTAC
TTATATGATCATTTCTATACCAGTACATGGTTATCGTTCCAGCATAGATATTATCCAAAT
TAAAATATGGACAACTGTACATGTAGTTTATTTCGGGAGTAGGCTTTTTAGTTGGTAAAA
AAGCAAATTTTGAGTTTGAATAATAATGACGTCCATTTAAATGAACTGCATATTCATCCA
TAGTTTTATCAACAGGATATCCTCCAAGTGATTTTTCAGTTATTGTTGAAGGTAATTTTC
CTTCGTATGCTATAATATCAACAAAATAGTTTAAGTTTTTAGGGCGGAAAGAATACACCG
CACTAAAGTCTGCCTCAGATGATATATGAACTATCTGAAGTTGTTCCAGGGCGACAGATT
CAAAGCGTGCATTTCTTTCCTTTTCAATAATTTCACTGTATGTTTCATACTTTGATTGCT
TATAGTACTCAAAGAAACTATCTCCCCTATACCAAACAATCGCCATTATAAACAAAAGAA
TTACGACAGCTACCCGGGAAGCAAGAACTTTCCCGGTAGCATTATCTTTGAACAAGCGAT
CTAGAACACCCAACAGAATATCAGAGGGCGAAAATGATATTCTAGGTGCTGCCATAGACC
CTCCTTTTAAGGATATTTATTCAAATTATACTCTTGGTCCGTAAATTGTTCCAACAGCAC
CCCAAGTTGGAGAAGATCCAAACACTGCATGACCAGACGCACCACCAACACCAACTTTAA
GAACTTTACCGCCGTCAGACCATGCATTCTGACCAGCAGCACCAGCATTACCACCTGCGC
CGGAGTGTGCGTTACCATAGTCATAACCACCACCCGGACCTTCATACGAAGCAGCACCAC
CGGAATAACCGCCGCCGCCAGCACCACCGAAAGGTCGACCGCCGCCGCCACCGATATCTT
GCCAGTTTGCCCCTGAGTGTGGACGATATGCAATACCACCGCCGCCGCCACCGCCAGCAG
CTATAACACCGTAGTTCCAAATACGAAGCCGTCCACCGATATCATTTTGAATAACATGAC
CGCCTTGTGTACCGTTACCGTCGCCTCCTGAGTGAGTGTATCCACCATTACCACCACGAC
CCCACATATGAACACCACCATGAATATTAAGAACAACATATTCATTAGGCGTATCCCCAT
ACATAAAGAAAAGTGGCACATCTTTAGAATAAGAAACGATATCACCAACAATATTGAATA
CAATGGGTGCACCGCCAGCTTCAAAGCAACGGTCGCGGAACCATTGACCATTAAAGTTAT
GGTTTGCTGTTACGGTATGAATAATCTCTCTTGAGCGTCCGGCGAATTGGCTCATCCAGC
AAGGAACACCCAATCTTAATTGACCAGCCGCTTGACTCATCCATCGTTGTCCTGTTTCAT
TTACGGATGAACTTCCAATCCAACCGGGAACACCAACTACTGCCATAATTTTCTCCAAAG
GGGCAAAGCCCCTTGTTGTTAGAATTTAAAATAATTACTAATTTTGCGAGCAATTTTAGT
GAAGAAAGGCGTTTTCAATTCTTTAATTTCTTCGCTCATTTCTTGGATAGCCTTAATTAA
AAGAGCATTCACAGCGGAGTTAGAAATTGTCAGAACATCAGATCCATCAACTTCAACTTT
AGACACAGCTTCCGGTAATTCTTTTTCAAGATCCTGAGCAATAATACCAACTTCACGTTT
AATAACACTACGATCTTTAATAGACTTAACCTTATCGTATGTATAAACTTTCAGTCGGCA
TACTTTTTCAAGTGCTCCGTTTTCTAGCTCTTTTTTATTAATCTTAAGACGACCATCGGA
ACGAATATACACATCGTTAAAGTTACCATTACCAGGAGAATAGAAAGTACCGTCGTAATG
AAATTCAAATACCGCGTTAGGGTGTCCAGCCGCTGGCGATGCCTCCGCAGATCCAACACG
AATAATTGCTTGTCCCCAACTGTTATTGACACGACGAATACCAAGATCGACGGCAGTTAC
AAACCCTTGATTGGTGATTACACTTCTTCCTTTAATAATTGGATAATAACAATCCTGTGA
AACATAACCATGATCGACGAATATTGGCGCTTCCACTTGCCACTGACTACCCCAATCACC
TGGTTGACTAGCAGTCCAACGTTCACCATGAACATATAATCGAACGTTATTGACATGGGC
CATTTCGACGCCTTTTGGACTTAGCGTGATATCTCCTGCGTTTGTAATGTATACACCAGC
ATTAGTAGCATAACTATATAACGCTAATTCATTATCAGCACCACCCTTACCAATATACCA
GTTACCAGTCCCGTCTATGTCACCACGAATACGCAAAGAATTACTAGCAGTTGTTGATAA
TACAATAGAATCACCCGGACGTTTAATAACCAATTTACCATCGGATTCAATTTCACCAAA
AAATTTAGTCTTAATTGCACCAGTCGCTAAAGTACGTTCAGTGGAAAAATGAGCGCCTTT
GCTGTCTTCTAACTGAATAATGTTATCACGCGCATTATTACTATCACCCCAATGGTTAAA
TTTAAAATAATCTCGTGATCCTAAACGTCCGGCGTCAAAAGTCATCGTGCCTTTAATGTT
AATATCACCGCCAAAAAATGCGGTGAGAGAATCACGTTTTAATTTTAAAACGTTAGCACC
ACTAGCACCACCTAAAGTAACATCGCCAGTTCTTAATTCATAACGGAAAGGTCTATTTGT
ATTAAAGTTTCCATCTTGATCATTTTCGTCGGTGGAAAGAATATAAAGACTCTCTCCATC
ATTACGGAAAATTGTACCAAATTTTCCGCCATACATTTTAAATGCATTCAATGAACGAAA
TTTAACTTCTGTATTAAAAGTTGTAGTTGATTTAAACGTGGTTGCAGCACCGAAGTTAAC
TGCGCCATTAAAATCTTGTTGAGCAGTCCAAGTATGTGATCCGTCTTCAAGAACAACGCG
TCGAACTGTACATGTTCTACTCCCTGGATTACCGAATACACGAACGACAAAATAACGATA
GTTTGTCTGGGATACAGTTCCACGCCAAACCTGAACAGTACGTCCTGTGCTGGTGTGCTC
GCTAGGACCAACAGAAAACATAATTAAGTTTCCGTCAATCGTGCCCCAATTCATATTAGC
TGGCATGTTCTTTATTTTGTTCAAAGGAACACTAAACATACTACCAGGGACAAAATCAAA
GGTTTGCCAGTCTAACTCAGCTAAGTTAGATTTAATACCGCCCATACCCAAAGTAATTGG
TAGAGAATAGGATGTGTATACTTCGTTCCATTCACCCCACACACCGCCGGTATATGCGCG
CTCAAAAATACGATCGCGGGTAGTTGCACCTGTTCCGGCAGTAGTAAATTTTTGGAAAAT
AGCACCACCAGAAGCACGCTGTTTGACTTCCAGCAAACCAACAATAACGGCTGGTAAACC
TTCACCAGTAGGACAATTAATAACGGCATCAGTGCCTAAAATATTATATAACCCAGGAGT
TTTAAAATCATTCAGGTTTCCGTCATAGAAAGTCGCTGGTGTGACATTACCGACTTGTTG
CCACGGTCCCCATTTAGGCGCGGAAACATCCCACGCGGCAGCAAGACAACGAGTATATAC
AACACCAAATCTGGTTGTATATCTTTGTGTACGAGAATAGTTTCCACCTTCATATACTTC
CAAAAGACCTTGAGCTGACGACCCCTCTTCTGGGAAATTTCTGTCAAAGGTAGCAATGGA
ATTTGAACTATTTCGCCACAAACCAAGGTGTTCAGCGCCTCCTAGATCATTAAGATCAAT
TGTTGTTGACAGTGGACGAGTACCGGATTGAATATTTCGCCACACACTCCACGGACCATT
TACTCCGTTCCATGTAGCAGTCAAGGAACGAATATAAACATTTCCGTATCTAGTTGTATA
TCTCTGAGTACCAGCAAATTGACCGGCCACAAATACTTCTAGCACACCTACAGCATTTTC
TTCTGGAAATTTATTTGCTGGTTGAGCGTTGGTTGAAGTTGCTTTCGACCAAACTCCAAG
ATATTCTTCAACAGGCCCATACGTATCTAAATTAGCATCAGTAGGTAATTCGCCATTATT
TTTTATAAATGTTGTGCTATTGACATTTATGTCAGATGGAGTTAAGGTAATGTCCTTTGA
CCCATCAAAAGATATACCATTAATTTTCCTAGGTGTTTGCAATTTAGTAGCTGTGCTAGA
ATTTCCAATTAAAGTTCCAGTTATATTTTCTGTAACCTCTAAAGACCCATTTATAGTTCC
TCCATATTTTAAACCTAATTCTATAACACTACCTGAGTCATCTTTTGTGAAAATTGTTTT
ATCTTTTAAGTTTATAGCCAATTCACCTTCGGCTAATACTGAAGCAGCAGGACGTTGACC
TGCAGTTTTGCTTCTTTTAAATTGTATTTGTTTTAAAGTAGCCATAAGTCCTCTTAATAA
TAGCCGAAATCTTGAACAGAATCCTTAATTACGATTTGGTCAAATCGTGGAACGTGTGAA
GGTTGAGATGCAGGATTCTGTGAAAAAAGGTTTGGCGCAGTTAAATTTCCTGTCATAGTG
TCTCCAGAGCGTAATACCCTAGAGTTTGCATTTGCTGTAACAGTATTTATTGCTCCATCA
ACATAATCTTTGCGAGTAACATCAGATGCTGCGGAAGGAGTAGATGTAACAGTTACCGAT
GGAGCCGTTACAGCCCTGGTAAATGTTGTCAAACCTTCTGGCGTAATAGTAATTTGTCCA
GTAGTGATTTCACTACCTGCAGGTCTAAAACTAATACCACCGGAAGAGCCGCCAACTACA
AGAGTATTACCAGTGCCGCCACCAGAACGAATTCGGATAGGGGTTTCATTATTACTTAAT
TGAAGATAACTATTTACCCCGTAATTAATAGTAATTGGACCGGCGTAAGTACCACCATTA
GCTTTAGAAACGAAATCGTTATCAGCTGCCTGCGGTTTATTATATTCTGAATATATTTTA
AATGATTTGTAGAGTACATCGTCACCGGCTGAATTCAATGGAAAATTTCCTTGATGCCAA
ATGACAGATCCACCCACAGTTGAACCTACTTTTAAATCAGCCATTATATGCCCCTTTATT
TTAATATTATTTATAAAGAAAAAGGGAGCCCGAAGGCTCCCTCAGTTTAAACTTCTCTAA
ATTCTTGCCCAAACACTTTGCCAGTTTTAGAAGAGGCTTGTGTAGGAAGTACCATTATAT
CTGGAGGTGAAGCCGATTCACAGACATAATTAACGCGAATACCGTTGACGCCAAATTCGA
CAGGTTTTGAAATGCCGCCATTTCTTGATACTTCAGAAAAGCTTAAATTCCTCATTCCGC
CTTGACCAGCTTGAGCAGTTCTCTGCGCATATATAGTAAATCCGACTGCATTTTCAGGAA
CAACTACATAATCTTCCTTTAATTCCCAAGATCCAGCTTGTCCAGTAAACTCAGCTTGGG
TAGAGGAAATATATCCATTTGATGCATCATAAAAACGAATGGATATGTTTGTAGTTCCAA
GATCAAGTAAATCAGCATCAGCATATAACTGTGCTTTAAGATAAAGAACATCACCAGGAA
TTAAATTATAGTCAGAAAGTTTACTTATAGCAGCTGAAGTTGGCAATCGCGCAATTTCGT
TATTAGTTCCACCAACCGCTGACATAAATTGCTCGACACTTTCATATGTTCTTTTAGGAA
ATCCCGTAGCTCCGACGTCTTCTAAACTATCAAATACAACATCTAAAATAGTTTGATAAT
CATCTGTGCTTTTTCTATTACTTAGTTTAACATGCTCTAATGCAATAGCTCTTTTAGAAG
AAGTATAAAAAGCAGCATATGATACGTCAAATCTTGACAATACTGAATCTGATGGAAAAA
CTGAAGTTCCTGCTCCCCTTAACCAAGATACCACTTCAGGAGGAAAATTAACCTTTCCGC
TAGTTAGTATAGCAACAAGTCTATTGTTTGACAAAGAATTCATGAAACTAACAAAAGCAG
CTGATGTAGTATTATTTGAAGTAGAAAAAGCATATGACTTACTATCAACTAATGCTCCTG
TTGAAGGGTCAAAAACTCTTAAATGAAGACCTGCGCTAAATGTTTGATTTCCGACAGGGT
TATCCTGAAATTTAACATATGGTCCTGCTGTAGAAAGCGGGCAAGAACCCGCTATACTTA
TTTTGTATCTTACTGAATTACTTTCCGATAAAAATGGCGTTTGGACATATCCTTGTCCAA
ACTCTGCCATAAATTTTTCCATAATACCTCTTATTCAATCCACTCAAATTTAACAGTTTT
ATTCACTGGGTCAGGAATAATGCGAACATTACCAATTCGCAAGAAATCACGAATAGTAAG
ATTACCTATTATTCCATTATCAGATGGGATCGCTCCTATATCTGAAGGTTGAGGAGGGTT
ACCTCCGTCAAATACCTGAACAAAACTTGACCAAGAGTTTTTGGTTTTCTGCCATGTACG
TGTCCAGCGAGTGGTACGTGCTTCTGGAGTCGTTGGATAAGTAATCCAATCTTGGTAAAG
TGAATCAAGCGTGTTACCAAACTGAGTCAATGTACCAGGAGATTTAACTTCTTCGCCACG
TTCTAAGTATGGAAGCCCAGTCACTTCATTAGTTTTTTCAACCATCTTAAAATAACCCGG
GAACTGGTTATAAGTGGCTGAATCATTAATATCGATTGACCAGAATCCTACAGTATCAGA
TGTTGGCGCACGGGTATATAAATCAGAGGTTTTAGTACCCTGAGAACGAATTCTCGAGTT
AACAGTTAAACCACCTGAACTTATAGTAGCACCTTTGGCAATGATTAAGCTTTCACCAAT
CGTTACTTGACCAGATGCATTATTAATAGTTAAAGGACGTAATCCATTAAATCCACCGGT
CTGATCGCCAGATGCAGTAAGCATAAAATAGGTGTTAGCACCATCATTACGAATAAAGAA
TCCATAATCACCGTTTATTGCTCTAAAAGCATTCGATGATTTACTGATAAATTCGCCATT
AGCAGTAACTGAACTACCGAATGTTGCAACGCCATTCGCATTCAATGTTCCTGAAGCATT
CACATTTATCGGCGTTACTGTACCGTTTATATTAAATGTTATATTACCAGCTTTATTACG
CTGAGAATAAAAATGACTAGAAGTTTCATCACTAACTTCAAATACAGTAGAACGTGTTGT
GTCCGATTCACCGCTGAATTGATTTCCCCACACTCTGACTGTCATCATTTGAGCTGGGTT
CGTCCCAGTTTGAGGTCCTTTCTCAAAAATCAGACGAGTTGCCGTTCCAGTATTAGAAAT
AGTTAATGTACTATTTGCCGAAACTGATCCACCAAACGTAGCAGTACTAGATGATACAAG
AGGGGCACTCAGATTCGTTTGTTGCGTTAAGGTTAGTGAACCATTAACCGTCTGTGCAAT
ATCCCTACGAATGAACTGGAGTGAATCTAAACCATCTAATAAATTACTATCTACAGCTTT
TGCTTTTAACGGCAAATAATTTGCTAATACGCGGTTTAATTCATATGGTGATACTGCATA
GTTATTTTTCTCATATAGTTCTAAGTCCTGTGTAGAACCAGCTGTATCATTACCAACGAA
CGTAATTGAACCAGATGAGGTTTTAACAAAACCTCTTATCGCAGTAGTAGCTGCCCAAGT
AGGTTCACTCTGCACAATCCATTTTAAATTTTTTGGAGATACAGCAGTATTTGCTGACGT
TCCAGCTACAGTTTCAGACCGAGTTGCAACTTTAATAACGCCTTCCTGTGCTTCAGTAGA
TTTAGTACCTAAAAGCTTTTTAGGAGTTATTAGAACATTATCCAATGTTCCTGCAGCAGC
TTCAACTTGTGTAGCTACACGAAGTGTACCACGCTGTGTCTCATTTGCTTCAAGAATATT
AAGGGTATAATGGTCCCAGAGAGTTCCTGATTCAACTAATCCAGATAGAGCAACAACAGA
AGTACGATCAGTACTATTAAATCTGGTTTTAATTTTTAATGGTGTAGAGATACGAGTATC
GTCGACGCCTGCGTCGAATTCAACTTGTGTAGCAATTTCAGCTATACCAGTTAAACTTTC
AGTTGCTTTACGGTCATTTAAAGTTTTAGGAGTGACTGCACGAGTATAATCAGTTCCTGT
ATTAACTTCACTTTGTGTAGCAATTTCAATTAAACCAATTCTTGCATCAGTTGATGTCTT
TTTATGTAACGTTTCTGGCGTTACAACAGCATTTGCCCATCCTTTTTGACTCTGTCCAGC
AATTACTTCACTTTCAACTGCTAAAATTACTGCACCTTGTTGCGTTGGAGTAGCTTTATA
CTGATCCAAAGCTTTAGGCGAAACAACTAAATTATTAGTGTTTTTATTATAAACGTTTGT
ACCATTTAATTCACGACTAGAAGCTGGAGTAGCTCCTGCGGTAGATACAAATGTTACAAT
ACCGGATAATGATTCAGAACCTTGACGAGCTTGAAGCTTTTTAGGAGTGATGATTGTAGT
ATCATCAGTACCTGTATTAGTTTCCTGCTGCGTAGCAATCTCAGCGACACCTCTACGAGT
TTCTGTAGCAGTTCTTTCATTCAGCTTTTTAGGAGTGATGATAATATCATCAGCAAAAGA
GAATGTGGTGTTCTGATTCACTTGAGCAGTAGTTGCTATTCTTGCGATACCTCTACGAGT
TTCTGTAGCAGTACGATTAGCTAATGTTTCTGGTGTAATTGCTAATTCTTTTTGTGGAGA
ATTTTCTAAATCAGCATTTGCTTGAGCTTGTGTAGCTAAAGCAATTACGCCTAATCTTGC
TCTAGTAGAATTATTTAAAGAATCGACTCTTTCAACTGTTGGAACGTTTTGCTGTACAAC
CCAGTATTTTCCATCAGAATCTTCTATATAAGCAAGTTGCAAAACTGGTACATAATTAGT
TTCACCATTAAAAACTAATTCTTGAACTGTTACCCATTCAGCTTCAGGCGGATATTCTGA
ACGTTTTGGGAATTGCAGCAATTGAACTGAAGAAGCAATTTTATCTTCACCGGCAGCTTT
GATTTTAACTGTTTGTCCTTTTCTCATGTAATTCATGGAAATTTTAACAGTATCACCAAC
AGAAATATCAGTCGGAAGCTGAAGTTCAATTGTTTGGGTTGTTCCATTATTCGCACCAAA
TACCATGACTTCTTCATTTGGACGAATATTTGAATTAGTTGTTATAATGCGTAAACGTGC
TTTACTATCCCCGTCAAACAATCTCCACAATTTCTCATTATCGTCAAACATCAAGAAACC
GTCAATCGATGTACGGCCTTCAATGGAATGAGTTCCAACTTCTTGCACTGACGTCGTTTC
ATCATATGTCGTAACAATTGTATGATAAAGTGGATTTAATTTATCTAAATCAACGAAATT
AATGATATCTCCATGATTGGCAAATCTTGGAAGTTTAACATTAATCGGTGCGGCAGAAGT
AAATCTACGTACGATAAAATCATTAGATTGTGCTTGATATGCAGTCGATGGAGTAACAAT
TGCAGCTTCTCTGCTATAATCAGCAATATACATTTGCCACAAACGATTATTAAAAATGAA
TACCATCTGTGACTTTGGATGAGTCATTAAAACTGAACGTACCTGTTCACCTCTAAAATT
GACAATACTCTGATTTGAAGAATTTATTTTAACCTGATTTATGCCAGGTTTTCCACCGAT
ATCTTGAATTATTACGGTTTCTCCATCAAGCGGAGAAGGTGGTAAAGTAAACTCAATGTC
ATTGCCAACTGATGTATCTACTGAAATTGCTTCTCCGGATTTTAATTGATATGGTCCAGA
TGATACGGTTGTATATACGGCATCAGTACGTAATGCTTTCCAACGAATTCTATTAAAACT
TCCAGCAGGTTTTGGAATATTATCCGTTGCTGCCCAAAAACGATTATTATAAATGATTAC
AAAATCTTTTAAATATCCACGAGTTGGATCATATTGTTGAACTGTGTTTTCTTGAATTAA
GTAATCAACGTTAACACCGTCAGTTCCTACGGTACGATCAGCTAAAGCTACGTTGATTAT
TTTATCGCCACCTGCGTCCAGACCGTCTTCTGCTCTGAACTTTCTTTTAATCTCGGCCAT
TCTCCCGGGCTCCTATTGTGTTTTCAATAATAAGTATTTATACTTGTTTACTTTAAGATT
TGGATAGTATATAATAGAAATCTCACTAATTGAACGAGGTTCATATGGATTTAGAAATGA
TGCTGGATGAAGATTACAAAGAAGGAATTTGCTTAATTGACTTTAGTCAAATTGCGCTTT
CAACTGCTTTAGTAAACTTCCCAGATAAAGAAAAAATTAATTTATCAATGGTTCGTCATT
TGATATTGAACTCAATTAAGTTTAATGTCAAAAAAGCGAAAACTCTTGGATACACTAAAA
TTGTACTGTGTATCGATAACGCGAAATCTGGATACTGGCGTCGTGATTTCGCTTATTACT
ATAAGAAAAACCGTGGAAAAGCACGAGAAGAATCTACTTGGGATTGGGAAGGTTATTTTG
AATCCAGCCATAAAGTTATAGATGAATTGAAAGCTTATATGCCATACATTGTTATGGATA
TTGATAAGTATGAAGCAGATGACCACATTGCTGTTCTTGTTAAAAAGTTCTCTTTAGAAG
GACATAAGATTTTAATCATTTCATCGGACGGTGACTTTACTCAACTTCACAAATATCCAA
ATGTTAAGCAATGGTCACCGATGCACAAGAAATGGGTTAAAATTAAAAGCGGTTCTGCTG
AAATTGATTGTATGACTAAAATTCTTAAGGGTGACAAAAAGGATAACGTTGCTTCAGTTA
AAGTACGTTCTGACTTTTGGTTTACCAGAGTTGAAGGTGAACGAACTCCTTCAATGAAAA
CTTCAATCGTTGAAGCTATTGCTAATGACCGTGAGCAAGCTAAGGTGCTTCTCACAGAAT
CTGAATATAATCGTTATAAAGAAAATTTAGTTCTAATTGATTTTGATTATATTCCTGATA
ATATTGCTTCAAACATTGTGAATTACTATAATTCATATAAATTACCACCGCGTGGCAAAA
TTTATTCATATTTTGTAAAAGCGGGTCTTTCTAAATTAACTAATAGCATTAATGAATTTT
GAGGTGAATAATGGCTAAAAAAGAAATGGTTGAATTTGATGAAGCTATCCATGGCGAAGA
CTTGGCTAAATTTATTAAAGAAGCATCTGATCATAAACTGAAAATTTCCGGTTATAATGA
ACTGATTAAAGATATTCGAATTCGTGCCAAAGATGAACTTGGCGTTGATGGTAAGATGTT
TAATCGTCTATTAGCTTTGTATCATAAAGATAACCGTGATGTGTTTGAAGCTGAAACTGA
AGAGGTAGTTGAACTTTATGACACAGTTTTCTCTAAATGATATTCGTCCGGTCGATGAGA
CCGGTCTTTCAGAAAAAGAACTTTCAATCAAGAAAGAAAAGGATGAAATAGCAAAGCTTC
TTGATCGTCAAGAAAATGGATTTATTATTGAAAAAATGGTAGAAGAATTTGGAATGAGTT
ATCTTGAAGCTACAACAGCATTTTTGGAAGAAAACTCTATTCCTGAAACTCAATTTGCTA
AATTTATTCCTTCGGGTATAATTGAAAAAATTCAGTCAGAAGCCATTGACGAAAATCTTT
TACGTCCTTCTGTTGTTCGTTGTGAAAAAACTAATACATTAGATTTTCTACTATGATTAA
ACTCCGCATGCCTGCTGATGGTGAAAGATACATTGATGGTAAATCAGTTTATAAATTATA
CTTAATGATAAAACAACATATGAATGGAAAGTATGATGTTATTAAGTATAATTGGTGCAT
GCGGGTGTCTGATGCCGCTTATCAAAAGCGAAGGGATAAGTATTTTTTCCAAAAGCTATC
AGAAAAGTATAAATTAAAAGAATTAACTTTAATTTTTATTAGCAATCTTGTAGCTAACCA
AGATGCTTGGATTGGTGATATCTCTGACGCTGATGCATTAGTATTTTATCGTGAATATAT
CGGACGCTTAAAGCAAATTAAATTTAAGTTTGAAGAAGATATTAGGAATATCTATTATTT
TAGTAAAAAAGTTGAAGTTTCTGCTTTTAAAGAAATCTTTGAGTATAATCCAAAAGTTCA
GTCGAGTTATATTTTTAAACTACTTCAATCGAATATAATTTCGTTTGAGACGTTTATCTT
GCTTGATTCGTTTTTAAATATAATCGATAAACATGATGAACAGACTGATAATTTAGTTTG
GAACAATTATTCTATAAAGTTAAAAGCTTATAGAAAAATTTTAAATATTGATTCACAGAA
AGCTAAAAATGTTTTCATTGAAACTGTGAAATCTTGCAAGTATTAATTGCTTATTATAAA
TAGATTATAATTATCTCACTGACCAGCTATGAGGTCATACATCGTCATAGCACCAACTGT
TAATTAAATTAAAAAGGAAATAAAAAATGTTTAAACGTAAATCTACTGCTGAACTCGCTG
CACAAATGGCTAAACTGGCTGGAAATAAAGGTGGTTTTTCTTCTGAAGATAAAGGCGAGT
GGAAACTGAAACTCGATAATGCGGGTAACGGTCAAGCAGTAATTCGTTTTCTTCCGTCTA
AAAATGATGAACAAGCACCATTCGCAATTCTTGTAAATCACGGTTTCAAGAAAAACGGTA
AATGGTATATCGAAAATTGCTCATCTACCCACGGTGATTACGATTCTTGCCCAGTATGTC
AGTACATCAGTAAAAATGATCTGTACAACACTGACAATAAAGAGTACAGTCTTGTTAAAC
GTAAAACTTCTTACTGGGCTAACATTCTTGTTGTAAAAGACCCAGCTGCTCCAGAAAACG
AAGGTAAAGTATTTAAATATCGTTTCGGTAAGAAAATCTGGGATAAAATCAATGCAATGA
TTGCAGTTGATGTTGAAATGGGTGAAACTCCGGTTGATGTAACTTGCCCGTGGGAAGGTG
CTAACTTTGTACTGAAAGTTAAACAAGTTTCTGGTTTTAGTAACTACGACGAATCTAAAT
TCCTGAATCAATCTGCGATTCCAAACATTGACGATGAATCTTTCCAGAAAGAACTGTTCG
AACAAATGGTTGACCTTTCTGAAATGACTTCTAAAGATAAATTCAAATCGTTTGAAGAAC
TGAACACTAAGTTCAGTCAAGTTATGGGAACTGCTGCTATGGGTGGTGCCGCAGCAACTG
CCGCTAAGAAAGCTGATAAAGTTGCTGATGATTTGGATGCATTCAATGTTGATGACTTCA
AAACAAAAACTGAAGATGATTTTATGAGCTCAAGCTCTGGCAGTTCATCTAGTGCTGATG
ACACGGACCTGGATGACCTTTTGAATGACCTTTAATAGATTATATTACTAATTAATTGGG
GACCCTAGAGGTCCCCTTTTTTTATTTCAAAAATTTTTTCACAAAATGGTTTACATCCCT
GTTCTTCTATGGTACTATACAACTATCGGCAATACTGCTGACGATTAAAGAGGAAAACAA
TATGGCTAAAGTTGATATTGACATCGTTGATTTTGAATATATTGAAGAGATTATTCGTAA
TCGTTATCCTGAACTTAGTATCACAAGCGTGCAAGATTCTAAGTTTTGGAGTATTCAAAT
CGTTATTGAAGGTCCTCTTGAAGACCTCACCCGCTTTATGGCTAATGAATACTGTGATGG
CATGGATTCTGAAGACGCAGAATTTTACATGGGACTGATTGAACAATAATTATCGAGGGG
CTATCAAGCCCCGTTAAAATGAGGAAACCGTAATGTATACCGGTAAAAAGTATGAACTTG
TTCCAAGACTTATTGATACATTTATTAATTATAGCCCACGTTCTAATTCATCAATAGTTA
AAGCCATTCGAGAGAATGGCGGATGGTTTGAAGTTAAAGAAGTTTCCGTCGCTAATGGAT
ATAAAGCAGTAAAACACATTGAATGCGCAAATGGAAAACATTTTTACCTCAAAGATAGAC
TTTTAGAAATTTGCGAAGACGAATTTCATTGTTTTCGTGAGTATAAAGAACCGACTTCTG
AAAAAGATGAAGTCAAAGACAAGGTTTATGGCGTAACAAAAATTCACTGCATTGTAGACG
AAAACAATGTAGATGAAATCATTGAACTTTTGCGAAAAACTTTCAAAAAGTAGTTTACAA
CAGGGTAGTAGTGTGATACTATTACCCTATCAATTAAGGAGAATAAAATGAGATTACAAC
GCCAAAGCATCAAAGATTCAGAAGTTAGAGGTAAATGGTATTTTAATATCATCGGTAAAG
ATTCTGAACTTGTTGAAAAAGCTGAACATCTTTTACGTGATATGGGATGGGAAGATGAAT
GCGATGGATGTCCTCTTTATGAGGATGGAGAAAGCGCAGGATTCTGGATTTACCATTCTG
ACGTCGAGCAGTTTAAAGCTGATTGGAAAATTGTGAAAAAGTCTGTTTAAGGAAAATAAT
ATGATTTTTGTATTTGAATTTATGAATGATGAATTCGATTATGCAATTTTTAACGCATTG
CATAATCCTGATTTAAGTGAATTTAATGAAATGTTTTCTGACGCTTTGAGTATGTCAGAA
GAATACTGTGGAGAATGTCAACGTGTTTGTGTGACAGTTTTTGAAAACAAAGAAAAGACA
TATGAAGAATTATTCTTTGATGCTAATAAAGCCACTGAATGGTTTCTTGAAAGGGGTTTT
GCGTAATGATTAAATTGGTATTCGCTTATTCTCCAACTAAAACGGTCGAAGGCTTTAATG
AATTAGCATTCGGTTTAGGTGATGGTTTACCATGGGGGCGAGTTAAAAAGGACCTCCAGA
ATTTTAAAGCTCGTACCGAAGGTACAATTATGATTATGGGTGCTAAAACGTTCCAGTCAT
TATCTACATTGCTTCCCGGTCGTAGTCATATTGTGGTGTGTGACCTTGCGCGTGATTATC
CTGTAACTAAAGACGGCGATTTAGCACATTTCTATATTACTTGGGAGCAGTATATAACTT
ACATTTCTGGCGGCGAAATTCAAGTGTTAAGCCCTAATGCACCATTTGAGACTATGCTTG
ATCAGAATTCCAAAGTAAGTGTAATTGGCGGGCCTGCTCTGTTATATGCTGCATTACCTT
ATGCGGATGAAGTAGTTGTTTCTCGCATCGTTAAAAGGCACCGTGTTAATTCAACAGTTC
AATTAGATGCAACTTTTCTTGATGATATAAGCAAGCGTGAAATGGTTGAAACGCATTGGT
ATAAAATAGATGAAGTAACAACTCTTACGGAATCAGTATATAAAAATGAAATACCGCGGG
GTGGAAAATATGAATTTTAATTATTACCCTATTCTATTAGAAAAAGACACGAAACAGCCA
AAATGGCAAGGTCCTCAGTTTATTAAAGGTGTCTATCAATTAGTAGTTCCTAAAGACAAG
ATTTATAGCAGTTGTTTCACTGAATCCGCTTGTAGTATTTTTGGTAATAGTTCTCCGTAT
TGGAATTTTGACATAAAGCTGGATAGAAATATCGATATTTGGTTGAAAGCTATGGATATT
GGTAATATCACGTTTGATGAGAATAATTATCATATTATTGGTCGCTTTTCCAAACGTGGC
AAAGAATTATACTTCACGCCTGAAATTGAGAGAAAATTTGATGCTAAACCGTATTGATTA
TTAGCTTCATAAAATGTATTATAATTTATATAAGGTACTAAATGAAACAATACCAAGATT
TAATTAAAGACATTTTTGAAAATGGTTATGAAACCGATGACCGAACAGGCACAGGAACAA
TTGCTTTGTTCGGTACTAAATTGCGTTGGGATTTAACCAAAGGTTTTCCTGCAGTAACAA
CTAAAAAGCTCGCTTGGAAAGCTTGCATTGCTGAGTTAATATGGTTTTTATCAGGAAGCA
CAAATGTCAATGATTTACGATTAATTCAGCATGATTCATTAATTCAAGGCAAAACAGTCT
GGGATGAAAATTACGAAAATCAAGCAAAAGATTTAGGATACCATAGCGGTGAACTTGGTC
CAATTTATGGAAAACAGTGGCGTGATTTTGGCGGTGTAGACCAAATTGTAGAAGTTATTG
ATCGTATTAAAAAATTACCAACTGATCGACGTCAAATCGTTTCAGCATGGAATCCAGCTG
AAATCAAGCAGATGGCATTACCGCCTTGTCATATGTTCTATCAGTTTAATGTGCGTAATG
GCTATTTGGATTTGCAGTGGTATCAACGATCAGTAGATGTTTTCTTGGGTTAATTGAGGC
CTGAGTATAAGGTGACTTATACTTGTAATCTATCTAAACGGGGAACCTCTCTAGTAGACA
ATCCCGTGCTAAATTATAGGACTGCCCTTTAATAAATACTTCTATATTTAAAGAGGTATT
TATGAAAAGCGGAATTTATCAGATTAAAAATACTTTAAACAATAAAGTATATGTAGGAAG
TGCTAAAGATTTTGAAAAGAGATGGAAGAGGCATTTTAAAGATTTAGAAAAAGGATGCCA
TTCTTCTATAAAACTTCAGAGGTCTTTTAACAAACATGGTAATGTGTTTGAATGTTCTAT
TTTGGAAGAAATTCCATATGAGAAAGATTTGATTATTGAACGAGAAAATTTTTGGATTAA
AGAGCTTAATTCTAAAATTAATGGATACAATATTGCTGATGCAACGTTTGGTGATACATG
TTCTACACATCCATTAAAAGAAGAAATTATTAAGAAACGTTCTGAAACTGTTAAAGCTAA
GATGCTTAAACTTGGGCCTGATGGTCGGAAAGCTCTTTACAGTAAACCCGGAAGTAAAAA
CGGGCGTTGGAATCCAGAAACCCATAAGTTTTGTAAGTGCGGTGTTCGCATACAAACTTC
TGCTTATACTTGTAGTAAATGCAGAAATCGTTCAGGTGAAAATAATTCATTCTTTAATCA
TAAGCATTCAGACATAACTAAATCTAAAATATCAGAAAAGATGAAAGGTAAAAAGCCTAG
TAATATTAAAAAGATTTCATGTGATGGGGTTATTTTTGATTGTGCAGCAGATGCAGCTAG
ACATTTTAAAATTTCGTCTGGATTAGTTACTTATCGTGTAAAATCTGATAAATGGAATTG
GTTCTACATAAATGCCTAACGACTATCCCTTTGGGGAGTAGGGTCAAGTGACTCGAAACG
ATAGACAACTTGCTTTAACAAGTTGGAGATATAGTCTGAACTGCATGGTGACATGCAGCT
GGATATAATTCCGGGGTAAGATTAACGACCTTATCTGAACATAATGCTACCATTTAATAT
TGCATCATATGCTGCGTTAGTTCATATTGTAGCTAAGATGTGTAATCTTATTCCTGGAGA
TTTGATATTTTCTGGCGGTAATACTCATATCTATATGAATCACGTAGAACAATGTAAAGA
AATTTTGCGTCGTGAACCTAAAGAGCTTTGTGAACTGGTAATAGGCGGATTGCCTTATAA
ATTCCGCTATCTTTCTACTAAAGAACAATTGGAATACATTCTTAAACTCAGGCCTAAAGA
TTTCGTTCTCAAAGATTATCAGTCCCACGGTGTCTTGAAAGGAAAAATGGCGGTATAATT
TTAATTTAATTGCGAGGATATATGATTTTACGATTTAAAGATACTTCTGACGTTGTTCTT
TTTACACTTCCTAATCCAAGTGAGCTAGAAGTTCCAGGACCAAATCAGCCTATTATCATT
TATGGCAAAAAATATTATACTCATAAAATGACTCGTGAGTATTTTGATAATAAAATTTCC
ACAGTTAAAACTTCTTCTGACTGTTACTACGATATTACTGTTTTAACGGAAAAACAATAT
GCCGAATTATCACCGCGCGGGCCGTCTATGTCGGGTAGTGAATAAATACAAATCCGACTT
TGATGTTAATATTCACCGTGGTACATTTTGGGGAAATTACGTCGGTAAAGATGCTGGCAG
CCGGGAGGTTGCCATTGAATTATTCAAAAAAGATTTTATACGTCGAATTAAATCCGGAGA
AATAACTAAAGCACATTTAGAGCCTTTACGTGGAATGAGGCTAGGATGCACATGTAAACC
AAAGCCGTGTCATGGTGATATAATAGCTCATATAGTTAACCGATTGTTTAAAGACGATTT
TCAAGTTGAGGACTTATGCAATTAATTAATGTTATCAAAAGTAGTGGTGTTTCTCAGAGC
TTTGACCCACAAAAAATTATTAAAGTTTTATCTTGGGCAGCTGAGGGAACATCAGTAGAT
CCTTATGAATTATATGAAAATATTAAATCTTATCTCCGTGATGGAATGACAACTGATGAT
ATTCAGACTATTGTCATTAAGGCTGCTGCGAATTCTATTTCGGTTGAAGAGCCTGATTAT
CAATATGTAGCTGCACGTTGTCTAATGTTCGCTCTTCGTAAGCATGTTTATGGGCAGTAT
GAACCGCGTTCATTTATTGACCATATTTCTTACTGTGTAAATGAAGGTAAATACGACCCT
GAATTGTTGTCAAAATATTCTGCAGAAGAAATTACATTTTTAGAATCAAAAATTAAGCAC
GAGCGGGATATGGAATTTACTTATTCCGGGGCGATGCAATTAAAAGAAAAATATCTCGTT
AAAGATAAAACCACTGGTCAAATTTATGAAACTCCACAGTTTGCATTTATGACTATTGGA
ATGGCATTGCATCAAGATGAACCTGTTGATAGACTAAAACACGTTATCCGTTTTTATGAA
GCAGTATCCACTCGACAGATTTCATTGCCAACTCCTATTATGGCTGGTTGCCGTACTCCA
ACTCGGCAGTTTAGTTCATGCGTTGTTATTGAGGCAGGTGATTCATTAAAGTCTATTAAT
AAGGCTTCTGCTTCAATTGTTGAATATATCTCCAAACGTGCTGGAATTGGTATTAACGTT
GGTATGATTCGTGCCGAAGGTTCTAAGATTGGCATGGGTGAAGTGCGTCATACTGGTGTT
ATTCCTTTTTGGAAACATTTTCAGACTGCTGTTAAATCATGCTCACAGGGCGGAATTCGT
GGCGGCGCTGCTACTGCTTATTATCCTATTTGGCATTTGGAAGTTGAAAATCTTCTCGTT
TTGAAAAATAACAAAGGCGTAGAAGAAAACCGCATTCGTCATATGGATTATGGTGTTCAA
CTGAATGATTTGATGATGGAACGATTCGGAAAGAACGATTACATTACTTTGTTCAGTCCA
CATGAAATGGGTGGCGAGCTTTATTATTCTTATTTTAAAGACCAAAACCGTTTCCGTGAA
TTATACGAAGCAGCAGAAAAAGACCCTAATATTCGTAAAAAGCGTATTAAAGCCCGTGAA
CTATTTGAATTGCTCATGACTGAACGTTCAGGAACCGCAAGGATTTATGTGCAGTTCATT
GATAATACGAATAACTATACTCCGTTTATTCGTGAAAAGGCGCCTATTCGTCAGAGTAAC
TTGTGCTGTGAAATTGCTATTCCAACAAATGATGTGAATAGTCCTGATGCTGAAATTGGC
TTGTGCACGTTATCTGCATTCGTACTAGATAATTTTGACTGGCAAGACCAAGATAAAATT
AATGAATTGGCAGAAGTTCAAGTTCGTGCTCTTGATAATCTGTTGGATTACCAAGGATAT
CCAGTTCCTGAAGCAGAAAAAGCTAAAAAGCGTCGTAACCTTGGCGTAGGTGTTACCAAC
TATGCAGCTTGGCTGGCAAGTAACTTTGCTTCTTATGAAGATGCTAACGATTTAACACAT
GAACTATTTGAGAGATTACAGTATGGGCTCATTAAAGCATCCATTAAGCTCGCCAAAGAA
AAAGGACCTTGCGAATATTATTCAGACACTCGTTGGTCTCGAGGCGAATTACCTATCGAC
TGGTACAATAAAAAGATTGACCAAATCGCAGCTCCAAAATACGTTTGTGACTGGTCGTCG
CTGCGGGAAGACCTTAAGCTCTTTGGCATCCGTAATAGCACATTATCAGCACTTATGCCA
TGTGAGTCATCTTCCCAAGTTTCTAACAGTACAAACGGTATCGAGCCTCCACGTGGACCA
GTCTCTGTTAAAGAATCAAAAGAGGGCTCCTTTAATCAAGTCGTGCCCAATATTGAGCAT
AACATAGACCTCTATGATTATACATGGAAATTAGCTAAGAAAGGTAATAAACCTTATCTT
ACGCAGGTAGCTATTATGCTGAAATGGGTATGTCAATCAGCTTCAGCGAATACATACTAT
GACCCGCAGATTTTTCCAAAAGGAAAGGTTCCAATGTCAATAATGATTGATGACATGCTA
TACGGATGGTATTATGGCATTAAAAATTTCTATTATCATAATACTCGTGATGGTTCTGGT
ACTGATGATTATGAAATAGAAACTCCAAAAGCTGAAGATTGTTCATCCTGTAAATTATGA
TATAATTTGACTCACGGACGAGTCACCAACTATTAACTAAGTGGAAAATTTATGAGCACA
GTTTTTAATACAAACCCAGTTGATGTTTTAAAAGAACCTATGTTTTTTGGTTCAGGTCTT
GGTATTGCGCGTTATGATATTCAACGGCATCGAGTATTTGAAGAACTTACAGAAAAGTCC
TTATCATTTTTCTGGCGCCCGGAAGAAGTAAACTTAATGATGGATGCTGCACAGTTTAAT
AAGCTTCCTCAGTATCAGCAAAATATTTTTACTAACAACTTGAAGTATCAATCACTTTTG
GATAGCATTCAGGGTCGTGCGCCGTCTGCTGTACTTATGTCATTAATTTCAGACCCAAGC
CTTGATACGTGGGTTGCTACATGGACTTTTAGTGAAACTATTCACAGTCGTTCATATACA
CATATCATGCGAAATCTTTATACTGATCCATCGAAGGTATTTGATGAGATTGTATTAGAT
GAAGCTATTATGAAACGTGCTGAATCCATTGGACGTTATTATGATGATGTTCTGATTAAA
ACTCGTGAATGGGAAAATGCTAAAGAATTTGTAGAACTATCTAAAGAATCTCCTGATGCC
GACTTTCGTTTAAACCGAGCTATTAAACAAGAAGCCGAAGCTAAACGTGCTTTAATGAAA
TCTCTTTACCTCTGTTTGCACGTTATTAATGCCTTAGAAGCTATTCGTTTTTATGTATCT
TTCGCATGCACTTTTAACTTCCATAAGAACATGGAAATCATGGAAGGTAATGCCAAGATT
ATGAAGTTCATTGCGCGTGATGAGCAGCTTCACCTTAAAGGCACTCAATATATTATTCGT
CAACTTCAACTTGGCACTGATGGCGATGAATGGGTTAAAATTGCTCAAGAGTGTGAACAA
GAAGCAGTTGATATTTTCATGGAAGTTAACCGCCAAGAAAAAGATTGGGCAGTTCATTTA
TTTAAAGATGGTGATGTTCCTGGATTAAATACAAATAGCATGTGGAGCTTTATTGATTAC
TTAACTGTATCTCGTATGAAACAGTGTGGTCTTCCATGCCCAATTACCGATGCTCCAATT
AAACATCCATATCCTTGGATTCGTGAATATCTTAATTCTGATAATGTTCAATCCGCGCCA
CAAGAAGTAGAACTGTCATCTTACCTTGTTGCACAGATTGATAATGATGTTGATGATAAA
GTTATGATGAGTTTTAAAAAATACTTTTAAGGAGTGGGCCGCAAGGCCCATTTTATTATG
AAAGAAATTGCAACAGAATATTCATTTATTAAATATACTGAGCTAGAATTAGACGACAAT
GGAAGTATAAAACAGTTATCTATTCCAAACAAGTATAATGTAATTTATGCTATTGCTATA
AATGATGAGCTTGTTTATATTGGAAAAACTAAAAATTTACGCAAAAGAATAAACTATTAT
AGAACTGCTATTAACCGTAAAGACAAAACGTCTGATTCTACTAAATCTGCATTAATTCAT
GCTGCGCTAAAGGAAGGAAGCAAAGTTGAATTTTACGCCCGCCAATGTTTTAATCTTTCT
ATGACAAATGAGTTAGGTACAATGACAATCGCAACGATTGACTTAGAGGAGCCACTATTC
ATTAAACTGTTTAACCCGCCTTGGAATATTCAACATAAGAAAAAATGATGCTTCCACATG
GAGTGTGGTACTATATTCAAAACACAAAAGAGGATACACAATGCAAGAACTTTTTAACAA
TTTAATGGAACTATGTAAGGATTCACAGCGTAAGTTTTTTTACTCAGATGATGTAAGTGC
ATCTGGAAGAACTTACAGAATTTTCTCATATAATTATGCATCTTATTCTGATTGGTTACT
TCCAGACGCATTGGAATGTCGTGGAATTATGTTTGAAATGGATGGAGAAAAACCGGTAAG
AATTGCCTCTCGTCCCATGGAAAAGTTTTTTAACTTGAATGAAAATCCATTCACGATGAA
TATCGATTTAAATGATGTTGATTACATTCTAACAAAAGAAGATGGGTCTTTGGTATCAAC
TTATTTAGACGGTGATGAAATTCTGTTCAAATCAAAGGGTTCAATCAAATCTGAACAGGC
TTTAATGGCTAATGGGATTTTGATGAATATTAATCATCATCAGTTGCGCGACAGACTTAA
AGAATTAGCCGAAGATGGATTTACTGCTAACTTCGAATTCGTCGCTCCAACTAATAGAAT
CGTTCTTGCTTATCAAGAGATGAAAATCATTTTATTGAATGTTCGTGAAAACGAAACGGG
TGAATACATTTCATATGATGATATTTATAAAGATGCTATTCTTCGTCCGTATCTAGTTGA
ACGATACGAAATCGATAGCCCTAAATGGGTAGAAGAAGCTAAAAATGCAGAAAACATCGA
AGGCTATGTTGCTGTGATGAAAGATGGTTCTCATTTTAAAATTAAGTCTGACTGGTATGT
GTCTCTTCATAGCACAAAAAGTTCATTAGATAATCCAGAAAAATTGTTTAAGACTATTAT
TGACGGTGCATCAGATGATCTTAAAGCAATGTACGCCGATGATGAATATTCATATAGAAA
AATTGAAGCATTTGAAACGACTTATCTGAAGTACTTAGACCGAGCTCTATTCTTAGTTCT
TGACTGTCATAATAAGCATTGTGGTAAAGATAGAAAGACTTATGCAATGGAAGCGCAAGG
CGTTGCTAAAGGTGCTGGAATGGATCACCTGTTCGGTATCATCATGAGCCTATACCAAGG
GTATGATAGTCAAGAGAAGGTCATGTGTGAAATCGAACAGAATTTTTTGAAAAATTATAA
AAAATTTATCCCAGAAGGATACTAAGCTGTTTACAAGTCCCTCGTGTTGTGTTATAGTAG
TCTTACTGACATAACATGAGGACTTTATGATGGATTTGCAGCTTATTACTACTGAAATGG
TCGTTGAAGCATACGGTGATACTACAGATGGGATTTCTGTATTCAAAGGAAATCGTCGAG
TTGGATATATCACCGATCTTAAGAAAGATTTAGCTAAGCAAGTCAAGCGGAAAACGACCA
TTAAAGAATATCGAAATCGTCGTCTTGAGCAAGCCCGTGATATGCTTCCTGATGCGGTTG
AAGAGATGAAAGTCTTTTTAGAAAATCAACTCGCTAAGTATGATTGTGAAGTGTTCATTA
ATCAGACTCAGCCTAATGTTCATATCAATAGCTGCAAATGCTATATCATCGTTAATCCTT
TGACTGGAAAGCATCGTCTTGGAATTAGTAATCCAAATCGTAGTGCATCGGATATGGCAG
AAGATGTTGAGGCATGCTTTAAAATTTCTAAATCTCCGGCTGAACATCATATTTTAATTA
ACGGTCTTTCTCAAGACGATATTATAGAGGTTATTAAAACTTTATGCAATTAAGTAATAC
AACAGCTGGATTGCTATTACTTGTAATAGCATTTGGCGGAACATCTATTATTTTAAAAAA
TAAGGTAGAAAGATTAGAAACATCAGTTACTGAAATTACAAAAACAGCCAATGAAAACGC
TTTAGCATTAGATAATTTGCGAATTCAGTATAATTATATTGATGCGATGAATAATAAAAA
TCGTGAGGCAATTGCTGCTATTGAGCGTGAAAATGAAAAACTGCGCAAAGATGCAAAGAA
GGCGGATGTGGTGGCTCATAAGCCAGGATTGGTTGAAAAACAAATCAACAACTCCTTCAA
CAAGTTCGCAGAAGACATCCAGGACCTTTCTAAATGATTAAACTATCAGCAGTAATATTA
TCTATTGGTCTTCTAGTTGGTTGTTCTACAAAGCCTCTAGAAGTAAAGAAAGAAACAGTT
CATCCTAATTGGCCTGTACAAATAAAGTCATATGATGAAGCTAAACTATCTTGGCAAGTT
AAAGTTATTGATGGTAAAGCTTGGGTCGGTATGCCATTTGAAGATTCCCAGGAATTTCGT
ATTTGGCTTAATGATGTAAAACGATATGTACATGACCAAAAAACTATGATATGTTATTAT
CGTCAAGAGCTAAAAGAGGATAAATGTAAATGATTACATGGCATCAATTTGAACATCTAA
AGGGATTAATTTATGAATCCGAGATGGCTGCAATGATTTATGGACGACAGATTCAACGAT
TAGAATCTTTACCTCCAACTAATGATGTTTTATTAGCTCAATCACGTGCTAATCTTAAAA
ATGAATACCAAAATAAGTGGGGTAAAGCATCTAAAGACCTGCATGATTATATTCAATCAT
TGATTGAGAAAAATAAATGAAAACTCTACTAGAACGTTATATTGAATGCTCAGACCGTTA
CATTGACGTATGCCGTGAAAATGTATCAAGCATTAGCGAAGACATTGAACATGCTAAAGC
TTTAGATGATGCTGGTAAAGCCCTGCGAAAAGAAGCGAAAGCTCGTGGGCTTGATATGTA
TCAGCTTAAAAATCACATGATAAAATTTATTTCATCTAATGTTCAAAGTAAATCAGTGAA
TCAATCAACAGCTGAATTGTACAAAGGACGGCGTGAGCATAATATTCGTATTCTTGAAGT
TTTCTTAGGAATTAAATGATGAAAAAGATTATTTTGACTATTGGCTGTCCTGGTTCAGGT
AAGAGTACTTGGGCTCGTGAATTTATTGCTAAGAATCCCGGGTTTTATAATATCAATCGT
GATGATTATCGTCAATCCATCATGGGTCATGAAGAACGCGATGAGTATAAGTATACCAAA
AAGAAAGAAGGCATCGTAACTGGTATGCAGTTTGATACAGCTAAAAGTATTCTGTACGGT
GGTGATTCTGTTAAGGGCGTAATCATTTCAGATACTAACTTGAATCCTGAACGTCGCCTA
GCATGGGAAACTTTTGCCAAAGAATACGGCTGGAAAGTTGAACATAAAGTGTTTGATGTT
CCTTGGACTGAATTGGTTAAACGTAACTCAAAACGCGGAACTAAAGCAGTACCAATTGAT
GTTTTACGCTCAATGTATAAAAGCATGCGAGAGTATCTCGGTCTTCCGGTATATAAAGGG
ACTCCTGGTAAACCAAAAGCAGTTATTTTTGATGTTGACGGCACGTTGGCAAAAATGAAT
TGTCGTGGTCCTTATGACCTTGAAAAATGCGATACCGATATTATTAATCCAATGGTCGTT
GAACTATCCAAGATGTATGCCCGTATGGGTTATCAGATTATCGTAGTAAGTGGTCGTGAA
TGTGGAACTAAAGAAGACCCAACGAAATATTATCGTATGACCCGTAAATGGGTTGAGGAC
ATTGCTGGCGTTCCATTAGTTATGCAATGTCAACGCGAACAAGGTGATACTCGTAAAGAC
GATGTAGTTAAAGAAGAAATTTTCTGGAAACACATCGCACCACATTTTGACGTGAAATTA
GCTATTGATGACCGAACTCAAGTAGTTGAAATGTGGCGCCGCATCGGTGTTGAATGCTGG
CAAGTCGCCTCGGGAGATTTTTAATGGCTTTGCACCATGAAACTTGGGATATTATTAATT
GGCTTGAAGAAAATTATGTGAGGTAAATATGTTTCCGACTTACTCTAAAATCGTAGAAGT
AGTGTTTAGCCAAATTATCGCTAATAATATGTTTGAAAAACTTGATAACGCAGCTGAACT
TCGAATCCACGCTCAAGTGACTCATGTATTGAACACTTTGCTTCCAGACCGGGTGGATTC
TGTTGTTATTCAACTGTATCCTGGGTCAGCGCATATCATTGTCGTATTTGGTCTTGATGC
TGAACTAGTTATTCAAGGCGACATTCGCTTTAAATCTCAAACCGCGGAATTCAAAGCGAT
TTAATAGTTTACTTTACGGTAGAGTTGTGATATTATAGCTCTACCAAAACAAATGAGGAA
ATTGAAATGAGCGAATGGTTTGAAGAAGATAAGGTTTATCGCTTTAAAACTGGGTATAAA
GATATTTTTAATGAAACTTGCGGGGCTAATAAACGAATTGCCCAGTTTATTGATGAAAAT
TCATTTAAAGTAAAAATTGACCCTGCAAAGAATGTTATTAGCATTAAACGCGAAATTGAT
GACTGCTGGTATAAAGCTATTGATGTAATGGGCGAATCCTATAAAGATAGCCCGTTATTT
TCAATTGCTTATATGTTAGAATATTCTTTTTTCGAAGAAGTTCAAAAAGATGATTCTGTC
AGTAAATTTGAAATTAAAACTGATAAAGAAATTAAGTGGAAAGTAGTAGGTATTACTGGT
TGTATGTTCTATATCTATGCTCAAACTGATACGAAGGAAGAAGCTAAAAAGAAAGCTCTA
GAATATCTTGAAGAGTATGAAGAAGGCCCGGTAATGATTACTCAAGATGCTGAATTAGTT
TCTGTCAAATTAGTTAAAAATGTTGAAAGTAAGGAGCTGGGATCAACATGCTAAGTGAAA
AACCAATTACTGTTAAAGAATTCCAAGAAAAAGTTAAAATATTTGCGCAGGAATTAGTAA
ATAAGGTTTCTGAACGATTTCCTGAAACATCGGTTCGTGTTATTACCGAAACTCCTCGTT
CAGTATTAGTAATTGTGAATCCAGGCGATGGCGATCAAATATCGCATCTTAAACTGGATT
TTGATGGATTAGTTGAAGCACAAAGGGTGTATGGCGTACTATGATGAATTTAACTGATAT
AATTGATAATTGTCTTGAAAATGATACTGGTGATCATAGAGCGCTTGATTCTGAAACAGC
AAAGTTCATTAGAATAACTTTAATGAATGATACTCTGGTGAATAGTATTCATCCTTCTGT
GTATGATGCTATTATTGTGACGAAGTATCCAGTTGAGCTTCACAAAAAGATGACTGGCGC
AGTTTTTATTGATAAGAAAAACCGCTTTAAAGATGGGCAGAATATAATTAGTTCTGTTAT
TAAAAGTATAACTAAACTTCGTCACGAAATTTATCGTGTTGAAACTGCTAAATCTGCTTA
TCTGGTGATTATGAAATGAAAGCGAGTACAGTACTTCAAATTGCATATTTAGTATCGCAG
GAATCAAAATGTTGCTCCTGGAAGGTAGGAGCAGTAATTGAAAAGAATGGACGTATTATT
TCTACTGGGTATAATGGTTCACCCGCAGGGGGTGTGAACTGTTGTGATTATGCTGCTGAG
CAAGGTTGGTTGTTGAATAAGCCTAAACATACTATCATTAAAGGTCATAAGCCTGAATGC
GTATCATTTGGTTCAACTGATCGTTTTGTCTTGGCGAAAGAACACCGCAGCGCTCACTCT
GAATGGTCGTCTAAAAATGAAATTCATGCTGAACTAAATGCAATTTTGTTTGCTGCACGA
AATGGTTCTTCTATTGAAGGTGCTACTATGTATGTAACACTTTCTCCTTGTCCAGATTGC
GCAAAAGCGATAGCTCAATCTGGTATTAAAAAGCTGGTTTATTGCGAAACATATGATAAA
AATAAACCTGGCTGGGATGATATTCTGCGAAATGCAGGTATTGAAGTGTTTAATGTTCCT
AAGAAAAACTTGAATAAGTTAAACTGGGAAAATATCAACGAATTCTGTGGTGAATAATGA
AATTTCGTTTGGTAAAGCTCACAGCAATTAGTTCTTATTCCAACGAGAACATTTCATTTG
CTGTAGAGTATAAGAAGTATTTTTTCTCTAAATGGAAGCAGTATTATAAGTCAAACTGGG
TTTGTATTGATAGACCACATAGTTGGAAATCTGATTTAGAAAAATGCCAAAAATTACTTT
CCACTCTTAAAGAACGTGGAACAACTCATATTAAAACTGTAATAGGTAAATAAATGAAAC
TGACGACTGAACAAAAAGTAGCAATTCGTGAAATTTTGAAAACTAAATTGTCCATGGGTG
TTTCAAACGTAGTTTTTGAAAAGTCTGATGGTACTATTCGTGTTATGAAAGGTACTCGTG
ATGCAGACTTTATGCCAACCATGCAAACTGGTAAATTGACGGAATCTACTAGGAAAGAAT
CTACTGACATGATTCCAGTATTTGATGTTGAACTTGGTGCATGGCGAGGTTTTTCTATTG
ACAAATTGATTTCCGTTAATGGTATGAAAGTTGAGCATTTGCTCCAATTTATTGGTAAAT
AAATGCTTTAAGAATTATTTGTTATTATTAATTCATCTGTTAACAAAAAGGAAAAACGAT
GTCTGAAGTACAACAGCTACCAATTCGTGCTGTCGGTGAATATGTTATTTTAGTTTCTGA
ACCTGCACAAGCCGGTGATGAAGAAGTTACAGAATCAGGACTTATTATCGGTAAACGTGT
TCAAGGTGAAGTTCCTGAACTGTGTGTAGTTCACTCTGTCGGTCCTGATGTTCCTGAAGG
TTTCTGCGAAGTTGGTGATTTGACTTCTCTTCCAGTTGGTCAAATTCGAAATGTTCCGCA
TCCTTTTGTAGCTCTGGGTCTTAAGCAGCCAAAAGAAATTAAACAAAAATTCGTTACTTG
TCACTATAAAGCTATTCCGTGTCTTTATAAGTGATATAAATAATAATATGAATTGGGTGT
CGGAATAATAAGTTAACCGAACAATTCTATGTGGTAGTCTACAACTGAGAGATCTGTCGA
AAGAAGATGAAATTCAGAAGAACGTGACTACCGAGTTTTAATCTCTAACGAGAATTTTTA
AATGATTAAACAATTACAACACGCTCTTGAACTGCAACGAAACGCATGGAATAATGGTCA
CGAAAACTATGGCGCATCTATTGATGTTGAAGCCGAAGCTCTTGAAATCCTGCGTTATTT
CAAACATCTGAATCCTGCTCAAACTGCATTAGCTGCTGAGCTTCAGGAAAAAGATGAACT
TAAATATGCTAAGCCTTTGGCTTCTGCTGCGCGAAAAGCAGTTCGTCACTTTGTGGTAAC
ATTGAAGTAATTTATTGGAGATTCACTGCCTTAGTGTGAGCTAAATCGAGGAGCCGTCGA
ACTGTCTGATTAATGATTTGCGAATCATTATAGTTTTAAGACCCCGGCAGTTTTACGGTG
TACCTCTTGAATGTGAATGATGACGGGTTTATGGTTATCCTGGTCGTTAAATATCCAAAA
ACCTATGTTCCCCTTGAGGGCTTGCGCAGGCAATGCCAATAAGTCCTGCATTTTCATTTA
AAAGAGAATTTATAATGGCAAAACAAGCTAAAGCAAAGAAAGCAGTTGAAAAGAAAGTTG
GTGATTCTAAACGCGCTGGCTACAAGCGTGGGTCGAACTCTCGTATCAATCAAACTGTTG
AGAAGATCATGCGCCGAGCACGTGCGGTTCTTCGAGATGATGCTTCTCGTTTTGGTAAGC
AGAAAGCATAAGTTAAGGACTCCTTCGGGAGTCCTTTTTTATTTTCCAAAGATTGCATAA
AGTTGTTTACAGTATGGTTCCTTTGTGATAGTATTATCTTACACAAACAAAGGAGAATAA
AATGAAAACGATTAATCTGAACGCTACAGTTAAAACTAAATGCTTCAATGGTAAATATGA
TGAAACTATGTGGTTCTTAATGGCAGTTGAAGGTGATATTATTGAAGTAGAAACAACAGA
AGGTATGGGAACAGATTTCACCTTTACAATTCAAGTTCATAATTTCTTTACTGGTTGGAT
TTATGAATTGAATACAGTAATCGTTGGAAAAATTGAACAAAATGAATTAGGTGAATGGTA
TTATGTTACAGCTCGCCAACGTGCCGAACGCTTAATTGAGAAGATGAAAAAAGTTGGTAA
ACTTGACATGCAGCATTGGAAAGTAGTAAAATAATTGTTTACTTTGGTACAGGACATGAT
ATTAACCTGTACCGCAATTAAACATCTTGGAGAATAAAATGAACTACATTAACTTTGAAC
GTAAATATGTTTCTAATGGTATTGCAGGTTCTATTGATACTATTTGCCTCTGGAAACATC
AAAATGGATCAGTATGCGAAATTGAACAGTATATGACTCCTAATTACGTTTATATGCGAT
TTGAAAACGGTATTACAGTTTCAATCACGATGGAAGGTTCCAACTTTAAAATCGCTCTGG
ATGATGATTTCCGTGAACGCGATTTAGGGACTCATCCTTGCTGGAATGGCGTTAATCGCA
AGCTTTTGGTTAAAACTTGGATTCGTCATATTCTGAGTAACAGAGCTAAACCTGAGCATC
TTGAAGCAATCTTTGATGTAGTTCTTAACGAATTTGATATTTAAAATAAATGAGGGGCTT
TGGCCCCTTACTGAGGAAAATGTTATGTTTATGACTACTTATTTTGATACCCGCAAAAAT
TTCTGTGAAGTTGTTTTCTCAAAGGCACCTAAAGACCTTCCTGCACATTTGCAACCTACT
AGCGAATCGATTAAAAACTACGTTGATGTGGTTTGTCCTTTAGAGTTTCGTACTGTAAAT
GGGCGCGATACTTTAGCTATCACTAAACTCAATCGTGAAATTGACATTGACCCTTCAATT
GCACGTGAAATTAATAGTTCTGATATTAATGGCGGTAATGTTAAATCGCACGGTTTTCAG
ATGAGGTTTTAATGAAATTCTTTTTAGGTCAAACTGTTGAATTAAAGGGAGTTGGTATAC
CTGGATTAATTTCTAAGGTTCTACCTTCGTTTAAATGGAGTGGTATTCAAATAAAAGAGG
CTTATATTGTTTCTTGGGTAGATGGAAATGAAGACCTTCGTATGGGCGATGAATTATCTC
CTATCTACGGATTAAAGGAATTAGTATGAATATAATTAATAAGATTTTTGGAATTCAGTA
CATTAAGGTCACATATAAAGTAACAGATAAAAATCCGTATACTGATGAACACGAAGAACC
GCAAGTTAAGTCTATTATATTAGAAAAAGGCAGTGACTGGCCAGTTGAATTTCGTCTACC
AAACTGTGGTCATTGGGCTGATGTTGAAATTATAAGCATTGAAAATGTCTGAGTTAGAGA
TTAGAAGTAATTTTAGGTGGCCATCATGTGCATTAAGTAATTTCGCCCATTGGCCTTTCG
TTATGGATGGTATTCAATTTGGAGGTCTTGAAGGATTCCTCCAAGGATGCAAAGTGAAAA
ATGTTGAACAACAACGTCGTATATTTGGTTTATCCGGGCTTGCCGCCCAACAAGCTGGAC
GAGCTTATGCTAGAGCTCAGGACCGTGGCACGTTGTTCTGGCTTGGAGTTCCATTTTCAA
GATACTCTCCAGCGTGGAAAGAATTATACACAAATGCATATTTTGAAGCAGCGATCCAAA
ACAGGGGCTTTCGTGATGCATTACAAGCCTCGAAAGGAAAAGTTTTGAAGCACAGCATGG
CTAGTGGTCTAACAAAAGATGATACAATACTAACCGAAGCTGAATTTATTGATGTGTTAA
ATCTATTAAGAGACTCTCTATGAAGCCAACTATTTTGACTGATATTGATGGAGTATGTTT
AAGCTGGCAATCAGGCCTTCCTTATTTTGCCCAGAAATATAATCTTCCGTTAGAACATAT
TTTAAAAATGATCCAAGATGAGAAATTTATTTCTCCAGGTAAACTCTTTAATTGTGACGA
AGAACTTGGCGTTAAGCTAATTGAAAAATACAATCGTTCGGATTTTATTCGATACTTGTC
TCCATATAAAGATGCCCTATGTGTAATTAACAAATTAAAAGAAGATTATAATTTTGTAGC
TGTTACAGCATTGGGTGATTCTATTGACGCTCTGCTGAATCGTCAATTTAATTTGAATGC
TCTTTTTCCTGGTGCCTTCTCAGAAGTACTGATGTGTGGTCATGATTCTTCAAAAGAAGA
GTTGTTCAAAAAGGCAAAAGAAAAATATAACGTAATTTGTTATATTGACGATCTCGGTCA
CCACTGTGATCACGCGAGTGAAATATTAAGTGTTCCTGTTTATTGGATGGCTCGAGGGGA
ACGTGACAGTATTCCAAAAACTGCTCAGCGAGTTTATACATGGAACGATGTAGAGAATAA
GCTTTTTTCACCAAAGGAAAATAAAGAAAGTTTTGATAGTGAAAAAGCTATAAAAGATGT
AATTGAAAAGATGATTAAAAACGATTCTTTTCCTTGGAACACTACCTGGAGAACTCCTGG
ATTTAATCCTTATAATCATCTATATCATCCATATCAGACGCATCCGTTTCAGACATGGAA
CTATATTAAACCCGGCGGTATAGAGTATTTGTATAATAGACCTACTTGTGGTGATAATAT
TTTCCAAGGAGCATTCTAATGTTTGTTGTTCACACTATTTATGAAAATGAAGGTAATACT
ACACGTGATTACGGTCACGTAAATCAATTTTTAGATGCAATCCAGAATTCCGATCTCAAA
AAGACGAACGAATTTTTAAAAAATGCGTAGAGCAAGGTTTCATTTATATCAAGCACTGGA
TGCAAGGAAATAAAGTTAGAACCACATATCATAAGTCTTTGACTGAGCTTAATGATGAAT
TGATTTATAATAGAGCTGTAAACCAAACTCTGAAGGATGAATAATGATTCTTAAAATTCT
GAATGAAATAGCATCTATTGGTTCAACTAAGCAGAAGCAAGCAATTCTTGAAAAGAATAA
AGATAATGAATTGCTTAAACGAGTATATCGTCTGACTTATTCTCGTGGGTTGCAGTATTA
TATCAAGAAATGGCCTAAACCTGGTATTACTACCCAGAGTTTTGGAATGTTGACTCTTAC
CGATATGCTTGACTTCATTGAATTCACATTAGCTACTCGGAAATTGACTGGAAATGCGGC
AATTGAGGAATTAACTGGATATATCACCGATGGTAAAAAAGATGATGTTGAAGTTTTGCG
TCGGGTGATGATGCGAGACCTTGAATGCGGTGCTTCAGTATCTATTGCGAACAAAGTTTG
GCCAGGTTTAATTCCTGAACAACCTCAAATGCTTGCAAGTTCTTATGATGAAAAAGGCAT
TAATAAGAATATCAAATTTCCAGCCTTTGCCCAGTTAAAAGCTGATGGAGCTCGGTGTTT
TGCCGAAGTCAGAGGTGATGAATTAGATGATGTTCGTCTTTTATCACGAGCCGGTAATGA
ATATCTAGGATTAGATCTTCTTAAGGAAGAATTAATCAAAATGACCGCTGAAGCCCGTCA
GATTCATCCAGAAGGCGTGTTAATTGATGGCGAATTGGTATACCATGAGCAAGTTAAAAA
GGAGCCAGAAGGCCTAGATTTTCTTTTTGATGCTTATCCTGAAATTAGTAAAGCCAAAGA
ATTCGCCGAAGTAGCTGAATCACGTACTACTTCTAATGGAATCGCTAATAAATCTTTAAA
GGGAACCATTTCTGAAAAAGAAGCTCAATGCATGAAGTTTCAGGTCTGGGATTATGTTCC
ATTGGTAGAAATATATGGTCTTCCGGCGTTTCGTTTAAAATATGATGTACGTTTTTCTAA
ACTAGAACAAATGACATCAGGATATGATAAAGTAATTTTAATTGAAAACCAGGTAGTAAA
TAACCTAGACGAAGCCAAGGTAATTTATAAAAAGTATATTGACCAAGGTCTTGAAGGTAT
TATTCTCAAAAACGTTGATGGGTTATGGGAAAATGCCCGTTCAAAAAATCTTTATAAATT
TAAAGAAGTAATTGATGTTGATTTAAAAATTGTAGGAATTTATCCTCACCGTAAAGACCC
TACTAAAGCAGGTGGATTTATTCTTGAGTCAGAGTGTGGAAAAATTAAGGTAAATGCTGG
TTCAGGCTTAAAAGATAAAGCCGGTGTAAAATCGCATGAACTTGACCGTACTCGCATTAT
GGAAAACCAAAATTATTATATTGGAAAAATTCTAGAGTGCGAATGCAACGGTTGGTTAAA
ATCTGATGGCCGCACTGATTACGTTAAATTATTTCTTCCGATTGCGATTCGTTTACGCGA
AGATAAAACTAAAGCTAATACATTTGAGGATGTATTTGGTGATTTTCATGAGGTAACTGG
TCTATGAAAGCTTACTTAGAAACAATTGTCATTGCTCAAAAAGAAGGTGGAGATGTTTCT
ACTTCTGTATCACAAGTCATTCTCGAATTTGTAGATGCATATGCTTATAATAAATTCACA
GAAACATTTGATGCCTATGAAAAAGGTCCAAAGTTTGAAATATATCGTACTCTCTTACCG
TTAGATTATTAAAGGCCTTCGGGCCTTTAATTTTATAAATAGAATAAACACTAGAGAGGA
TATGATGGAACTAATTACAGAATTATTTGACGAAGATACTACTCTTCCGATTACAAACTT
AAATCCAAAGAAGAAAATACCGCAAATTTTTTCAGTTCATGTTGATGATGCAATTGAACA
ACCAGGCTTTCGTTTATGTACCTATACATCTGGAGGTGATACTAATCGCGATTTAAAAAT
GGGCGATAAAATGATGCATATTGTTCCTTTTACATTAACTGCTAAAGGTTCAATTGCTAA
ATTAAAAGGTCTTGGTCCAAGCCCAATTAATTATATCAATTCGGTTTTTACTGTTGCAAT
GCAAACAATGCGTCAGTATAAAATTGATGCTTGTATGCTTCGTATTCTTAAGTCTAAAAC
CGCTGGTCAAGCTCGACAAATTCAAGTTATTGCTGATAGACTTATCCGTAGTCGTTCAGG
TGGCAGATACGTCCTTCTTAAGGAACTCTGGGATTATGATAAAAAGTATGCATATATTCT
TATACATCGCAAAAATGTATCACTAGAAGACATTCCAGGAGTTCCGGAAATTAGTACCGA
GCTCTTTACTAAAGTTGAATCGAAGGTCGGTGATGTTTATATCAATAAAGATACTGGAGC
TCAAGTAACTAAAAATGAGGCAATTGCAGCATCTATTGCACAAGAAAATGATAAACGTTC
TGACCAAGCTGTAATCGTTAAAGTTAAAATTTCACGTAGAGCAATTGCACAAAGTCAGTC
GTTGGAATCTTCTAGATTTGAAAGTGAATTATTCCAGAAGTATGAATCTACAGCAGCTAA
TTTTAATAAACCAGCTACTGCACCTTTAATTCCCGAAGCAGAAGAAATGAAAATTGGAAT
TAATTCATTAGCTTCTAAAACAAAGGCAGCAAAAATTATTGCTGAAGGAACGGCAGATGA
ACTTCATTATGACTATAAATTCTTTTCAAAAAGTGAGGTTAATGAAGTTTCTGAAAAGAT
TAAAGATGTAATTCTTAATGCGATTAAAAATGAACCAACTACTTCAATAAAATGTTTAGA
GAAATACGCAGCAGCCGTTAATCAATTCTTTGAAGAATATAAAGATAATTGGCTTGATAA
ACATAATAAAACCCGTAAAGGACAGCCAGATGAAGTCTGGGAAGAAATAACTAAAAATTC
CTGGAACGCAGCAAAAACTAAATTCCTCAAACGAATGATTTATAGCTTTTCTGGAATTGG
TGCAGGTCCAATGATTGATATTACTATTGCCCGTGATGGTTCTAAATATACTCCATCGCA
AAAGCGTGGCATTAGAGAATATTGCGGTTCAGGATATACTGACATCAATAATCTTCTTTT
AGGCCGCTACAATCCAGAACGATATGATGTAATGAGTGAAAAAGAAATTGAATCTGCTAT
AAATAACTTAGATTCAGCTTTTGAAAATGGTGACCGTATACCAGAAGGCATTACAGTTTA
TCGTGCTCAAAGTATGACTGCTCCTATATATGAAGCGTTAGTTAAAAATAAAGTGTTCTA
CTTCAGAAATTTTGTATCTACTTCTTTAACTCCTATCATTTTTGGACGTTTTGGAATCAC
ACATGCTGGTATTGGTCTTTTAGAACCAGAAGCTCGCAATGAATTAACAGTTGATAAAAA
TGAAGAAGGAATAACTATTAATCCAAACGAAATAAGAGCGTATAAAGAAAATCCTGAATA
CGTTAAAGTTCAAATAGGATGGGCAATTGATGGAGCTCATAAAGTTAATGTTGTATATCC
AGGAAGTCTCGGAATAGCAACAGAAGCTGAAGTTATTCTACCACGCGGATTGATGGTCAA
AGTTAATAAAATAACTGATGCTTCTAATAATGATGGAACAACATCTAATAATACAAAACT
CATTCAAGCTGAAGTTATGACTACGGAAGAACTCACCGAATCGGTCATTTATGACGGTGA
CCGTCTAATGGAAACCGGCGAAGTAGTTGCAATGACAGGTGATATTGAAATAGAAGACAG
AGTTGACTTTGCATCATTTGTTTCATCAAATGTTAAACAGAAAGCAGAATCATCTCTCGG
AATTATTGCGTCTTGCATAGATATTACAAACATGCCTTACAAGTTCGTTCAAGGATAAAT
CATGGAACTTATTACAGAATTATTTGACGGCGCTTCGGCGCCGGTTGTTAACTTAAATCC
TAAGCATAAAATACCTCAAATTTTTGCTATTCAAGCCGGTGAAGAAAGCGTGCTTCCTGG
ATTTAGATTTTGTACATACACCTCTGGCGGTGATACAAATAAAAACGTTAAGCCAGGCGA
TAAAATGATGCATATCGTAATGATAGGTGTTAATGAGAAACTATCATTAGTTAAACTTAA
AAACTTGGGTGGAAATCCAATTGGTGTCATTAATGCGGTTTTTGATACTGCTCTTCAGAC
AATGAAACAATACAAAATTGACGCATGCTTATTCCGCGTACTAAAGAGTAAAACAAATGG
TGCAGCTCGTCAAATGCAAGTTATTGCCGACCGTTTAGTACGTACTAAAGGAGCAGGTCG
ATATGTTCTTTTAAAGGAAATCTGGGATTACGATAAAAAGTACGCATATATTATGGTTTA
CCGTAAAAATGCTAATTTAGAAGACATTCCAGGTGTACCTCCTATTTCAACTGAGTTATT
CACAAAAGTTGAATCAAAGGTTGGTGATGTTTATGTAGATGTTAAAACAGGTAATGCTGT
TCCTAAAGCTGTTGCTGTTGCTGCTTCTATTGCTTTAGAAAACGATAAGCGCACGGATCA
AGCTGTTATTCAGAAAACTAAAATTAGTCGTCGGTTAGCAGCACAAGCTCAATATTCTAC
TGTCGATGCTTCACTTCAGGGTGATAGCTTCGCTGCTAAGAAATATCAAGAGTTTGAATC
TAAAGTTCCGGTATATAAAGCAGAAGGACCAATGAACTCTGGCGTTATTCAGGTTGGTTC
AAACTTCAGCAAAGGAGCTATCGGTGGTATGAGAAGTGCTTCCCGTTTTAAATCTAGTGA
TTATGAATTAGAAAGCTTCCGAAATCATATTGCATTGGCTCATGCGCGTTTACGTGATCC
ATCTATCAAGTTACAGAGCGATATAACATATCAAGGTTCTCAAGAATATTTAAAGAATAA
AGAATTTTTTGATTATAAAACTGATAAAATTTTAAGCGATCTTGCTGACATTAATATTTC
TAATAGCTTTGATGTTATTAAGAAAATTGTCAATGATTTAGTTAAAGGTTCTAAAGCCAC
ACCAGATGAAAAGGTAGCTATTGTTCAATTTGTCATGAATGGCGTTTATAAATTGATTAA
TGAGTCTGCTTCTCAAGCGTATGAATATGCAAGTACTGAAGTAACTCCAAAAGGATTAAC
TCAAGCTGAGTCTGATGTAATTGAAGATTATTGTGCAGATTCATATGTTGAAATGAACTC
GTTCCTTTTAGGTAAACCGGATTCTACCCGTGAAGAATATATGGAACGAGCTATTAAACA
CATCGAGACAATGGATTCTGCCTTTGCCAAAGGATCAGTTCTTCCTCCAGGAACTACGCT
TTACCGTGGCCAAGAAGTTACCTTTAAAACTTTACGTCATAATATTGAAAATAAAATGTT
CTATTTCAAGAACTTCGTATCCACATCGCTTAAACCAAATATCTTCGGTGAGTATGGTAA
AAACTATATGGCCCTAGATGATTCCAGTGCAGTATTTTCTGGTGAAGGAGAAGGTTCAGT
TGACGCAGAAGATTTGATGCATATGGGCAGTCACTCTGCTTATGCGAATGAAGATGCTGA
AACTAGCGTAGGTATGGTAATTAAAGGAGCTGAGCGAATCAAAGTTATCGTTCCGGGTCA
TTTATCAGGATTTCCATCAGAAGCTGAAGTTATTTTACCACGTGGAATTTTGCTGAAGAT
TAATAAAGTGAGTACGTACATGATGAAAGAAACTGCTTATAACAAGTATCTAATCGAAGG
CACAATCGTTCCTCCTTCTGAACAATTAGAAGAATCGGTATATGATGGCGACCATCTAAT
GGAAACTGGTGAAGTTCGTCCAATGACTGGATTTAATCAATTCCTTGTAGAAGAATCAAA
AGAAGAGGAAAACGAAGTTTCTCAAATCTTGGCTTCTTTGGTTAATATTAACGGAATGTC
TAAAAAGTTCAAAATGTAGTTTACAAGTCCCTCGTGTTGTGTTATAGTAAACTTACTGAC
ATAACATGAGGAACACAAAATGAAATCTTCTTTGCGCTTTTTAGGTCAAGAACTTGTAGT
TGAAGGCGTTATTCCTGCTGATAACGCCTTTAATGAAGCAGTTTATGATGAATTTATCAA
AATTTTTGGAACAGATAAAAAGTTCGGAATTTTTCCTTCTGAAAATTTTTCAAAGCCAGA
ACAGACTGAAAGCATTTTCCAAGGTGTAGTAACAGGCAAATTTGAGTCAGAAGCTCCGGT
AAAAATTGAAGTTTATATTGAAGACAGTTTAGTTGCTTCAGTTGCTGCTTTTATTTCATT
CCGTAAATAAAAACATGGGGACCGAAAGGTCCCCATTGTTATATTGCTCCTAATATTTTA
CTTTGCGAGTTGACAATTCCCGTCATAGTATTAATGTTTGAAATGCTTCCAGCAGTTCCT
CCTAATCTACTAAGTCGTGAAAGCGAATTAGATAGTCCAGTAACGCCTCCGCTATTTCCG
AGAACGCTTTGAATACCGTTTATAGCAGCAGATTCAAGCCATTCAAGCGCAGCTTGTCTA
TCAACTGCTCCAGCCTGCATGACTCTATACGCAAAAGTAACATCAAATGTAGTTATTTGG
TTATCTCCATCATATGATAACTCAGGAGCGCTCACTGACACTGGAATGCATCCGGTGAAC
ATCACTGCAGTATGAGGCAATCCATTACGAGAATGAAGATTAACTTGAATATCTGCCTCG
ACATCCTGTGGCAAAGCACGCAGTCCAGTTACTGGGTCTTGAACAGCGTTAACCCAGTCT
TGCATCGCACGATAGTTACAAGCTTCTGAATCCATTCTAAATGAAATAACCAAAGGGTCC
AATTCTCTCCCAGTTATACGAATATTAGGAGAGTTATAATTCCAGTCAGTTTCATAGGAT
AATCTATTCTCTGGCATTTTTACAGAGTATATCATCAATCCAGATGAATTATATGCCATA
TTAAAGAAGTCAATTAAATATGTACCAACTGTAAATGAGCCCAATAAACTTTGAACTGTA
CGTTGACTCATGGCACCAATAAGATATTTACTAACCCCTGATTTTCTTATCAGTTTTTGT
GTGCCAGCAGTAATTAGCGTGGTAATTCCCTGATTAATATCGCCTTGAGACAATCCTAAC
CAGTCTGAATTTAGACCCAAGTTATTATAAGAAAAGTTGCTAATTGAACTTATCAACGAA
GAGCTTTTAGTTGATGGAGTTGTCGCAAAAACGCAGCTAAACATATTATTACGTTGGAAA
TCTGCGTTTATTGCTTGATTATTAAATTCCTCTAAAGAATACATTAAAAAGTCCCCGCAT
ATAAAGAAGCACGGTTTAACGTGATAATTTCTCTCATAGTAATCTCAAGGGTAAATGTAC
TAGGGAGGTTTGGAGCAATAGCTAATCCGTTAAAGTTACCATTAGGTGTTTTATCAAATC
TGATACTCTGTATTTGACATGGACCAAATATTTCCGTTTTTCCATCAAACTTAGATGTTG
CACCAAAGTTTTTCACCATCCAAATTGTCGGGTTTGAAACTACTAGAACGTTAGTTAAAC
TCGATGTCATTTTCTCAAATAGTGTTTTATTTTTAGCTGCGTCTTCCGGAGATAAAGGTT
CAATTAACGTAGAACGATACCAATCATCTAAATACCCCTTTATTTCAGCAGCATATTGAG
ATTTACCCGTTTCACCATAAGAAAAATAGTTAAAATATTGATAGATATTAATAATAGCCA
TTAAATCTTCTGTTGAACGTGGAGTCAAATCCCATGTAAACACTTTAGTTCTATTTTCAG
CACCACCATACATACTTCTGGCTGTCGTATAAATCTGTTCATTATTATCAGCCATTATAC
CTTGTGTTATACTTTCCAGCGCCCCAAATACTGCGGTTGAAGCAATATTACTTAGCACAC
CAGTAGCAGTACCTCCGCCTCTACTGATAAGGCTTTCTTGAACATCATTAAATCTATGTG
ATGATGTATCAACATCAGATTTAGATCTCGGTAAAAGAATGTTTGCGATAGGAGCTTTAC
TTATTGTTCCTGAATTATTATTTGATATTAATCCATTTGATAGTTTTGATACTGTACTAC
TAATAGTGTTTCTGGCTGTACGTAAAATACTCGAAGATGAAGAAGAGTAGTTAGATCTCA
TCGATCTAAGACTTCCAGAATCCCTAGATGACATATTGTATGCAGTAAATAATAATCCAT
TCTTATATAGATCTGTCACCTGGAAGTCCCCTGTAGTGTCATTACCACTAGCACGCCCAG
TTGGAAACTGGGCTGTGTATGTTTTAGTTCCTACTTCTGATTTAGTACTCTGCCCGGCTG
AAATTTTCTCACCGGACTTTTTAATTAAATCAGCAGTTATTTCTTTAACAATTGCCATAT
TATTCCTTAATTAACCCCAGTCGCATCAAATACACCAGGAGCAGTTGTGCTTGTGACAGG
TGTCATATTATGAACGACAGTATTTTTCTTAATAACATTATTAGTATTATTGATCGAAGG
AGATGCTTGTTGAACAGGAGCTTGTTGTGCTTTGTTCTTTTCTATTACCTGGACTTGTTT
TGCTTCTGGTGATTTAGCAGAAGTTTCAGGTTTGGCAGTAGGCTGATTTTTCTTGAGCTC
TTGATAAGTAGCATCAATTTTAGAAAATCTAGCAGCAAGTTCTTTTTTAACTGCCGGTGA
ATTATTTAAATCAGGGTCATCCATCCGTTTTTTAAGGTCTTCATAGGCAGATTCAACTGA
TTTAACTGTTGAGTCTTTACTCATATCAGCTGAATTAGCGTATTCATCAAAACGATTCAT
AGCAGCACGAGCTTCATTAGCTTTCATTAAAGCAATTTTAGCTTCCTCCGGAGAAAGTTG
CTTTAATTTTTCTTCTTCCTCTGCCCTCTCTTCATCAGTCGTTAGTGCTTCTTTATTATC
AACGCCACGAATCCAGTTAGATGCACGAGTTTTCCAGTTCGCAATTTTGTCTAACCCTTT
TGCTATCGGACCAAGTTCTCCATTCATTCTTTTATATTGATAGTTTGCAACTTTTTCTTG
GTCTTCTTTGTTAAGAGAAGCATTTGTAGTATTTTGGAAATTTTCTAGTGCTCTTCCTTC
TACTTCATCAGCAGTATCCTTCATGCCAGGAATGACTCGAAGAATTGCAGCAGATAATTT
AGCCATTCCAAGTTGAATAAGTTCACCTAAATTATAAAGAACCTTTCCAAGTCCTTCTAC
AATAGCTACCGTCAAACCGCCCCAATCTCCCGCTTCCCAGAATTTTTTAATTTCATCAAT
AGAACTAAAGATGCTTTGTAATAAAGGACCCCATGTTCCGGTTTCGCTAGAGAATTTAGT
AAAGTCTGTACTAAACAAATCCCAAGCCTGCGAAAATTTATCTGACCAATATTTAAAATG
AACCATCAACAGGTCTATTCCGACAACAACAGCCAATATCATTGCAGTCATTTTAGCAGC
TTCAATAGCAGCGCTGACGGTATACTTAAATAACATGCTTGATATTTTATCAGTAATTGA
AATGGATTTCTTAAATCCAAAATCAACAGTCTTTGTTAATTTATCTAAAGCTTGAGATAA
TTTTAAGTTAAATGCGTCTTTTTTCTGTTTTTCTTCTGGCGATTCTTGTTTGGGCTCAAC
TGGCTGAGGGGTAGGGAAAAAATCAGCATCAGGATCATTATTAACTGCTTCAGGAGCCGG
TAATAAAGGACCCACAGATTCAGCTGTATCATCCTCAACAACTTTAACAGGAATAGCGCT
TTCAACCGTGGCTAAACTAGTTCCTGTTTGTTGAATTCCGGCTGTCTGAATTTTTTGCTC
TAGTAAACTTGTTAATTTATCTAATTTGCTCCCGAGTGATTCACCGATTTCTTTATTAAT
ATTGTTGCCAATTTCAACAGTTTCAGCAATTAACTCGGAACCAGCAGTAGTATCACTCAC
TGCGTTTTCTACGTTGTCAATTGCTCCAATTATTTCATTCGATTTTTCTTCGACAGTTTG
AGCAATTAATTCAGAAGCAGCTTGAGCATCATCCAATTTCGTAGATATATCGTTAAGTCC
AGATAAAGTATTGGAAGCGGATTTAGCCGCTTCCTGTGTTGGTTTATTATCTGAAATAAC
TTTTCTACGCATCGTTTGCATTTCTTGTGGCTTTTTCATTCAAATAATCCAATAATATTG
CCAATTCCAGTTATTGGACCATTAGGGCCAGGAATTGCTAAAGTTGTAAAAATGTCATTT
GCCCATTTTAAAACGAATGCTGGCATCTCAAGAAAATTAATTTCTTTAACTTCATCATTG
ACCTTAAGCAAGCATTTGGATAACATATCGCTCACAGTTAAAAATTGTTCAAATTTTCCA
GGAGGTCTAAAATAAAATGTATTTCCTTGGTATTGAAATTCTAATCTTTGGCACACATAA
ACATCATTAATGTCATAAGTATAACCATCTATTTCTTTACGAGATTTAATCTTTCCATTA
AATTCCAATAAATGAATAGAAACGAAATCAACTTCTGCCGGTGATAAATTCGGACAAATA
GAATCAATAAGAAGTTTTAAATTTTCATCAGGACCTTTAACATCTTTTAAAATGTTATAA
TGTTTAAGACCCATTTTAGGAATAGAAACTTCTTTATTGCTTATTGGAAGAACTACTTTC
TTCAGTGGTAGTATCAGATTTAAATTCATTTTTAACCTTAACTGGGTCTATTGTTTCCAG
TTTCGTTGCATTAGTGAACATATATAGATGAGTTACTGAATTATTATTGGATAATTCATG
GATGACTTCATCAACGTAAAATTCTGTTTTAAATTGGTTTTTACTATCATTAAAAATAAT
TTTAACGCCAGGTGTCAAGTTAAAATTACCGACAGTAGAACATTTAGCATAGCCATCGTA
TTGCGCCATAGTTTGAAGACGAATAGCTTCTTCATATCCATTCCTATAAGTCATTTCAGA
ATAAGCACCTGACCTTGACACTACAATAGAGTTTTCACCTTTTCCTGTAGTAATCATTGG
CAATGAAGAATCTAAAAATGAATGCGCATAGATAGTAGCATTTTTCATTGGGTCACGTTT
GTGAGGATTCGATTTAGTCAACCAAACGAAATCATATGCTAATGGATATTTTAATTCTTG
GATGAATTGACCTATTAAAGATGGCTCACCGACAATCATTGGGTATGGTTCTTGATTTAT
CATCATATCATAGTCCATCATGTTAACTCCCATGATGTCTTGCCATACAAATACAAATTT
GTCACTTCCTACAGCTAGAGCAACTTCTCTGACATATGACAAATAGTTTTCAAATGTACT
AGTCCACGGAATATCAGGAACATAAGCATTTATAGCATTTATTGCTGGAGTCAATAGCGT
ACGGTCTTGATAAATGACGCCAAGCATTTCCTTTATAGATTCACCTGCATCAGGGAAAAA
CGGTCTGCCAAATTTAAGATTTTCTATAGAATGAATAGTTCCCAATTCAATAGCAATGAT
GTTATCACCCTTTGAATCTACTGACACGGAAAAATGCTTACATCCATAAATTCTTGTTTT
AACATTATTAATATCATTTGCATTAGCTACAGAAATCTGAATTATTTCATTTCCATCCAT
TTTTGTATGGATGTTTTTAGAATCATAAAACTGCAGCATTCCTTCATTTCGGCCATAAAG
AGAATCCCGCATAGTTAACGTGGTAATAGTAGCAGCTAATTCAACAAATCTATTATTACT
CCAAGCGTCGTAACTATCAAACAATTTAACGCTGAGATTTGGATATCCTGGGCGTTGCAA
CATACTCATTATTGTTTATCCTTCTCAATCAGTTTTAATACGAATCCGCGCTCGGCAGGA
ATCATTTTCATTATTGAATTTAAGCTATAATTACTTTTTACAAGTGTGTGATTAATTTGA
TAAAAAGTAAATATTTCATCTGGGTTAACTAATAGCTTAAACACATCTACTATATCAGTG
TATTTTTTTACATACTTATTACAACACGACATATGCAATGTTAAATTAATAGGATTCATT
GCATCGAGAATTTTTTCTAATGTTTCTATCTCGATTGCATCAACAAGTTCTATTTGACTT
GATTCGCTAATTTCCTTCCAATCATACCATGTTTCATCTACTTGAACAGAATGAATATTT
TCAGTAATCATCTTTGCTTTATTTTCATAAAACTCAGAAGGAAACTTTAATTTAATTTTA
ACATTAGCTACATCAAAAACAGGTTCCTTTAATTCTTTTTGATATATTTCAAATGGAACT
GTCTTTTCTTTTTTACATTTTGGACATACAAATGTGACCGGTACTTTAGTTTTACCTATT
GACCCTACAAATACCTGCAAAAATATAAATGGTTGCCAAGTCTTCGGATAGTCTCCAAAA
TAATCGGCAATTAAGTCAGCAATTATTTCTTTTTGTTCTTGTGGTGACCGATGTTCTATA
TCGTTTCGAACTAACAAAAAATCTCGATAATCTTCTACCGTAAATGGTTTAAAACGATGA
ACACCATCTGGTAATTTACAACGAATAATGTTTGCCATAGATGCTCCTTTTATTCTATTT
ATAAATATGATAAATAAAGGAGCTAAATATGTATGAATACAAATTTGATGTGAGAGTTGG
TTCTAAAATAATCAACTGTCGCGCATTTACTCTTAAAGAATATCTAGAACTTATTACTGC
TAAAAAGAACGGTTCAGTAGAAGAGATCGTTAAAAAGCTAATTAAAGATTGTACAAATGC
AAAAGATTTAAACCGCCAAGAATCAGAACTCTTGTTGATTCATTTATGGGCACATTCTCT
TGGGGAAGTTAATCACGAAAACTCCTGGAAGTGCACCTGTGGAACTGAAATACCAACCCA
TATAAATCTATTACATACACAAATAGATGCACCAGAAGACCTCTGGTATACACTGGGTGA
CATCAAAATTAAGTTCCATTACCCTAAAATTTTTGATGATAAAAATATAGCCCACATGAT
AGTATCATGCATAGAAACGATTCATGCTAACGGGGAAAGCATTCCAATTGAAGACTTGAA
TGAAAAAGAGTTGGAAGATTTATATTCTATCATCACAGAGTCAGATATTGCAGCTATAAA
AGATATGCTTTTAAAGCCTACTGTTTATTTGGCTGTTCCAATTAAGTGTCCAGAGTGTGG
AAAAACCCATGCTCACGTAATAAGAGGCCTCAAAGAGTTCTTTGAGTTACTATAATGGCA
AATATTAATAAGCTTTATTCTGACATTGACCCGGAAATGAAAATGGATTGGAACAAAGAT
GTTTCCAGATCACTTGGATTAAGGTCAATTAAAAACAGTCTTTTGGGAATTATTACAACA
AGAAAAGGTTCAAGACCGTTTGACCCTGAATTTGGATGTGATTTATCAGACCAGCTTTTT
GAAAATATGACTCCTCTTACTGCTGACACAGTTGAGCGCAATATCGAAAGCGCAGTAAGA
AACTATGAGCCACGTATTGATAAATTATCAGTTAATGTGATACCAGTTTATGACGATTAT
ACTCTGATAGTAGAAATACGCTTTTCGGTCATCGATAACCCTGATGATATTGAGCAGATA
AAACTGCAATTGGCTTCCAGTAATAGAGTATAATGCTTCACGTATAAACGTGGTATAATG
AATCTAAGTCCATCCAATAACAATTGAATAGAGAACAATATGAGATTAGAAGATCTTCAA
GAAGAATTGAAGAAAGATGTGTTTATAGATTCGACTAAATTACAGTATGAAGCAGCTAAT
AATGTGATGTTATATAGTAAATGGCTTAATAAGCATTCAAGTATTAAAAAGGAAATGCTT
AGAATTGACGCACAGAAAAAAGTTGCTCTTAAAGCTAGATTAGACTACTACTCGGGACGA
GGAGATGGTGATGAATTTAGTATGGATCGTTACGAGAAATCAGAAATGAAGACAGTTCTA
TCAGCTGATAAGGATGTTTTAAAGGTTGATACTTCATTACAGTATTGGGGAATTTTATTA
GATTTCTGTAGCGGAGCTCTTGATGCTATCAAATCACGTGGATTTGCTATTAAGCATATT
CAAGACATGCGAGCATTTGAGGCTGGAAAATAATGAGATATAGCATTGATGATGCTTTTA
ATTATGAAGAAGAATTTGAAACGGAAATTCAATTCTTAATGAAAAAGCATAATCTTAAGC
GTCAGGATATTCGTATCCTAGCCGACCACCCGTGTGGTGAAGATGTCCTTTATATTAAAG
GAAAATTTGCCGGATATCTTGATGAATATTTTTATTCTAAAGATATGGGCATTGATATGC
ATATGAGAGATATGGGGTAAATATGACAGATTATAAAGAAGTATTTCGACTATTAGCAGA
GATGGAAGCTTGCTTAATCCGTGTACAAGAAATGCGGATTAAAATGGGTTTATAAATATT
ACTATATTCAAAAGGAGACAATCATGTCAGATAAGATTTGTGTTGTCTGTAAAACTCCAA
TCGATTCTGCATTGGTTGTTGAAACAGACAAAGGTCCTGTACATCCTGGGCCTTGCTATA
ATTACATTAAAGAACTACCAGTTTCAGAAAGTTCGGAAGAACAATTAAATGAAACACAAC
TTTTGCTATAGTGTGACCTTTAGTCTATAGTTTTGGCCCTTCCTTTTTGGTTGGGCCTTT
TTTAATTTAAAAGCTTTCTTCTACTTCATCGTCTGAATCTTCTAATTCAGCTCTTTTTCC
TGCCAAAGCATCTCTCACAGAGATGTCATCAGTATCTTTTAATTCAGTTTCTTTGACTCT
TTTCTTGTAATAAGCTTCAAGTTCTTCTAAACCTTCTAATGTTTGACAAGAGGCAATTTT
ACCCATAAATTCATCAATAGAAGCTTCATAAAGAAATTGTTTAAATTCTAGTAACATCTT
TTTCTCCAAAGGGCCGAAGCCCTTATAAATTAACTGTTTTCATTACGTAATTAAATTTTT
CATCTGCGTAGCGCTGAATACGATCAATGCCGTGTTTTAAAAGATAGTTCAAATGAACGT
ATTTCTTTTTCGTATTAGCAGATTTTGGCTTAACACCGCAATCATCTATGAGGTCCCAGA
CCGTTGCGATTGTTTTAGAACCATGCTTACGTAATACGCGACCTATTGTTTGCAATACAA
TAATTTTAGATTTAACACCGTGCGCTAAAACAACGTGATGCAGATTTTTAACTGAAATAC
CAGTAGAAAATACACCATAACTAGCTACTATAATTATTCCTTTACCGTTTTCAGCTAAGG
TTTTCATTACATTGCGTGTTTCAGTATCAACTTCCCCTGATACGTAATAAACTTTATCGT
ATTCATTTTTAATTAAATCGAAAATAGCTTTACCGTGCGATACGTGTTTAAACATGACAA
AAGCGTTTTCATCTTTTTGTGCAAGCTTAATAGCTAATTTAGCGATCCATTTATTTCTTT
TACTAAGCCCAGTAATAATTTTTATTTCTTCTTGGTAAGTTTTTCCCTTTAATTTAGTAG
TGAACTCATCGGGATAGCGAAGAAAAATACTATTAATTTTTAACTCAGTTACTTGTCCAT
CTTCCATTAATTTAGAGGTCGTTACTGGCTTAAATATTTCACCGAACATTCCAACATACT
GCATGATATTGGCTTTGCCATCACGTAATGAACCAGACAAACCGAATTTGAACATGCAGT
TATTTAAACCTGATATGATAGATGAAATACTTTTTCCTGTAGCAAGATGACATTCATCAT
TCATCATCATTCCAAACTGTGAGAACCATTCTTTCGGTTGTTTTACTACAGTTTGCCATG
TACCAACAACGACCGGTGCATCATTTTTATATTTATCATCTTTTGATGCTCCACCACCGA
TTTTCTTTATCATTGCATGACTGAATAAACGATAGTCAACAAAGTCATCAGCCATCTGAG
TTGTCAGAGCAGTTGTTGGAACAATAATAAGAATTTTGCCTTCATAATTTTCCAAATAAT
ACCGAGCAAGCAAAGCTTGAATTAAAGATTTACCTGCGGATGTTGGAAGATTAAGAATTC
TACGACGATTAACTAATCCTTCGAACACTGCATCTTTTTGATACCAATGCGGTTCAATTC
TTTTATTTCCTGAATAGATTTCTAATTTAGAAAGCCATTCATCAAAATCTTTTCTTGATA
ATTCTTCTTTTTCGTTAATCTGTGGGTCAATCCAGGCTTTATAGCCAAAGTTATCGCAGA
ACTTTTTAATTTGCCCGACTAAGCCGAATGGAAGAAGACGATTATAATCTAAAAGACGGA
TTCGTCCATCCCAGTTGCCATATCTGAAGCGAGGGTTAAATCTATATCCATCGGCCTCAA
ACGAAAAGAAATCTCTTAATTCGTGGAACGTGCTCTCTTCACAATCGATGCGTACATGAC
TGAAGTCGTGAAAATGTACTTTAATATCCATAATTATGCCTTACTAAATTTGCCTTTAGA
ATCTCTTTTCATGAGACGACCTTTAATAAATCCGTCGGGAATAATACCGTCTGGTTGTAT
TAATTTATTTATTGCGCCATTATTGACCCAAAAAGTTCCTGTGGTAGTCGGTTTGACTTT
ACATCCTTTTCTGGACTTTCTATTAGGATGAACCGTCCCTTTTACAAATCCTTCTGGAAC
AAGTTCTCCAGGTTTAATAAAAATATTTTTAGTTCCATTAGTGTAACAAGTTGTACCTAA
TACCGTGCCCGGTGAGTTTTCAAATCTCTTAGCGGAAGATTCTTTCATCTTTGCTATAAC
CTCTGTAGTCATAACAATTCCACCAATTCCACCAGGTTTCATATTATAATAATTTTTGCT
TTTTATTATTTCAGGAGTTATAATTTCTTCTTCATACATGTACGCTTCTTCGGAAGTTTT
AAACTCTTTTAGTATTGTTCTAGAGAAATTGTTTTCACCATATTTCTTTATAGCCTGCTG
AATTGCCTTACCGGAACCAAGGTAACCATCATTCAAGTCATCAGTAGAGTGTTTTCCTAT
ATACTTTTTACCATTTATTAGATTTGTTGTTTCATATACAAAGTGGTACATACTATTTTC
CGAGTAATAAATATATCTATATTTATACTGAGGAAATATTATGATAGATAAAGATTATAT
TGCAGAGCTGAAGGCTCTTGATGATAATAAAGAAGCTAAAGCTAAATTAGCTGAATATGC
TGAACAGTTTGGTATAAAGGTCAAAAAGAATAAATCTTTTGATAATATCGTTAATGATAT
TGAAGAAGCTCTCCAGAAGCTCGCTAGTGAACCTATGCCAGAGACTGATGGGTTATCTAT
TAAAGACTTAATTGATGCTGCTGATGCCGCAGACGGATTAAAATATGACGATGAAGAAGT
CAATCCAGAGGCAGCACTTCTGATTGATTCTCCGGTTAAATCTGACATTAAAATTGAAGT
AGTAGAAACGGATAAAATTCCTGAAAATACCACTGTTTTAATTGAAGATACTCCTTTTGT
TGAAGAAAAATTCGAACAGGCTGTAGCTGAGATTATTGAATCTGAAAAGCCGTCTGTATT
TACTCTTCCGGAAAACTTTAGTCCGAATCTTCAGCTGATTGGAAAAAATCCAGGATTCTG
CACTGTTCCTTGGTGGATTTATCAATGGATTGCTGAAACCCCAGATTGGAAATCTCACCC
AACTAGTTTTGAACATGCGTCGGCACACCAAACTTTATTTAGCTTAATTTACTACATTAA
TCGTGACGGATCAGTTCTAATTCGTGAAACACGTAATTCTTCTTTCGTAACATTAAAATA
AGGATAACTTATGGCTTTTACAGTTGATATAACTCCTAAAACACCTACTGGAGTTATAGA
TCAGACTCAGCAGTTTACTGCTACACCCAGTGGTCAAACTGGAGATGGACCTATTACATA
TGCTTGGACTGTAGACGACGCTCCACAGGAAGAAACGTCAGCAACTTTTAGTTATGTACT
AAAAGGACCTGCCGGTCAAAAGACTATTAAAGTAGTTGCAACCAATCAAGTTGCAGAATC
TGAACCTGAAACAGCTGAAATTAGTACAACTATCACAGTTCAAAATAAGACACAAACAAC
TACTTTGGCAGTAACTCCTGGTAGCCCTGATGCTGGAGTAATTGGAACCCCAGTTCAATT
TACTGCTGCCTTGGTTTCTCAACCTGATGGAGCGTCTGCTACATATAAATGGTATGTAGA
TGATTCTCAAATTGGTGGAGAAACTAACTCTACATTTAACTATACTCCAACTACAAGTGG
AGTAAAAAGAATTAAATGTGTAGCGCAAGTAACTGCAGAAAATTACAATGAAAAGGAAGT
TACTTCTAATGAAGTATCATTGACAGTTAATAAGAAGACAATGAATCCACAGGTTACATT
GACTCCTCCTTCTATTAACGTTCAGCAAGATGCTTCGGCTACATTTACGGCTAATGTTAC
TGGAGCACCTGAAGCAGCACAAATCGAATATTCATGGAAGAAAGATTCTTCTCCTGTAGA
AGGGTCAACTAACGTATACACCGTTGACACCTCATCTATTGGAAGTCAAACTATTGAAGT
TACTGCAACCGTTACAGCAACCGACTATGATAGTAAAACAGTTAAAGCAACAGGCCAAGT
TCAAGTGACTGATAAAGTTGCTCCGGAACCAGAAGGTGAATTACCTTATGTTCATCCTCT
TCCACATCGTAGCTCAGCTTATATCTGGTGCGGTTGGTGGGTTATGGATGAAATCCAAAA
AATGACTGAAGAAGGTAAAGATTGGAAAACTGAAGATCCAGATAGTAAATACTACTTGCA
TCGTTACACTCTTCAGAAGATGATGAAAGACTATCCAGAAGTTGATGTTCAAGAATCGCG
TAATGGATACATCATTCATAAAACTGCTTTAGAAACTGGTATCATCTATACCTATCCATA
ATCTCAGGGGCTTCGGCCCCTTTCTTCATTTTGAAAGCACACAAACCACAATCAGAAAAC
GATGTATATAATGGCACCAACTCGATAACATGAGATTGATTATGAGAACTGAGGTTGTGG
TGTTTACACTCTATGAGTCTGGAAAGTCATTCATTGAAATTGCTCGTGAATTGAACTTAC
AGGCAAAGGAAGTGGCTGTATTATGGGCTCGAGCTATGACTGCTAAGAATAAATTTGAGA
CTCGAGAAAAAGTTGTCTATAGAAAAAGACATATTAATAAGAAGGTGAAAAATGGAACAG
TATGATCTTTATGAAAATGAATCTTTTGCTAATCAATTACGCGAAAAAGCACTTAAAAGC
AAACAGTTTAAGCTAGAGTGTTTTATTAAAGATTTTTCGGAACTTGCTAATAAAGCAGCT
GAACAAGGTAAAACATATTTTAGTTATTATTGCACTGCTCGCGATAAATTGATTACTGAA
GAAATTGGTGATTGGCTGAGAAAAGAAGGATTTAGCTTTAAAGTCAATAGTGATCAGCGT
GATGGTGATTGGTTAGAAATTACATTTTGAGGATTAATTATGTTTAAAAAGTATAGCAGT
CTTGAAAATCATTATAATTCTAAATTCATTGAAAAACTTTACAGTTTAGGATTGACTGGC
GGCGAATGGGTAGCTCGTGAAAAGATTCACGGTACAAACTTTTCATTGATTATTGAGCGT
GATAAAGCGACTTGCGCTAAACGTACTGGACCGATTCTTCCTGCTGAAGATTTCTTTGGG
TATGAAATTATTCTAAAGAATTACGCTGATTCCATTAAAGCAGTACAAGATATTATGGAA
ACTTCAGCGGTTGTATCTTATCAAGTTTTTGGCGAATTCGCTGGACCTGGCATTCAGAAG
AATGTCGATTATGGCGATAAAGATTTTTATGTATTTGACATTATTGTTACTACAGAAAGT
GGTGATGTGACTTATGTCGATGATTATATGATGGAATCATTCTGCAATACATTTAAATTT
AAAATGGCTCCACTTTTAGGTCGCGGTAAATTTGAAGAACTTATTAAATTGCCAAATGAT
TTAGATTCTGTAGTCCAGGATTATAATTTTACAGTAGACCATGCTGGATTAGTTGATGCA
AATAAATGCGTTTGGAATGCCGAAGCAAAAGGCGAAGTATTTACTGCTGAAGGATATGTA
TTGAAACCTTGTTATCCTTCTTGGATGCCTAATGGCAATCGTGTAGCTATTAAATGCAAG
AACTCTAAATTTAGCGAAAAGAAAAAGTCTGATAAGCCTATTAAAGCTAAAGTTGAACTG
TCAGAAGCTGATAACAAATTGGTGGGAATTTTAGCTTGTTACGTTACACTGAATCGTGTG
AATAATGTTATTTCTAAAATTGGTGAAATTGGTCCGAAGGATTTTGGAAAGGTGATGGGA
CTAACTGTTCAAGATATTTTGGAAGAAACTTCTCGTGAAGGTATTACTCTAACTCAAGCG
GATAATCCTTCTTTGATTAAGAAGGAATTAGTTAAAATGGTACAAGATGTACTTCGTCCG
GCTTGGATTGAATTGGTAAGTTAAATAAAAAGGGACCTTTCGGTCCCTTTGTTTTATTCA
TCAATGATAATTTTTGGTAGCTTAACACCTAATAAAACAGACAAATCTGAACGACCCGCC
ATTTTATCCATGTCTCCACCATCAATTACTCTTGCTTCTTTTTCATCTTTTGCTACAGTG
TAAGGATTTGCAGATAAAGCATATCTAACTAATAAACCGATAGATGGCTGCAAACTTTCT
GGATCAACTACAACTTTAAATGCACCTACATGTTCAGGGTCATCTAAGTCAAGACCTTCT
GTATACGGAGCATAGAAAATTGATCCAACAATTTCTTTTTCACCAATATTTTCTACTACG
CCAACGATTACATAATCTAATGGACTGTTGGTATCGCAATAAAGCGGTAAACCATTAGCT
AAGAACCCGTAGGCATTTTGTGAAAGATATTTGTCATCTTCTGGTTTATGTTTTAACCAA
CCTGATGCAGCAAGAATCGCAGCGGCACGAGCTGAAGCAACGCAGAACGTTGCTGTATAA
GTTGATTCTTTTTGGATATGCGAAACCATTTCGCACACCATTCGATATAATGAACGACCA
GCTTCAGGTGCAGATGCATAACTCAAATCAATGAATCCAGTATCAGTAATTCCTGTAACT
TTATAGCGTTTTGACACTGTAATCAAAGACTGTAGAATATCTTTATTGATTTCATCCGCC
ATTTCAGTTGCAAGCAAATCTTCCAAGAAATTAGGAGCATCGAATCCATTTGCTTCTAAA
TCTTGTGCTAATTCAACTGTGATGCCAGTTTTAAGTTTACGAGATTTAACTGCGGTTTGC
CATTTATTAATCTGGAATCTAGCATCAGCAATTTCGCTATCAGAGCTTTCAAATTTGCTC
GTTGACGCTGCATCAGAAAATAGACGAACCTTTAAAAGAACAATTGCAATCTGAAGAGCT
AATTCTAAATCGCTTTCTTCAATGGTAGCAAATGGTGTATCTTCTAATACTTTATAAACG
ATATTATTATATTTGAATAAATCGCCTTTATTGAGAGTTAATTTAGACTCTTCTGTTAAT
TCTGTGATTTGTTCTCGGTCTACATATCCAGCTTCGCCAGCGTAAGTAGCACCAGTTTTA
AACGTAAATTCGTTATCTGGGTTAAGGTATTTAATACCATAAAAAGCAGCAACAGGTTGA
TTAGTTCTTTGCGTTGCTACAATGTCAGAATATATTAATTTAGTGGTAGCGCGAGTCAAA
GCAACGAGATTTGGGCGACCGATTGAGTTGCTATTCGTTGTGGTTGATTCGCGCAGAAGT
TCGTTGATTTTAGCCATTGCGCTTTCCTTTTGGTTTATATGATTTATTTATACCATAAAA
ACAACTAAAGGGACCCGAAGGTCCCTTAAATCGTCAAAGATTAGATACCTTTAACATATA
CACGGCGGAAGTAAGCGTTTTTACCAAGGCTGTTCAGAATAGAAGGCATACCGCTCTGGA
TGCGAGAAGCCGGAGCCTGAGCAGCGGATTCTGCAAATGGGTTGATACCGATACCGTAAC
GAGTTTTGAATCCCATTACTGGTTGGAAGTTCTTCGGATCGGAACCACGCAGCGGAGTCA
GAGCTACATATGGAGCGTAGTAAATACCAGCATCCATTTCGTTCGGGCCTTTATAACCTA
CAGTGAAATAATCCTGTTTAGCATACTGGTCGATATATACACGGTATTTACCACCCAGAA
CACCAGCAAATACTGACTTGGTAGTATCAGTGTTAAAGCCGGTAGCCAGACCCTGTGCAG
CATAAGAAATGCCAGTATCAACTGAAGCCAGAACGTTAACTACGTTACGGGAAGCGATAA
TGAAGTTACCTTCACCACGACCGGTCTGACGAGCAATTTCAACTGCTTCTTTGTCAATCT
GGAACAACAGAGCTTTAAAGGATTCACCCGCCCAGCGAGCACCACGAATATCAATTGGAT
CCTGGAAGTCAAATACACCAGCTTTAGAACCCGGAGTCAGGGTCATACCAGATTTACCAA
CCTGAGCTGAGTAGTTAATCCAATCAACAACTTCACGGTTGATTTCCAACATGATTTCGG
TAGCCAGAATACCAGACAGTTCAGCATCAGCATCCATACCGTGAACAGCGCGGAGGTCTT
GTGCTAATTCGATAGAGTAAGCAGCTTTCAGCTGACGAGATTTAGCTTCGATAACTTGTT
TATCGATACGGAAGCCCATTTCATTCCATGGGTTATCGGTGGAACCGTTGAAACTTTCCT
GAAGTTCAGCGATAGAAGTAGCCATACCTTCAGCGATTTCTACCAGTGCACCAGCTTCCA
TTTGTTTCTTAATTTCAGCATCTAATTTAGCTGCATCATCTGCAGTAGAACTAATTGTTA
CTTGAGCAGAAGCTTGCAGATACACAGTACCAGTGTCCTGGAAGAAGTGAGTATAGATAT
CACCTACTGTGGTTTGTGTGCTAGCAGCCAGAGCTGTGAATTTCTTAGCAGCACCCTGAC
CAGAGAACATTGCATCTGGACCATACATTGGGTGGAATGCTTCTTTAGCGCCGGCAGCGA
TTGGGTCTTTACCATATACTGCGCGCAGTGCGAATACCTGACCAGTTGGGCTGTTCATCG
GCTGAACACCGCAAATATCGAAAGCAATCAGGTTAGGAATAGCACGACGTACCATACCCA
TAACAGCTGGGCCAATCTGAGTTACTGCGCCAGAAGTCTGACCAGCAGCGATGTTAGTAG
CGTTGTAACCGTGGTCACCACCGATTTCAGCTTCTGTTAAGAAAGAACCGAATGCCTGAG
CAATTTTTTCGTCTTTATATTCCGGAGCTGTCTGGAAATCTTTTTCCTGGTTTTCAAAGA
TTTTAGCGATAATCGCTTGTTTGCTATTAGCAATTTCCGGTAAACCTTCACCTTCCAGTA
ATGGCTTCCATTTGTTCAAAAGTTCAGCTTTAGTTTTGATAGTCATTTGTGTTAACCTTT
AAAATTAGAAACGAGATGCGACTTTCGCATATACACTTACAATATCTTCTGCACCAGGTG
CAGCTTTATCTTCTACAGCTTCAGTGACGAAATTCAGTCCGGCTGCTTCAGTATCAGGAG
TATTTATACTCTCAGTAATAGTGCTTTCATCTTTATTAGACTTCTTCACCATTTCTACGA
TGGCACTCAATTTATTTGAGAATTCATCTGAATAATCCATACCTTCGACCAGAGCAGAGA
CTTTTTCTTTTTGAGACTCAGTCAGATCTTTAGTACTTTCGCTCAATGCCACTTCACGCT
GCACATAATTGATATATGCGTCACGCTTATTGAGTTCTTCGAACAGACGAGCTGATTCTT
CTTTATGTTCTTGCAGTTCTTCTTCCATTTCAGCTACAACATCAACTGATTCTTCTGGAA
CAACAACGTTGTGTTCAACGAAGAGCTCTTTCAATCCACCAAGCATGGATTCAAACAGTT
CGGCTTTGATACCTTTATCTACTGCTAATTTATTTTCAGTGAGCCATTCTTTTGCAAGAT
GGTCAAGGAATTTAGAAGCTTGCTCAGCGATTTTCTTCTCAGCTTTTTCTTCTGCTTCTT
CTTTATTTTTTTCTACTTCTTCTTCTGCTTTTTCAGCAATTTTAGCGATATGAGATTCAG
CTAATTTAACGGCGTGCTGCTTGACGGTAGCTTCGAATACAGTGCCGAAAGTTTCTTTTG
CTTCCGGAGAAATATTAACTGATTCGAAAATACTATCAAGAGCAACGGAAGCATCAATTT
TTTGCGCTTCAGCAATCAGTTGTTCTTTAAGCATTTTGTAGTCCTGTTGTTTAGATAATA
ATATTTATAACGCTTTTTTCATGGCCTCTGCGAGAGCCATATAGGCGTCATCGGCACTTG
TATCGGCTTCCGCCGTCTGTGATTCGGTAATTTCCTTAGGAGTTACCCATGCATCTGGAG
CACTTGGACCCCATACTGCATCAACACCTACAGTTAATTTGAATCCTTCGTTTACGATAC
GATAACCTTTATTTGTGTCAGTCAATGAACCTAATCCACGAGAAGAAACTCCTGGAATCC
ATCCGGCACGAATATTAGCTGCTAATTTATCTCCAGGACCGTGGTCACCTTCAATAACAC
GAGCTCGTCCGTATACGTCATTTCCTTTCCACCACATATCTTCTATAATGATAGCGGCTT
GCATCGGGTCAACATTAGCGCGTGGAGGATGATTTAATTCTCCGAGAGCTTGTTTAGTTA
AAACTTGCTCATTAATATAGTCTTTTACCGCTTTTTCTAATATACGTTTTGGATAAAGAC
GTTTATTTCTATTGACGACTTCCGCTTGCATGAATATTCCTTCGATGTATAAACCCGGTT
TTAAACCTAAGTCTTTTCCATCGTGGGATTCGAGCATTGGCACACCATCAATAATTTCGC
CAGGTTGACCCCAAGTTTCAATTAGTAATTGGGGTTCATTCATTAGCTTAATCCTAATGC
TTTACGGCGTTTAAGAGCTTTTTTACGCTTACGCTGAGCACGAGATTGACCTGCTGGATT
GGCAATCTTCGTTTTGGTAGCTTTGCGAGCAATTTGTCTACGTTTTGCTTTAGACAGCCC
AGTGGTTTGAAATGCATTACGTTCACGTGTTTTGCGGTCTTTAGTACGTGTAATTTCACC
ACGAGCTGAAACATGCTTAACAATGAATTCATTTAACGGCATGTTTTCATTAATAGAAGC
TAATGCAACTGCTAAATCAGTTTCATCATCAAGCATATTCTCGACAATTGTATTTATATC
GTCTTTATTTAAAGCAGAAGACAATTCGTCAAAGCGACCCTGTGCTTCAGGAATAAGTGC
TTCGACATTCTCGAGAACTAATTCATGAGTTTCAGGGATCAGAAGCATTATTCATCATCC
TCGTCTTCGTCAGAGTCTTTGTCTTTTTTGTCGTCTTTATCATCACTATCTTCGTCTTCG
TCATCATCCTCGTCATCAGGTTCTTCACCTTCGATTAAGAAATTACGAGCGATAGCGATT
TTTTCTTCTTTAATTAAATCAGTCGTTCTTGCAGCCATGGCTTCAGCAAATAATTTACGA
GCGGCTACGAGGTCGTTTGATTTAATAGCTTCAATTAAACCTTCCATTAAAAATCCTCTT
GTTCTTGGTCGGGGTCTTGGAAACGAGCCTCTTTAGACTCTTCTTCAATTTGCTTGGCTT
CTTGTTCTATTTCTTCATCAGTCATCTGCAAAATATCTTTCATAGCAGTTCTGTGAGAAA
TATATTTACCAATAAATGGTTCTGCCATGGTTAGCATATTAATTCTTCGTTCCAAAATTT
CTGCTTCTTTGAGCTCAGCAAAGTAGCTATCCCGATGAAATTCTATCTTAATATTATTTA
TTTCATCATTCCACTCATCTTCTGTGATTATACCTTTAAGCAAAAGATTTGTTTTAAGTG
GATCTAGGAAAACTTCTTCAAACTTGTGCTGTAACTCACGAATAAATTTAGCAAACGTTA
ATTCATCACGTGTAATGCTAGTTCCAGAATCAAACATCACACCGCCTTGTTGGTCTTGTG
GAATGCGTGAAAGAGGAACACGTAATGCCATGTAAAGAGCTTGTCTAAACCAACGAATAT
CTTCCATATTACCAGTATTATCAGCACCAGGAAGAGTATCAACTTCTGTCACAGCTTTAC
CATCACGGCGCTGCAACCAATAGTCTTCGGTCATAGACATATTATGTTGTTGATTTTTTA
TTTTACCTGTTGATGCATCATATACTACACGGTTTTTCATCGTGTTCATAACATGTTGCA
TGTGCTCAGCAGCTTTACGAGCAGGCATATTACCTGTGTCTACATACCAAACACGACGGT
CAGGAGCACGAGTAATGCGATAAATGACTACAGCATCTTCTAATAATTTTAATTGGTTAG
CAGGTTTAACAGCACGATGTAAATACCCGATGATATTTTTGCCACAGCAATCGACTAATC
CAGAATGGGCATAAACAACAGCAGCTTTTGGAATTTTTATTTTTGTGCCAGCTTCATACA
TTCTACCATCACATGCATATGACTCATGGGCAGTATCATATATAAAATATTCTTTGTAAC
CTTTAACTATTTTTGTGCCAGCTTCAGTTTCTGTTATAATTTCGCGAACATACTGAACTT
GGCGAGGGTCTAATCTACGTAATTCTTTTATGCCTTCTTTTGGACGTTTTGGATCAATGA
TTTTATGAAAGAAAATTCTTGAATCAACATACCAACGTCTAAAATGATCAGAACCTTTTC
GTTGAAATGATAAATGATTTAATACATCATTAAATTCATCTAACATCATATTTTTAATTT
TTGGGCTAAATTTAGATTTATCCAAATTTAACGCTACGACTTCAGTATCATCTTCGTAGA
CGATAGCATCTGAAACGATTTCTGAAACTGCATTATCCACTTCATAGTTATTCATGAGAT
TACGATATGTATCAATAAGCTCACGAGTAGTTTTCATTCCTGGTTCATATGAACCAAAAA
TTGTTTGGAATGCAGCATTATAAGGAGAAGCAGCTTCGTTCGAGCTTACTTCAAATTCTC
TTGCTCCATCATCAAGCTTTGGGGCTGTAATGGAAACAAGATCTTCTTTTTCTTGGTCTT
TAAAATTTCGTTCGTCCATTTTAGCCCATGGAGCAAACAAACTTAATACATTAAATTTCA
TTGTATTCTCCAAATGGGAATTATAGTTATATTTATATGGACTTCTCTGCTTTAAGCAGG
ATGGGGATTTCTCCCCATTCATTTTTATTCCCAATAATCGAGAGCAAGAGTTACTTCAAA
GGTTTGGATTTCATTGTTTGAATCCCAATCTAATTGAAGTTCACCCACGTTAGTAGGCCA
CAGACCTTTAATTTCAATTTCTTTTGTTACTGTTTTAGCATCACGAGCATATTGACGAAC
AATAGCGCTCTTTTTATACTCTGCAGGTTTTCCACCAGTAATTTCGTTTCCTTGCCCAGC
AGCAATGCTTTGCCAATCAACAAACTTCTGGCGTGCATCATGCGCCTCATCATTCATTAC
TGTAATAGTCCAGTCATCGAATGTACGATCGCCTGCTACGTTAATTTTACGGTTCATAAA
TCCGACTGGAATTTTTTCTACAATACCAGCTGGTAAAGCAGTGGCTTTACATTGAAACGT
AAAATTTTGTCCAAGATAAGAAATTTCTACTTGGAATAAGTTAGGTCGAGCAAAATCACC
AGATTCAAACGCTCGTGTTACATCATCTACAAACATATTAGCCTCTGTAGTATTTATATC
CCTATGTTTAACCTAGGGCATATAGAATTAAAGAATTAAGGATATAGTGTATTTATATGG
CCTGCCGAAACAGGCCTTTAGAATGCACCGTATTAACCTGCAAGACCAGTTAACTCATCG
AAATCTGCACCAGTAGCAGTTGCGACGAAATTCAAAGTAATATAATTTATACTACGCGCC
GGTTGGATGTAGAATGTTGCAACAAACTCATTTCTATCAATTACTGACGGAGTGTTATTT
GTTGTATCGCAAACTACACGATATTCATAAATTCCACCGAGAGCTTTAATTCCCTGTAAG
TATTGGGCAGTTTCTGTGCGGAATGATGAACGAGTAAACGCGTTGTTTAATTCGAACAAA
CGATATTTTGAACTACGTCCGATATTCGTTTTCAACATATTAAACAGACGACGAACGTTA
ATACGATCAAATGGAGAAGGAACAGAAGTAGCTGTTTTATCACCATACAATACGTAACCA
TCACCACCTGTACCAGTTACTGGGTTGATAGCTTCTTGATATAAACGGTCGCGCTGAGCT
TGGCGAGTTTCAATAGCAAGTTTAATAACGTTAAGAATCTGACCACGATTATAACCAGCT
GGAGACATCCAAGTCTGAGAAACGTTATCAGTTCTCGCGCATAAACCAGCAATGTCAGCT
GCTAATGGAACCCAACGATTTACATCATTATATTTGTCATACTGATATTTGTAGTTACCA
TCAATTGCTGCGTAGGTTGAACTAATATTAAAGTTATTATCAGTATATGAACCTGCCGCA
GTTCTCCAGTTAACTAAATTATCTACTGCACGAGTTACAGGAATTCCAACAACAGTTTCA
CGCGGTGGTGAGCACAATACTAAGCAATCTTGGCGAGCATCTCCAATTGAAACGACGTGT
TTTTGGACAGTAGATGCTGTTTCTAAAGATTCACCGGCACAAGAACCCGCAATAAACAGT
TGAACGTCAACAGATTCACGGTCAGCAAAGAAGTCCCAAGCTTCCATCAAATCTCCTGCT
GTAACTTCAGCATTTGATGATAATCCACCAGAAAGAGTTAAAATTCCAGAGAATCCTTCT
GGCCAGTTTTGTGCAGTTGCAAAAATATATTCTGAACCACCTTTTGCGAAAAAGTCATCG
ATATAGATGTTACTATCGTAAATATCTTTTTCACCACGCTTAGTTGAAAGAACAACGCTT
TGAACAATAGCATCATTTCGACGAACTATAATAGCGTACTGTGAGTCAGTCTGCGGCCCA
TATCCAAATACTGCCTTGGCAGTAGATGCGCGTGTTCCGCCACCTGGATAAATTGGGAGT
AATGCAGAAGCACCTTTTGCGTAGTCAGCTTTAGATACGATTTCAATTTCGATTTTATCG
CCCAACTCGCCTGGATAAAGAGCTACTACTCCTGGAATTCCATATTTTTCGAGATTTGCC
TGAAAGTCAACCGCTGTCATAGCAGCTTCAGCATTTTCAATCTCAGCTAATAAAATACCG
GAATCAGTAATAATTTTTCCAAGAGTTATTACCGCAGCTAAACCAGATGAAGACGAAGAA
ATTTCCGCGGTCCAGTTAGAACCTAGTTCTGGATATTCACCGACTTCTTTCGCTTTAGCG
ATAATTTTTGCAGTAGGAATATTAATTTTCTTAATTTTTCCATCAGCATCTACTTCGGTA
ATTTTACCTTCTGTTTCAATGTCTTCTGAAACATACTTAACTGTGATTTTATCTCCAACC
GCGTAGTTACTACCTGGGGTAGAAATAGTGTATTCAATATTACCAGCAATCGGAGATGAG
TTTTTAGCGGTATCTCTATCGACAGCGCGCACAACTCGCAAATCATTTCCATATTGTAAG
AAATTCATTGCAGACATAAAATAATCAGCAGTTTCAGCTGTAGGTTGACCAAAAGTATTA
ACTAAATCTACTTCATTTGTAACCTGTTTAATCTGAAAAGCAGGACCCCACTGGAATTTA
CCGGCCAAAGCTGCTGTACCAGTAGAGTTATTAACCACGGTGCTTTGAACCGTAGTTTCT
TTGAGCTCAATGCCCGGAGATAATAAAGTCATTTTTAATCCTCTTTAATATGCTTTAATA
TATTTATACCATTGACATACCATGAGATACTGGAACATACTCAGCAGAATGAACCGAATC
AACAAATATAACTGGAGCGTATTCATCACCCATATCTTGAAGTTCTTTTGAAAACACTTC
AGATGCTAATCGCATGTCATCTTTGTCAGCATAATCAATAAATTTTGATTGTGTTGATAA
CCATCCAAAAATCACTAAAGACATGACTAAATCGTCATGATAACCTTCTTCAGCTGCCCA
AGACACGCCTTTTTCACTAAACGTTCTAAACTCTTGAATAGTTGCACGGTGATGAATAAT
AAGCTTATCTTTTTCAATAAGGTCTTTTAATGTAGAGCATCCTACTGCTTTCGTTCGTTT
AGTTTGCTTCATTCCTAAATCAGTATATGAATCGCAAATAACGCCTTCGTATTCTAAATC
CATATAAAGTGATTTCGCAACTGACACACCAGTACTATTTAATTCAATATAAACTGGGCA
TTCATTATATTCTACTAAATATCGCATAACGATGTCAGGTAGAATTAAATGAGAAATAGT
GTTTGAGTGTAAAACACCAACCTGCTCCCACACATCATCGGTGACATCAATAATATGTAA
AGCATGATAATCTTGCCCACGACCTTCTGAGCAGTCTAGAGTTGCAATATATTTTCTATC
TGGTTCAGGTTTTTTAAACTGATGAAAACCATGATCATCTGGTGTTACTTCTATGAAATC
CATAACAGCTAATTTCATTCCTGAAATTAATGTACCAGAAGTCCCTTCAAACGCTGCGGT
ATGTTCTTGACGAAATTGAGCTAAAGTAGAACCATTAATGGTTTGTATGCTCCATTGCCA
TCCATCGTCAAAAATATCTTCATCATTATAAAGACGTTCTTTAACTGAATTCCAAATAGC
AGTGTATGGTTCAAACCCTGATTTACCTTCAACAGCAGCAGTCCAAATATCATAAAAATG
ATTTAATCCATTAGGAGTCGTAGTAATAATAATTTTCGAACGACGACCAGATGAAATTAC
TGGTTGAATAGCAAGCCAGGAATCATGGAAGTTTGGAATAAATGCGCATTCGTCAATATA
AATCATTGCGAACGAGTTACCACGAACTGCGTCAGGAGAGGAAGCGTAGGCTCCGATTGA
GGAACCATTATCAAGTTCAATAGACCCTTTATTCCATTCAACAATTCCTGGCTGTAAAAA
GTCAGGAAGCAGTTCAATTGCTTGCTTAGTACGATCTAAAACTTCTGCCGACATTGAGCC
TTTATGCGCCAGAATACCTACAGCTTTATCCTTGTTAAAACATACAAAATGTGCAAGGAA
AATAGCTACTACGGTTGTTTTACCGAGCTGGCGTGATAGATTACAAACAGTCATACGTTT
AGATGACATTATTTTGAGCATATCACGCTGATAGTCACGTAATTGAACCTTTATAACACC
ATAGTCAATATGTGTAATAGCACAGTATGTTTCTGCAAAATAAACAATATCGTCTCGGCA
TTTTTTCCACTCCTCTACCATTTCACGAGTCCATTGTGTTTTAATATTAGCTCGTTTCAA
GTTAGGAAGACCCATATACCGAGATCTTTTATTATTCTTATCTTTATAAGTTTGAAATAA
TTCAGGCTTGTCAGAATTATTTGGAATTTTTACTATCTTGTGTAGACGAAGGTAATCACT
GAATTTTTCAGGATACCATTTTCCATCCCACTGAGATTTTATCCAATGAATTCCATCTTC
ATCTTTTCTTTCAGCTAAGCTTGGGTGTTTTATTAAAATTTTTCCAGCTTCATTTAATGG
ATGGAAATCATTTAATGCATTAATCGGTTGTTCCATTTATCACCTTCTCACGAGCTTCTT
GAGCCTCGTAAGCATCACCAATTTCGTCCATTAATTCTGTTGGTGAACCCATGAATACTG
TCGCATTTTGAATATTCATTTGACCTGTAGGAACAGCACCTTTAGTGCCAACCTGCTCAG
ATGTAATATCTTTCATATCTTTATGAAGCTTCAGTATTTCTCTGTTCGTCGTAGTCATTT
GCCCCATAAGAGTTGCAAATACTTCCATGTGACGAGGAGAATCAGCATTCTTTGCCGTCT
CAAGAAAAATCTTGGCTGCGTCCATTAGCATTTGCTGTTGAAAATGCATATTTCGACGAA
CTACTCCATAATCATCTTCTAAGTCAGGAGTACGGTTTTGAGGATTGCTTTTAACTTCTA
CTAATTGCAGAGGTTCATATACTTTAATTTCCTCCCCGTCAATTCCGGGGAGGTCAGAAA
TATCTAAAAGTTTGTTTATATCAAGACCTTCCATAATAACCTCTATGTTCTTGGGCCAGG
AGGTTCTGGCGGTGTTGGTCTATTTACGTTGCTAGTGAAAGTTTGTTTTACCGTTCCATC
CCAGTCTTCTGGGTTAATATCTCGAGGAACAACTTCGCTATCGACAGATTCAAAAACACC
TTCACCATCAGGCAAATCTCTTGTGTTGGCGTGAAAATCTGTATAAGTAGTACGAATTAA
TCCTTCTGCATCATCTACCGGAGGATACATCCATCCATTTACTTCAAATGTTAGTGACCA
TTCAATTCTACGACGAGATAAATTATCTCCATCTATAGATTCGTCTATAGCAGCAGACAT
CAGTACAATTTTAATATCCCTTTTAAATGGAATATCATTTCCAAACTGTTCGTACATAGT
TGTATTAAAATGAGGCTGAAAATATGGAAGAATTTGTTCAACTATTTGAAACATATCATC
CTCATAGCGAGTAAATATACTCAATTCATAAATCATTTTAATAGGAGATGGATTATATTG
TGATACTACAGAAGTTGCGCCTTTTTGTAGTAAATTTTGATTTAAAATGTTTGTTTTAAA
TGGAGCATTATAGCTAAAATCAACTAAATGTAAATTTATACGAGGTAGAATAGTTTCAAC
TTTAGCCACATCTTCTTGTGAATTTATCGATGTCCATTTATTTAATTTCATCATGAAGTG
TTCCTTTGATGCATACGTAATAGGAACACGTATAAACTTATCACCAGATTCTAACTGACG
TTTGATTTGGATATTTGAAAACAAATCGCCCATCAAGGTAGCATATCGTCTAAAAGACGA
ATTATAAAAATAACCAAACATGATTTCTCCTAATCTGGGCTTTAATTAGTTTATAATATT
TATTAATCCATGAAATCATTATCAAATGGGCTAGATTCAAAAGATTTGCCTCTGTTATTG
ACAACAACATAAGGTTCAACATATTCTTTAGCTTCAGAATTAATTTGATCTACTTCAGCA
TACTGATCAATATTAATATCATGAATGCCATTAAGATTGCGAACAGGATTTAATTCTAAT
TCACTGAATTCCGGAATGTTAATTCCTTCATTTTTCTGTAGAACTGGATTAATTTCTTCT
CCAGAATAAATGAATTTACCTGCTGTAATTTTACGAATAGCGTTTTGGCCTAATTGATAA
AATGGATCATATGGTTCAACCCAGTTAATTTCAAATAAGCTGTTATCCATAGGAAAATAT
ATCAAATCACCTTCCTTTGGTTCTTTTCCGTTGACTTGATGTTTAAACAAATTTGGATTA
ATGGACAAAGTTACTTCATCCTGTACTTGCATACCAAAATTACTAAAGAATGATTTAGCT
CCTTCATATCCTTCAAATGAATTTAAATATGCAGCGAATTTCCAAGCTTTAGTAAATTTA
TTTTTTAAGTCTTCGCCGAATATCAAATCAGGGGAAACATACTCTCTTGGAACATAATAG
CATTCTACACCTCGCATTTGAATGCTTTCAGCTACTAATACATCGGCCAATATTTGACTA
TTTTTATAATGATTGAAATTTACATAAGGATTTAGTATTTCAGTTTCATTAGTCTGAGAA
TAACCAGTACGATTTTCTAATTTAGCAAAAAGATTTTTATCATAAGTAGCCATATTAACC
TACCAAAATTCCAAATGGAGGATCAAGCAAGTACAATTCTTCGCGTAATGCTTCTTTTTC
TAATCGAGCTTCTTCTATTAAGCGCTGTCCATCAATTGTAACACCTCCAGGAAGCATCAT
ACCTTGGTGACGTGCTAAAATTTGGCCATTCAATTCTTTAGCTAAAGCTGTAGCATAGTC
TTTCACCCAACGGTTATTATAAGCACCTTGCTTAACATTTGGATCTTGACCAACAACACG
ACCTACTAAATTATGGTCTGGATTATTATATCGTTCAGATAATGACCAGCTATCTTGTGG
GCCGACTGTTCCATATCCTACTGTATTTCCAACCATTTTATTAGTATCAATATATGATTT
AGTCCAGCTTTCTACGATAATTAAATCATATTTTTGGAAGTTTCCCATGACTTTGAGTTG
TTCATTTGCTGAATTAAACCAAAAGTCTGGAATAGGCGAAAGCATATCTTGCATCATTCC
CATGTAACTGGTTAACTGAGTAAAATACCCTAAATCAGCCCCAAAGGCATTTGGTCCATA
AAATCTATTGCAAGAAGTCCCCATGCCGCCATTAATACCAGCCATTCCTAAAAGAAAGTC
AGTAAACCACGGATATGTAGCGTTTCCGTCCATTGACGTTATTGACCCAACATTCGTGCG
GAGAATGCGAGTTACTGCGAATACATTTGAACCTCTTAAATCGAAGACTCCGGTTTTATA
CTTTTCTTCGTCATCTCCTACATAAAATACATGAAAACCTTTGTTAAGTCCATCAAAATG
GTATTCACCGTATAATTCTAGGGCACGCTGGATGCAATCGTAGATTTGATCGGGTGTTAA
CTCAACATTGATAATTGGAGCCCCTAAGCGTCTTAGAATGACATCTTTGAGTTCCTTTGG
ATTCTGAGAATTATATCCTGACATTTAAAATCCTTTGGGGCCTTGCGGCCCCATGTTATG
CTGGTGATAAAAAGGTAGAAAGTAGTACCCATTCGCCGTCTTTACGAACGTAAGCTTGGC
CATCTTTTGGAGCTTCAGGAATATAACCTGCTTCTTGTAGAGCTTGAACGCTGCTCTGTA
AAGAGGATATATTGTCTTTAGCTGTATTTACTTCATGTGTGACTGCCGCAATGTTAGTTT
CATTCGTTTTTACAGAATTAGTTAATCCTCGTTCTTCAACAGTTGCTCCATCAGGATTAT
TTCCATTTATAAGTGAAGTAAGTTCAATAACTTGACCTTTAATTCCTGTTCTATTATTTC
CTATTTCAACTTGTATATTTTGAACATTATTGTTTAAAACTGAAACTTCTCCTTCAAGCA
CTGAAACTTTATTTAATAGAGATCCAGAAGGAGACGGTTGTCCTCCACTGGAGTCAGTTC
CAACAATTTGATTTAACCACGAAACATTCGCTCTTAAACCAGACGAAGTGTTTTCACCAA
CAATTCCGTTTAAAGACTCAATAGAAGTTGTGTGATTTTTAATTTTTCCTTTAATACTAG
AAGGAATATCATCTGAACCGATAGAAGTTTCAATAGCCGTTAAGCGCTGTTTAACACCTT
CACTCTGATTTAATTCATTGTTAATAGCTTCAATGCTACTTTTGTTATTATTAATTTCTG
TTATTATAGAAACATTTTCTGGGTATCCAATAGAAGATTTAATTTCTGCTATATCAGAAT
TTATTAAAGTTTGTTTATCATCTATAGTGTTTAATCTATTATAAATATTTGGTCCAAAAT
CTACCGGTTTATTACCAAGTTCATCACGTAATTTACCAACTTCAACAGTCAATGATCCTA
CGTCAGATTCAGTAAATTTAGTTTCTAATTCGCTTAAACGAATGCCTTGTGAAGATAATA
ACGTACTATTTGTTATTATTCTGTGTTTCATTCCTGTGCTAGCATTACCAACAACAGGAA
GACCGTTAATGTCTTGGCCAGAATATTGTCCTAATTCCTGTTTAATCCACAGTAAATCAT
TTCTAATTGTTCTATAAACAGAGTTTTCTTCATCATTAAATGGACCTATATCAGCAATAA
TTTTGTCAACTGTATTATTAGTTCCAGTTAATATATCAGTGTGTTCACTAGTAAGTGTCT
TTAAATTTGATATGTCATTTTTATTAACACTGATCTGCGATAGCGCTTCTATATCTCCTG
ATACGTCTAAAACTCCTTGAATTGTTTTAATATCTTTCTGTGATGTTTCAATGGCAGTTT
TAAGAATTCCCACATTTTCATCAAGAACTTCGACGTTTTTAAACACGGAAACAATTGGTC
TATTCATTGATCCATCATTTCCATACTTAGTACTAGCTCCTAATATTTCTTCACCATTTT
TAATCCATGAAATACGTTCCTGACCTTCGTCAGGAACGCTATCAACAAAAGGTAACTCTT
TTAATTCAATCATTTGTAATCCTTAGTAATGAACTTTAATAATATAGTTTAATGATATAT
TCCATGGTCTAGTTTCATAACCAATTAATCCTTCACGATTAAGTGTACCATGAGCATCTC
TCGGTCCACCTAATTCAAATCCATCATTAGTGAAGTATGAAGCATTATCCCAGTCGGAAT
ATTTTCTAGTTCCAAGATATCCTTGATAAACTGACGCGCCAAATGGGCCTTCACTTCTGT
TATATTCTCCCCAACCACCGGCGTGTTTATGGTATGACATTTGTTGTGCCTGGACACCAC
CAACATGCATTCCGTCACATCCTACGCCAAGTCTATCCTTTCCATAACCATCTTGTCCTC
GTTGATTTAAAATATGACCGCCTGTGCCGGCTCCTCTGACGAAAAGACCTCGCATATCAG
GAATACCAGGATTATTCCAATCACCACCAAATCTTGTTCCAACTACGTTTCTATAATCAG
GAAATTGGTCACCTGACACGGTTCCACCGTGACACATAGACCAACCTGGAGGTGCTGAAT
CACCTGCAAACATCATAATAGTCCCAACTGGAATTCTTTCGGACGCATATCTTTCAGTGG
CAACAGGTTGATCGCCATTTTTCCACATTCCACCACGCGACCAAATTCCGTTTGCTGTAA
GATGGTCTAAATTTAAAGAACCATTAATAGTTTGTCCACCACGAGTATTAATTACATCTG
CGTTCCATGCTAATGCTCCAGAACTATCACCTTCAGGGGCAATACCGGCTTGCGTCGTTA
ATTTAACTACTCCACGCATAGAACCGGTAGCTCCTCGACCATTTAGTGTTTCACCTGTTA
CTGCAACACCCCCCAAATTATTATTAATTTCAGTCTGTGTTCCTAAACGTATAACACCCC
TATATTCATCTGTTGCAACAGAATTCATAAAGGTATACGGGGAAATTGCATATCCTTCGC
GGAGAGTTCCTTGACGAGTTTGCGCAACAGTAGATAATTGAACTACTCCTCTCACCGATT
CTGTTGCAGTGTCTTCTGACGGAGCTATTTGTGAAATTAATTTTATTGCAAGTTTTTGGG
TTTTTAATGGAGTCATTGCCGTAGTATCATCTACGCCGGCCAAAGCTGCAGGCGTAGATG
ATATTTTAATAACCCCGTTTGATGACTCAGACGAATATCTATTTTGGAACACATCGTCAG
TATGGTATTTCAGTTTTTGCGGCGTTATTGATGAATTATTATCTGAGCCTTCTAACGTTT
CTTCATTTGTTGAATAACGCGTTAAACCATATTTAGTTTCAGTAGCATTTGGGTATAATA
ACCTTGTTGCTAATGTAGCTGGCGTAACGATTTTAGAATTATTAGTTCCATCTAAAACCT
CTTGTTCTGACGCAATCATTGCTATTCCTTTAACTTCCATAGTTGCATCAGGAATACCAT
TTACGCCGATATTACTTATTTTTGATAATGCAGACTGCACTGTCGTAACAGTGTTAGGAA
AATTCGATCCAGTAGGATCGAATTTAACATATTTTGATTCATTTGATACGTGCTGATATG
TATTGTTACTCATGCTACTCTCTCAAAATAATAAAATACTGTAGGTTGTGTGTGACTATC
TAGCGTAACAGTTTGCGCACCTAATAATTGCCAAGTTCCGTACCCAGGTTTAGAAGGAGA
AATTATTTCCTGTTTGAAAGTAATTCCTTTATCAGAGTATTGTTCTAAGATATGTTCTTG
GTTATCTAAATACTTAACTTGTATTTTATTTCCTATGGTAGGATGGTCTTCAAATGAATC
AATTGCAATAAATTTTACAACCATTTCCTGTAGAGCTACTCTAACGGCACTAGTAAATTC
GATTGAAGTCATTCCATTAGTAGCTTTAACTGGAATACCAAACATGTTAACAATAACTGG
ATCACCTGGTTTGGCTGAAGTATCAGTAACGGTTCCTTCAAATGACCAATAGTCTGTTTG
TTGCACGCCAGTAGGAGATACTCCGCTTATATTAACTAATACAGCTCCAACCTGTTGCTC
TGCCATATTTCTAACATCATTGATAGCAGATTCTACATTTGGGTCATAAAAACCTTTTGC
TATTTGTGAAATTGTTACAGCGCCTACTGGCTGATTATTCATAACCGAAATATCATTTTT
CTTAGTTCTAAAACCAAGAAAATCTGCTAAGCGGGAAATAACTCCCGCTTTATTATTAAG
TAAACTCATTATGCAATCCTTATCCAACGGTATACAGTAATAGACGGTTGAATATTACTA
ATATTAGCAGGAGGAGTATGTGAAGAGTTTGTTGTTGCGTAATCTTCACGGTATTTTGTA
TATATAGGACCAGTTTCATCTGGGTCATATTGGCAACCCCCAATAATAACCGATCCATTT
TCGTCTTCAATTAAAACTCTTTCGTCGGTTTTAGTTGCAGGAAGATTTGCGTTTTCAAGC
GTTACTGATGTTGTTCCAACTGTTCCACCGGCAGTATGTGAAGGATTTCCGCTAGAATCT
AAATCATTATTGTTTAAAGCAAAGTTTGGATCCGTAACATCATCATTCCATCCTACTAAA
ACTTGTCCTTTACCAAATAATTTCCATGAACCAAATCCCATATAAGTCACCGGATTATTT
GGGTTTATAGCATTTTCATAAATTGAACCAACAGGATAAATGCTGTCGAAAATAGATGAT
ATTGAATTATACGTTCTAGTATAAGAATCAACTTTTTCAACATTTGGCCAACCGATTTTA
TCAAAATCTGTTAAGGCCACATCACCAATAACTTCAGTAGATGATCCTTTGCTAACATAG
CGGTCATCAGTCAATTCAATAATGTCATCTTTTTCTAAAAGAGTTCCTAAATCGTTATTG
AACCATGTTATAACGATAATGTCACCGGATTCAAATTTTCTATCAAATAAAAGACTGGTA
GGTTTTCCATCTTCATATTCTATAGAATAATCTGTGTTTGATTCTTTCCATTCGCCACCA
AGAGATATACATCCTTCTTGTGTATCTGAACTAGCGCCTTCACACAAAAACAGAGGATAT
CCAGCTGTTCCAGCCTGCTGCTGTAAAATTCCATTAAAACGAACCTCAAGAGAGTTAGGA
TTAATGGGTTCACCAGGAATTAATCCAAATGCAGAAAATGGAATTGATTTCATCGCCGAT
AAATCAGTAACATAAATGCTTCCTTCTAAAGAAGTCTTTGATGTTAGTTTTGAATCTAGT
ACTTTTATTTGGCGTCTAGTATATGAACTTCTCCATTGTGATACACCATCCATAAATGTT
TCAATTTGAACAGTGTCACCAATATTACAAGGCTGTCTTAATCGAATATTAAATCCATCA
AGAGGAACTAATTCGCCTTCATTTTCGCCCGGAGAGCCAAAGTCACTGTTTTCACTAAAT
ACATCACCGTAATACAATTCGTTACCACGATGTTTTACTCTGATGTTATTGACATTATAA
CTAGTTCCATTGAAAACATCTAAAAAGTCAGTTTGTCCTTGAACTTCAACTAAAAATTCT
TTGCGAGCTACATTACTAATATCTGAACTAACAATTTTGTCAATTTGTTTGTTTTTGACA
TATTCCCAACGTCCTGGAGCGCAATAAACTAACTCTAAATCACTAAATTGAACATTAATT
TCAACCGATGATGACGACCCTTTAATTGTATCTCCGGAAGCAGCTACTAAAGTAACTGGA
TTGATGTTCCATGTAGCGAATACGTCTCTAGCTCTAATTACCTTGTTGTAATCATTAACA
GTTCCTTTAGGAAGTTGTAGAGTTACTCTTCCAGACGAAGTATTAATGGCATATGATTTT
CCCCATTCTGCCGCTAATGTTTGTCCAGATGAAGCATTATAAGTTTTCCAGGCACCGGCT
GAATATGGAACATCTCCATCACCAAGTTCATAATAAAGTTCATCAAAGTTTTCATTTATT
TTTATACCACCTTTACGCAGGTAGTCACCGGTACCATCATCAACAACATTACCGATATTA
ATATTTTGTTTCATTATTGAGCCACCCCGATTTTCTGCGTAGCGATAACTTTAACTGCTG
CTCTCATACCGACAGTTGAAGAACTTATAGTCGCTGTTACATAATTTGTTTTAATACTAA
ATGCAATATTAGCGATTTCGTCTTCTTCGGTTTCATTCCCAACCCGCATGACAGCATATT
CAGAAGAAATGACCTCTGAATTAACAGTATCTACAAGAATATTTATTTCTGCTGTTTTAA
TTTTTCTTCCATCTACTGATTGGCATGTAACTAACAATTTAGCCATGTTATATTCAGTAC
GATGAAATAGCGGAATGTCAACTGATCCAGACGTAGAAATATTCCATGTACCTTCGGCCG
GTGATTCCTTTTGGCCAAACATACTTTCAATAGAATAATTCCAAACTGACGTAGAATTAT
CAGATGAAATACAACGTAAAGTAACTTTACTATATGGGCTAGTTACTACCAAATTACCTG
AAACACCTTTAATTGAATCAATCGCTTGAATCGTTAAAGGATTGGTAACTGATATAGATC
CATTTGAGTTAATAAATTCAACGCAATCACCAAGTTCGCCTCTTTCAATGATAACTTTAA
CACCTACAGCAGAGGTATCAATATCATGTCTAGTACCAACTTTCACCGGAGTTGCGTACT
CTGTGATAGAATGCTTTTGATAATATCCAGTAGCATGGATAATTTGGCCGTTAGCACCAG
TGCCATTTGCTACTGCCATTTTACGCTGATCGCCAAACGCGTTATAAATTGCGTTAAAAT
CACTATTAATTTTATTACCACCGTCGAATAAGATATCACCAGTAGAAGCGTTACCAATTT
CGCCGGTATCAATCAATTTCTTTGGTTCTTGAATGAACATAGCGGTTTCCTTATGAGTTT
ATAGTATTTATAAAGAAAAAGGGAGCCTATGGGCTCCCTTAATTTAAAATGTAAACAGAA
TATTGATTTCTTCTGTTTGATCCATTGCCATAATAATAGGTGGCCTATTTTCCATATAAA
TCATTTCGCCCGAATGCCTCATTAAATCTTCCGGATCATAGTAATCCTTTTCAGCTTTAA
CGTTTGGGTCATTTGGATGAACTTTAGCTTCAAGAGGATTCGTGATTATCGATATTTGTC
TAAATCCTTTATTTCCTGGCAATGCAGCTTCAGGAAAATAAACTGAATCTAAGTATGCTT
TAAAACGAATAGTATTTGCCTTAACCCGGTAAATTAATCCAAAATCATCTTGCTGCCAAG
TGAGGTTATCTTCATACCCCCATCTAGTCGGATCTTCTTTTAATTCCTCAGGCCAAGGAA
CCACGATATATTCATTCGTGCATCTGTTTATAGATACATCAGGCGGAATCTCAAAAAGAT
ATTCCCATACATACCCGTCTCCAGGTTCGATTGTTCCTTCCGCGTCTCCTCGACCTTCAG
GAGGAGTCATTGACCTAACAGAAGGAGTCCATTTTCCACCTAGCTTAAGGCATTCATCCT
TATTAGTTAAAGACTCAATTGAGCACATTCCGGTATCAGGAACATCTAAACAACGATATA
CTAACCAGCCTGCGCCTGATTCGGTAGCGTTGTAAGGAGCTGAGTTACACACTACAATAT
CGTTAATTCTAAATGTGTATGGATCCGGATATCTAGTATCTCCCCAATCTCGACGAGGAA
TAACTGCATCAAGCATAGATGGAAGAACCTTCACGGTTCCCATCATATGAGTCCACATGT
CAGTTACACCTAACACAGAATCAGTGGGATAAGGTGGGGCAAATCCCACCTCATTTTCGT
TTGATGACCACGGTTCTGATCTTCCAAATGTAATAAAGATAGTGTTTTTATCCGGACCAC
TTCCAATTGAATTATAAAAATTCAACATTTTTTCTGTTCTAAATTTTGAAGTAACTATCG
CACGATAGATAACACTTGAATCATTCATCTATTTTAACCTGTGTTGGATTTTCAGGGTCT
CTTGGATTTCCTATATTATCTTTTAGACGTTTATTAACTAAATCCCTAAACTGTGCAAAT
GTTGTTCCAGATGCGTCAAATAGAGGACTCATTAACTTGCGTCGTTCAGAAGGCAATTGA
CCTTGAAATATTGAATTATTATTTTCAGCATTATAGTCATTAGGAAGAGGATATTTTACA
CCAGCCATTGGGCCAGGTTCATAAATTGCTTCTCCTGTTACTGAATCATGTTCAATTTCA
CCAGTTGGAGTTAATTTAGCTACTCTATCAGCATATTCAGTAGGCAATCCAGAATCCCAC
TTGTAGTTTTTGTATTTATTAATTATAGTCTCTGTATGTTTAAGAGTTAAACCGACATTA
ATAAACATTGTTAAAAGAGTAATTGCTATAAATCCAAATCCTACTGGATGAACAAAGCGA
ATAACGTCAGATTTCCAGCGAGAAGAAGGTAAATTGGATTTAATTTTCATTACATAATAT
GATCGGCTTCTATTAATATAGTCTATATTATTTTGAAGCAAATCCTTTCCTTTAACACCA
CGAATAATTTCGCCTTCAAAACTAGGGAGTCTTTCTGCTTTAACTTCTTGACCGGCAATT
AATCTTCCCAAAAGATTATGAATAGTTACAGTCCATTGCAATTTACCGTTAGAATAACTT
CTTTCTATATAAGTAACATTACATCTTCCTGTAGCTGTATAAATCGTTTGTCCTACTAAG
TCTTCAGTCAAAGAATCAGATTGAATGATTATATCATATTCAGTACCAGCCCCAGATTCA
ATTTCAATTTCAACTTCTTCATTATAAAGAACTTTAAAAAGAAATTTGTATGATGCTTCA
ATTCCTTTAGTAGAATAAAAATCATAGCTACGTGATTCAAAAAATCTTGCAACAGCATCA
CGTTTGTCAGCATTTAAATAAATGTTTCTTTTATATATCTCTGACCACAAATATTCCCAT
GCATGCTCTTCTCGTGGATATTTGTTACGAATTAAATTTCGTAAATTGTTATACTGAGTT
CCATATCCATCAGAAAGATATTGAATATATGCTTCGCAAAATGCCTCAAAATTCGAATCT
TGTAGTAAATAAGAATCAGGCATCATTGTGCCAATCAATGGTCTTAAATCAGGGTCAGCT
AATCCATGCTCTTCTTCTGGTGACCAAGGAGTTTCACGCTCTTGGTTTTGTAAAAATGCT
TTTAAAAATATTCCAGTTGGCTTCCAAATTATTTCAACCGTGTCTCTCACTCGATAGTTA
AAATCATAGTAAGAAATTATTTCACCAGAAGATTTATAAAAAAGCATCCCAGACGCATAT
TTTTTAAATCCCGTGAATTTAACATTTGGCATTACTATCGTACAATCACCATCATCCCAG
TATTCATGAACTAATCTATCTGGCGATGTTTCCGGAATATTTTCTATAACTTTAGTGTAT
TTTAAATCAGCATAAACTACTACAGCTCTGTCAGAGTTGTTTATCCAACAACGTGTGTTA
GATTTTTTAGACCAGTTAAAGAATGGTTCAGCATAATATTTCATTGGTTGCGGAGCAAAG
GTTTCCCAATCAGACTTTTCATCTGCTATAAATGCCATCATATGATAATGCTTATCAGCT
AACCATTCACGAGGAAATTCATATTTAACAGCACCGATTAACTGATATTTCGCTGCAGTT
TCAGGGTCATTAACAATGTTATCACTTAAAAATTTAAAATTACTCGAAGACAGAGAAACT
AATTTACCATCAGTTGACATATTCGCATATCCAGGTTGAATACGTCTTCTTTCTTCTTCA
GTGTTGCCAAAAACTCTTTTCCACGTTTTTGTATCATGATTTAAAACGTATATTCCTTTA
TCATCAGAATCAATTATTTTTGATGTTCTAGGATTAGCATTTAATGTTTCAACTTCACCA
ATAATAAGAGCAAAAACTTTATCACCGATAGAATCCATTTTATAGCATACTGCTTTAGGA
TTTCCGGTTATAGTCATTGTATCAGGTTCAAAAAGTCTTTCCGAATATGTTGGAGATAAT
GGATCAGAATCTATAGGTGCATTACTCGTTTTTATGTATCTAACTTTGTCTCTGGCGACA
ACGTAAATGTAATCATCGGTGCAAGTAATAGCTTCAGCTATACGATACACATTTGCAGGT
AATGTAGCATAAGTACCAAAGATTTCAACATCAAATCCCAAATGAAGTTGATCACCAAGT
TTAGCGAATGTTATATCCTGCGAACTAAATCTGACATCATCAGCTGACCATCTAACATCA
GTAGATTTGCGGCCATAGAAAATCTTGTCGTATCCTAGAACGTATGTTGTGCTCGCAGAT
TGGTAATATACAGTCTTAGATAAAGGATATCCTACACGGTCATTGAAGAGCTTTACAGCT
TTCCAAGTTTGTCCTTTATCATTAGATACTTTAACTACAGGTTGATAACGCTCAAAAAGA
TATAGAATCCCTTCTGATTCCATCAAATAAACTCGATTAATATCCTTACATACTTGCTGA
ATAGAACCTTGTATTTCATGATACTCATTTTCACCAATAATAAAATTACTTATTGATGAA
ACATCAGCATATGATGGGCTGAATTGGAATGATTCATTCATCAATGCAGCCATTATAGTA
TCATTATTAAAATTAACATAGTCAGAATTATTAAGAGTAAATTTTTCCTGAATGAATTTA
TTAGCTAATTGCATTTCAATCATGTTTTGAAATGTATAAGCGTTTGTAGCAAAAGTTTCA
AACTCTTCGGTATAAATCCAATCAGACTGCTCAAAATCCTGTGCAGCTGTAGCTACTCTA
ATAATGTACGATGTCAATGGATTAGCATTATCAAAAAAGAAGCTGTTATTTGCAGTATAT
CCTAAGTTAATCCATCGGTATTGATTGCTCGGGAGATTTTCCCCCGAGTTTGTTTTTGTC
TCAGCGATTTCTACAAAATAGTAGAAATTAGCACCAACGTCATCCCAGCGTACTTGCACC
TGATTTGCGGATAACTTGGAAATTCTGAGACTAGTGACTGAAGGTGCTTTTACTGTCATT
GTGATATAGGCTCCAAATCGATAGTTAAGTATTGTGGACGTAAATCATTTTCAAATACAA
TCAGTGAACCATCGCGTGTGAAAATAACATCGTCTATTGGATCAGAATATAGTTCAATAG
TCTGAACCTCAAATTTATCGGATGTTAAATTAATTTTAGCGATATTCCAATAAATCATGT
CAGCTGGATAATTTATTTCACCGATAACATAGTATTTGTCACGTCCATCGGAACTTGCTA
ATTTATTAAAATCATTGCCTGTATACGGCTGAATGTTTTCATTTTCTGTAACATCGCCAG
AAGCAAATGGACCAATAATAACTTTGCCAATTCCTTTAGAATCTCGGTCTGTTGATACTA
TACGAACGTCATATAATACATCTTCTTCTAAACCAGTATCAGGATTTACAACCTTTCGTC
CAGAATTAAATGAAAACGTATTAGATTTCATAGAACGATCTTTTATTTGATTATTGTATT
TAATACCTGCTTCAGGCGTTTTATAGAAGTTTTGTACTTCACGGACAATTTGAATTGTCG
CGGATGAGCCAATGATAGAATGATCTGCATCATCTACGTATGTCAGCATCTTAGATTTAG
CAAAAGATGAGTTAAAAATTTCTACATCTTCGGTATAATAACGATCAATTTTATCAATTA
TTTGACCTTCGAGCCACTGTTCTGATTCTTGCAGCTTATTTAAAGCATATGTGACTTTTA
AATTAGTCTTAATAAAAAGGTAATTAGGAGAAATAATTGATGGTGTAATAGGAGCTAAAT
TATAGTCTTTGAGATAATTTTTAATATCTTCGCGTTGTACAGTAGTTAAATATAGTCCTG
ATTTAGGTTTAGCAGCAATAAATGCATAACCAGGCTTAGTAGAATCAGTGAAAGTCTGAA
CTGCTTGAATAATAGAACCAAATCTCTCTGAAACGAATGTATCATAGTCAGTCGCAGTTA
CGCATCGTTGCTGAGTTTCGCGTTTAATAGTACCCAATTCGCGAATACGCTCAATATCTT
CTGGATCGCCGCCGCCATCTGCCCCAACAAAATCTGGGTCATCATTTGGATTTTCGTTAA
TATTGATGACAGTTATATTTGTTAATGTATCTGCGTATGAAAATCCGACTGCACCATTCG
CATCTGCACCGTTAGTACTGATGTACTCAATAACAATCGTAGAGTTCTGGGTAGGTTTAA
GACCTCCAATATAATTAGCGGTCAATGCTCCTTCTGCAGCATTAACAGAAATCTCACCTT
CACCAAAATAAAATTCAGTATTTCCATCAATAGTTTCACGCATGTAGTAAATTGTTGATG
TAGAACCAGCATGAACCATTGACTTTCTTGTCCAGTTAATCCATTCTGCTCCATCAACAT
ACAGCTTAACTTGGTTTCTATCTATATTTTTGTCATAAATGATAATAGGTGTTAATTTAT
CATAAATGATTTCAGTTCTTACTATACGTCCCTGGGCTAATTTTAAACGCGGAAAATATT
GGTTATTTTTATCGCGAATAGCAATAACATCTTCGGTAGATACAAAGTTATAAGGATTAA
CAGAAGTATCTTTTGCATATGCTAAAAAGCGAGTACCGCGAGGAATAGTAATGTAATTTC
TATTCAATGCGTCTGTACAAGTTAGCATAATTTCAGTTTGAGCAGCTGATTTTGAAGTAG
GTAAATATCCATTATCTTGTGCAGCTTGAACTACTGAACTACGCAAATTAGCAGTACGCA
TAAAGCTTTCATACAAGGCAGCATTACCAAACTGCTGAATGTACAATGTATTATAAGCCA
AAAGGTCACACAGAACGTTTAATCTTGAGCCTTCAAAATCATAATCCAAAAATTCATTTT
GACCATTAAGCCATTCAATGAGGTTTTGTTTTATTTCAGCAAATGTACCCCCGACGAATA
TCTCGGGAATAGCATTTGCTGTTCTTGTTAATTGATAATTTACAGGGGTATTTGCCATTT
TAAATCCTATTTAATGAATACTTTAGATGATGCCTGAGCCACAGTATCACCGCATGATAT
TGGATCAGCCATTTGAACAGCTTTCTTTCCAGTGACATATACCTTAGAAGTTCTAGGTTG
TGTCACTCCGCCATGTGTTTCATATGGCTTTTTAATTTCTGTATGTTCTGTAATTGGATC
ACCTGCTACGAGAACAGCAATTCCTCCAGTGAATACTTTACTTTGTGTAGCATTCACAAC
TGTTGGAGGCCACGCTTCATGGCCGGCAGTAACACACTTATCATAACTTAATCCTGACAT
TTATGGCCTCTCATATACATAGCTTCTCAATTTATTAGCCCAACGACTCCAATTTCCAAC
TATAGTTTTTGTGTAATTTTTAACAAGAGTTTTTCTTATTGGAGCCGGAGGATTCGTTGG
TTCAGTAGTATCAGAAGATGACCTAAAATTACTGCCAGAACCTCCAGATTCACTTTGTTC
TTGGTAGTCATATATTAATGTTACTTCGTAGGTGAATGTCTTCTGGAGGTTTTGAGGAGC
TTTCCATAGATATAACTGAGTATTAGAATCAGTTGGAAGGTCTTCCCATGAAGCAGCAGT
TTTAAATTCATCATCTAAACGATATTTCAATGCGTCATTTCCAAATCCAAATACAGATTC
ATACGTTCCATATAAACGATTTTCTTCTACTAAAACCCCAGGAGTTTCTTCGTAACTAGT
TATATTTATAGATACTAACGTTTCACCTGTTTCTAATTGAGCGGTAAAGGTGACGTCGAT
AGAAGAACCTTCCATGGATTCTCCTAAATCAGCGCTCATTGGAAGTATATTAGCCAATGT
CAATCCTCGATCCATCAATTGTGTATTGACCAGATGAAATAGAACTCATAGATGCCATTT
TTTCTGTCCAATCACCACCAACGTCCCAATCAACTGTCCCAGCAACTTTCCAAGAAAGAT
TTCCATTTACTGTATTAGTCTGATTTCCTTCAACTAAAGTGGTAGCATCTCCTTTAACTG
TAATGTCAGCATTACCTTCGACTACAATAGTAACATTACCTTTAACTAGGATAGTTCCAT
TACCTTCAACTGTCTTAGTTTCATCGCCACGGACAAATATTGTGTTGCTTCCATCTATTT
GGTGAAGACGATTATCCATGTTGTAGTAAATTTCTGATCCACCGACGTTAGTCTTTTTAT
CACCGGCTACCAAAAAATTACCATCAGCATTTGTTATATCATACAAATTATCAACAGTTT
TTCTTGTTCTTCTTCCTGACGGTGATACTTCCTCATACGTTCCAGTCGGATGAACTAATC
TGTATCGTTCTTGCCCAGGGGTATCATCAAATTCCTGAATATGACCGCTTTCAGTTTCCA
TTGTGTGAACATACGGATATTCACCTTTATATGAAGAAACAGGTTCTTTGAATAAAATTC
TCGAATCATTCGGAATAGGAGGGTCAGCTGGATCAGAAGACTTTGCTACAGTAGCAGCCA
TTGCTGACAAAGACCTAGCTGGTGTTTTAACTTCAATACCGTATGATTCCAAATTCCCTG
TAAGAATAATCATGGTAACACGGGATGCACGGCCTTTTGTTTGTTGATACCACAATGAAT
CACGCCCGGCTTTATATGCTTTTTCCCAATCTCCGGCTAACATAGCAGTTAACATTGTGT
TAAATTTAGCTACGCCGCCAACACCCATCTGAAATGCCATATTTTCTAACGCCATTTGAC
GAGAACGATTAACTGCTTTCCAAACTGGGCCAACTTTAGAATGTGATTTAATGTCACGTT
GCATATCAGCCAAATCGCGTTCAAATAAAGTTACCGCTTCTTCCATTGTAATAGAACCTG
GATTTCCGGTAATTTCACGACCAACTTGTTTTGATAAAACTTTATTAATTTGGGCCATAT
CACGAACTGGCTGCTTCATGATAAGATGACCAATACCAATTGTCGGATATCCTTCGGTAT
CCCAATAAACTTTTAGTCTTAATCCTTCATCGCGGCGAAGCATTTCAGCCATTGACATAT
TTGGATTATCATCAGTTGGAATCTCTGATAGCGGTCTATCATCGGGATTTATCGCAGTGT
CTAAATTACTGTCTTGGATAACGTTAGAAGACGAATCATATCCTACTTCTCCGCCTTGGT
TTAATACGTTAGTATCATTTCCTAGACGTCTAGGATACTGTCCAGTTGGGTCAGAAAATC
CTTCAAGTCTATTAGGTTTTTCGCGAACTATCCCGCCATACGTGCCAAGGACAATTCCGT
TAGTTTTCCATTTGTCTAAAAAATGACCATATACTCTAGTTCCTTCTACCGGACCAGTAA
CGGAGCCTCCAATTCCAGACATTGCTGCAGAAGTTATAGGTTGAATAACTGACATCCATG
GTAATTTATCAGTTGGAATACCCATTACATCACCTTGTGCTCTTTGAGGTGGATGCAGAC
CAACCACACGAACACGAACACGACCTAATTTTAATGGGTCCATTCTATCTTCAACAACAC
CAACAAACCAATTAAGGTTATTACTTATCATTTCCATAAGATTTCTCCATTATACGTATA
AGGTCGTTCATAAATGAATTAATGTCTGATTTTGCTATTATTTTTATTTGACGAAGTTTT
TCATTTTCAAGAACAGCATCTTCATACGTATCGACCGCAGCAAGCGCTCCTTCATATTGA
GGATATTTTCTAGCTTTATCGCCTTTGTCATACCAAACATATGGATTATCATCGTATGAT
ACTAAATTATAAAATTTTTCACCGTTCTCATTCACATGATATACTATTTGGTCTCCACCT
ACATTTTTGTATTTTTGTATAGATGCTTGATAAGCAGCTTCCTGCGAAGTAATCCATCCA
TAATACGGGTCATAATTATCATTACACATCAATAAAACCCAATACAACTGTGGATTTCCA
TATATAGTATTTGCTAATTCTTCCGGGCGTGGTGAACCTTTAATATAATAAGTACGTAAG
CGGTATCCCGCAAGAGCGCGTTTAAAATAGTCTTTATAGTTTCTAAAAATATCTGTCATA
GGAATAGTCGGCGCGTTTTTATTCACCGTTTTGGCCGCATATTCAATCGGATCAAAAAAT
GTAAAGAGCATGGGCCCTCCTGTTTATAAATATATTATCTATTTATAAGGAGAATCCAAT
GACATATTCTGGAAAATGGGTTCCTAAAAATATATCAAAATACAGAGGTGACCCTAAAAA
AATTACGTATAGATCAAATTGGGAAAAATTCTTTTTTGAATGGTTAGATAAAAATCCAGA
AATTATTGCATGGGGTAGTGAAACAGCAGTAATTCCTTATTTTTGCAATGCAGAAGGGAA
AAAACGTAGATACTTCATGGATATTTGGATGAAAGATTCTTCTGGACAAGAATTTTTTAT
TGAAATAAAGCCTAAAAAAGAAACACAACCACCAGTTAAACCAGCACATCTAACAACTGC
AGCGAAGAAAAGATTTATGAATGAAATTTATACATATTCAGTTAATACTGACAAATGGAA
AGCAGCTCAAGCTTTAGCTGAAAAGCGTGGAATAAAATTTAGAATTTTAACAGAAGATGG
ATTACGAGCTCTTGGCTTTAAGGGGGCATAATGGCTATTTTTCAAATAATTAATGAAAGC
ACTCCCCAAGTTCCAAAGGTTAAGCAATCATTAAACGAAAAGAAATGGATTCAGATAGGT
CTTGAATACAAAAAGGCCAAAGCAAAAGGAATGACAGGAAAGCAATTTGCTGAAGAAAGA
GGAATCAAATACTCTACGTTTACTTCGGCAATGTCAAAATATGCTTCAGGAATTAAAACA
GCCGAAAAGATTCAAAAGCTTGAATCAAAACCAATGAATAAACTCAATAAGCAAGAAAGA
CAACTGCTTATGATAAATTCATTCAGACAAACATTGCGTGATAAAATTCGTAATGAAGGC
GCAGCAATTAATAATAAAACCAGAAAGTGGTTTGCTGAAACTATTAAGCAGGTAAAAGGA
CATAAAGTTGTTCGCCCGCAGCCGGGACGAATATATGCTTTTGCTTATGATGCTAAACAC
AAGGAAACTCTTCCTTATTGGGATAAATTTCCTTTGATAATTTACCTCGGTTTAGGTAAA
CACAATTTAATGTATGGATTAAACTTGCACTATATTCCACCTAAAGCTCGTCAACAGTTT
CTAGAAGAGCTTTTAAAGCAATATTCAAATACACCTACTATTACTAATAAAACGAAATTA
AAAATTGATTGGAGTCAAGTGAAAGGATTTAGGGGTGCAGACCAAATGATTAAGGCATAT
ATACCTGGTAATATTATGGGTAGCCTTGTTGAAATCGCCCCGAAAGACTGGGCGAACGTT
GTGTTGATGCCACTCCAAAGCTTCTACTCCAAAGGAAAACGTTTCTCTGCAAACAAAGTT
TGGAGCAATGTACGATGAATTATGAAAAAATTTATAATTCACTAATTGATAGGGCTCGCA
ATAGAGCCCTTACTGGATATAAAGAAAGACATCATATTATTCCGAAATGTTTAGGCGGTA
GTAATGATGCTTCTAACTTGGTTGATTTAACTCCAGAAGAGCATTATGTTGCACATCAGC
TATTAGTAAAAATACACCCAAATTCTTTAAAATTATCTTATGCAGCCATAAAAATGACGG
TTTCAACTAAATATGTTAGGAGAAATAATAAAGTTTATGGTTGGTTAAAAAGAAAACATG
CAAATAATATTTCAAATACACAAACTGGACGAAAATATTATAATAATGGTAAAAGATGTA
TAAAATTGCATGATGGAGATATAATTCCTGAGGGATTTATTTTAGGAAGAGGATGGAGTC
CGACACAAGGAACAACTCATTCTAGAAAAAATGACACATTTAAAAACAAAAAGCTTCAAT
CTGCTTTAGCTAATAAACGGTGGGAAAAAGAAAAGAAAATAATGTTAGATAACTTTGGAG
TTAACACTATTGATGAAGCAAAGAAAATTGTTCTTGATTTTAAATCAACTTGTCATCCAA
GATATTGGCGAAAGCCAACTTTAGAAAAATTTCCATTTATGACTTCTGCTCGTTTAAGAA
GTCTAATAAATTAATTCTATTATCTTCCATTCTTTTCTATTGTTTGTTCTAATTGGAATT
GAATGGAAGGGACTTAGACCCATTATACCACCAACATTTATAAAGCATTATGAGGAATAT
ATGTCGCAAGCACTACAACAAATTTTTAACCAAGCAAATACAACTAACTTTGTAGTATCA
ATACCACATAGTAATACTACATCTGCTTTTACTTTAAATGCTCAATCGGTTCCTATTCCA
GGAATTAGAATACCTGTTACTGATACCGTGACTGGGCCGTTTGGACTGGGCCGAGCACAA
CGTCCAGGTGTTACATTTGAGTACGACCCACTCATTGTGAGATTTATAGTTGATGAAGAG
CTTAAGTCGTGGATAGGAATGTATGAATGGATGCTAGGAACTAGCAACTATCTTACAGGT
GAAAATACTGCCCAAAAAACAGGTCCTGAATACATTACGCTTTACATTTTAGATAATAGT
AAAACTGAAATCGTGATGTCAATAAATTTTTATAAGCCTTGGGTTTCTGACCTGTCTGAA
GTAGAATTTAGCTACACTGAAGATTCAGACCCAGCTTTAGTATGTACAGCAACGATTCCT
TATACGTATTTTCAAGTAGAAAAAGATGGCAAAATTATAGCAGAAGTTTAATGCTTCAGT
TTCATGTGTTATAATCTTAACTAAATTTGAGGAGAAACATATGAAACTAATCTTTTTAAG
TGGTGTAAAGCGTAGTGGAAAAGATACTACTGCAGATTTTATCATGAATAATTATTCTGC
GGTTAAATATCAACTTGCTGGTCCTATTAAAGATGCATTGGCTTATGCATGGGGTGTATT
TGCAGAAAACACTGACTATCCTTGCTTAACTCGTAAAGAGTTTGAAGGAATTGACTATGA
TCGTGAGACTAATTTAAATCTGACTAAATCAGAAGTAATCACGATTATGGAACAAGCATT
TTGCTATCTTAACGGTAAAAGCCCAATTAAGGGGGTGTGTGTGTTTGAGGACGAAGGACA
AGAATCAGTTGATTCCGTAGCATGTAACAAGATTATTGACGTTATAAATAATATTGAAGA
TCAATGGTCAGTCCGTCGTCTGATGCAAGCCCTAGGTACGGATTTGATTGTTAATAACTT
CGACCGCATGTATTGGGTAAAATTATTTGCTTTAGATTATCTTGATAAATTTAACTCAGG
TTATGATTATTATATCGTTCCTGATACTCGTCAAGATCATGAAATGGATGCGGCTAGGGC
GATGGGTGCTACAGTAATTCATGTAGTTCGTCCTGGTCAAAAATCCAATGATACGCATAT
TACAGAAGCTGGATTGCCAATTCGTGATGGCGATTTAGTAATTACAAACGATGGTTCTCT
TGAAGAACTTTTTTCTAAAATTAAAAATACACTAAAGGTACTATAATGTCTGAACAAACT
ATTGAACAAAAACTGTCCGCTGAAATCGTAGCTCTGAAGTCTCGTATCCTTGATACTCAG
GACCAAGCGGCTCGTCTGATGGAAGAATCCAGAATTATGCAAGGAACTTTGGCTGAAATT
GCTCATGCAGTAGGTATCACTAGCGACACTATCAAAGTTGAAGAAATCGTCGAAGCTGTC
AAGAATCTTATTGCTGAATCTGCTGATGAAGAATAATGGAATTTAAAGACTTTTCAACGG
GTCTTTATGTAGCAGCTAAGTTTTCAGAATTAACACTTGATGCGCTGGAAGAACTCCAGC
GCTCTTTACGTGTTCCTAATCCAGTTCCTAGAGAAAAAATTCATTCGACCATATGTTATT
CAAGAGTAAATGTTCCATATGTTCCATCGAGTGGAAGTTTTGAAGTAGCTTCTTCTGGAC
ATTTAGAAGTATGGAAAACACAAGATGGATCGACTCTTGTACTTGTGCTAGATTCTGAAT
ATCTGCGCTGTCGACACATGTATGCGCGGGCACTAGGTGCTACACATGATTTTGATGATT
ACACACCGCATATAACATTGTCTTATAATGTTGGACCCTTATCATTTAGCGGTGATGTAC
AAATTCCGGTCGTATTAGATCGTGAATACAAAGAGCCTCTTAAACTCGATTGGGCAGATG
ATTTAAAATAATTTCACAAAGTTGTTTACACGGGGTTTTAGTTGTGATACTATTACCCTA
TCAAAACAAATGAGTGATTGGAGAATAAAATGAAAACATTTAAAGAATTTATCAATGAAG
CTACTTTTAACGAAAAAGTAAAAATTAGCAAAGCTGTCAAGACTTTGATTGCTGACATCA
ATTACCTATATGATATTGATTTAACTGACTATGTAACAGTTGGTAACAAACGTAACTTTT
TCGTGTTTGACATCTCTGAACTTGACCAGAATCAAATTAACAACATTGAGCGTTTTGCTA
ATGATAAGGGTCTTCGTCATGAGTCAGCGGGTTATAAAAAATACGCAATTTATTTAAAAT
GAGTTTACTTTTAAATAGGGTTGTGGTACTATTATCTCATCAAAATTAATTAGGAAAATA
AAATGAAAACATTTAAAGAATTTATCAATGAAGCGGCTGCACCAAAGACATTCGTTATTA
ATACTCAGGCGAGTCTTGACGATGAATACGCGGAGGCAATTCTGAAGTCACTTGCTAAGA
ACGGTGTTGAAGTAATTGCTTCGGACTTTAAGAAAGGGGCTTCCGAGATGTTTATTTCTA
TAACTAAAGGATCTAAAGCTAAGATTAAATCATCATTCGGTGTTGCTCGTACCGATCAAA
TCGACAATCATGACTTTAAACAAACTGGTGCTAAACGACAGAATACAATTGCATCACGCG
GAATAAAATAGTTTATAAAACAGTTTACTTCTGGGTAGTAGTGTGATACTATTACCCTAT
CAAAACAAATGAGTGATTGGAGAATAAAATGAAACGCTGTGAATTAATTCGAAATGTTGC
TATTGCAATTTCTGCTTCCGCTTTTAGTTTTTCAATGTTTGTTGGATTTATATGTGGATT
ATTGACTACAGCAGAAAATGTTTTTTCACTTGTAGTAGCATTTTTAATTGGTTTAATCGC
TATTGTTATGGATAAAATTTCTAAAGGTGAATAAATGAATATTAACGAATATTATGTTTA
TGCTGGGGATTATGCAAATCCTTCTCATTTTGAAGGTAATTTAATACCTGATAGAGTTTT
TAATACTCCTTTTGAAGCGTGGAGTTGGGTTGAAAGTAAAAATGGATTTTCTTATCGTTA
TGTTGAAGTAACTGATTGGAAAGGAACTAAATATCCTAAAGAGCATTATTATGTAGACCC
ATCTAAAGTAAATTTTCTTTTGTTCGCAGGCGATAATTACTATCCTTGTGGTGGATATGA
TGATTTAATTGCGTATGCTGAAACAGAAGATGAATTACGTCAAATTATTGAAGACAATAA
ATCAAAACGATTTGGCGATAGTTTCGACTGGTGGCAAATCGTAAATGCCCATACACATAC
TATTGTTGATAAAGGTTAATAATGATTCTTTATGCGAAAGTATCATCCATTGAAAATGGA
TATAAATATGATCAAGAAGCAGCTAAAGCTTTGATTGATGATTATGGCATTTTAACATGT
TTTGAAGTTGAAAAGGTTTACATTGACCGTTCATCTTCTCAAGTTAAATTAGTGAAGGAA
GAACGTAAATTTAATACAGTAAATTTTGATTTCTTTATTGAAACAGAAAAAGGTCCTCTT
GAATATGATATTTTCAAGAATCCTTTGGGTCTTGAATGCATCGTAAATATGTATTATTAT
AAATGGTAAATATGCTTTAAGAATTATTTGTTATTATTAACTCACACCGCACTGATTAAT
ACCCTCTATCATCAAGGGTTCTTGTTTGAGAGCCTTTGCTAATAATTGGGAATTAGCCAA
GTTGGTAAGGCACTGGATTTTGATTCCAGGATGCAAAGGTTCAAGTCCTTTATTCCCAGC
GCGAGAATGGTCAAATTGGTAAAGGCACAGCACTTAAAATGCTGCGGAATGATTTCCTTG
TGGGTTCGAGTCCCACTTCTCGTACCAAAGTTTGCGGATATCGTATAATGGTATTACCTC
AGACTTCCAATCTGATGATGTGAGTTCGATTCTCATTATCCGCTAAAATTTAATTTACTC
CGTGTAGCTCAGTTTGGTAGAGCGCCTGATTTGGGATCAGGAGGTCCAAGGTTCAAATCC
TTGTATGGAGACTGGAGGCGTGGCAGAGTGGTTTAATGCACCGGTCTTGAAAACCGGCAG
TCGCTCCGGCGACTCATAGGTTCAAATCCTATCGCCTCCGTAATTTCGCTGATTTAGCTC
AGTAGGTAGAGCACCTCACTTGTAATGAGGACGTCGGCGGTTCGATTCCATCAATCAGCA
TATCAAGGCCCTGTAGCTGGAAGGTTCAAGCAAGCGACTCATAATCGCCAGATGGTGGTT
CAATTCCACCTAGGGCCATATTTTGGGAACATAAATACTCTTAGAAATAGGAGATATTTA
TGTTCCATTACACTTATAAAATAACAAATAAAATTAATAATAAAATCTATATAGGCGCTC
ATTCTACCGAAAATTTAGATGATGGATATATGGGTTCTGGTAAATTATTAAAAAGAGCCC
AAGACAAGTATGGTATAGAAAATTTCTCTAAAGAAATATTAGAGTTCTTTGACGATAAAA
CCTCTATGTTTGAGTCAGAAAAGAATATTGTGACTGAAGAGTTTTTAAAGCGCCCTGATG
TTTATAATTTGAAATTAGGTGGTGAAGGTGGTTGGGGCCATTTAAACACTAAAGAATATT
TGGATAAAAAGAAAGAAGCTTCCTTAAAAGGGGCTGCTGCTTTTAAAACTAGATTTGAGA
ACGACCCAGACCTTAAAGAAAAATATCGTAAAATGGGTTCAGAAAGGTTTAAACAGCTTT
GGGATAATCCTAAGTATAGAGAGAAATTTTTAAATACTAAATCTTTCTTGGGTAAGACCC
ATACTCCTGAAACTATTAATAAAATGAAAGAATCTCACGCCAGAAATAAACACCAACAGG
GCGAAAAGAATTCCCAATTTGGTATGGTGTGGATTCATTCATTAGATGAAAAAGTTTCTA
AACGTATTAAGAAAACTGACCCAATTCCAGAAGGATGGTTTAAAGGTCGAAAAATGAAAT
TTTAATTACGGGGCATAGCTCAATTGTATAGAGCAACGGACTTCTAATCCGTAGGTTGAA
GGTTAGAATCCTTCTGTCTCGACCAGACAAGAAGCCGGGTCGCTACCGGCAAGTCGTCGG
ACTGATGTTCCCTGTTTAAGGACTGGCATTAATAAATCTTTATGTTTTGTTAATGCCCCC
TTATATCACAGCAGAAACGGCGCACCGAATTATCGATTCGAGGAAATATCTTTGCCATAA
GCCGAGTAGCGTTTTTGACGGAACGTTCGGATATGGTCGAGATATGGCCTTTTAAAAATA
TTGAGTAGCGTCAACTACTTAATAACCGGGTTCGAATCCCGGCGTTTCGTACAAACACTT
GCCTTAGCAGGTGGAACCCCGACAAGGTTGCCGCAAGGCTTAGCCCCAGCCGAAAGGTTG
GGGCTTTTTGGTATCTAGGCCTTTCTGGACCTCTCTAGGCATCATTTAGTTTCTACCCTT
TATAATATATTATCCTATCCTTTAATTGCCCCTTCCCTCCCTAGAATTCCCTAAAACTTT
TTAAAAAATTTTTCACAAAATGGTTTACATCCCTGTTCTTCCATGGTACTATATCAATAT
CAACTACTGATACAGAAAACAACTTGGAGAATAAAAT

[0135] In another aspect, the invention provides an SF60B bacteriophage targeting a Shigella spp. bacteria. In certain embodiments, SF60B binds a molecule of OmpC. In certain embodiments, the SF60B bacteriophage has a genome comprising a nucleic acid sequence comprising SEQ ID NO: 7.

SF60B
(SEQ ID NO: 7)
AATTTAGCTTTAGCTTCTTTGTTATCATCAAGAGCCTTCAGCTCTGCAATATAATCTTTA
TCTATCATAATATTTCCTCAGTATAAATATAGATATATTTATTACATGGTATTTAGACAT
GACTGACATTAAAGTACATTTTTATGATTTTAGTCACGTGAGAATTGATTGTGAAGAAAG
TACATTTCATGAACTCCGTGATTTCTTTAGCTTTGAAGCTGATGGGTATCGTTTTAATCC
GAAATACAAATATGGCCACTGGGATGGACGAATCCGTCTTTTAGATTATAATCGTCTTCT
TCCATTCGGCTTAGTCGGGCAAATTAAAAAATTCTGTGATAACTTTGGCTATAAAGCCTG
GATTGACCCACAAATTAACGAAAAAGAAGAATTATCAAGAAAAGATTTTGATGAATGGCT
TTCTAAATTAGAAATCTATTCAGGAAATAAAAGAATTGAACCACACTGGTATCAAAAAGA
TGCAGTGTTCGAAGGATTAGTTAATCGTCGTAGAATTCTTAATCTTCCAACATCCGCCGG
TAAATCATTAATTCAAGCTTTGCTTGCGCGATATTATTTGGAAAATTATGAAGGTAAAAT
TCTTATCATTGTTCCAACAACTGCCTTAACAACTCAGATGGCTGATGACTTTGTTGACTA
TCGTTTATTCAGTCATGCAATGATAAAGAAAATTGGTGGCGGAGCATCAAAAGATGATAA
ATATAAAAATGATGCACCAGTCGTTGTTGGTACATGGCAAACTGTAGTAAAACAACCAAA
AGAATGGTTCTCACAGTTTGGAATGATGATGAATGATGAATGCCATCTTGCTACAGGAAA
AAGTATTTCATCTATTATATCAGGTTTAAATAACTGTATGTTTAAATTTGGTCTATCAGG
TTCATTACGTGATGGCAAAGCCAATATCATGCAGTATGTTGGAATGTTTGGTGAAATATT
TAAGCCAGTAACGACTTCTAAATTAATGGAAGATGGACAAGTAACTGAGCTAAAAATTAA
TAGTATTTTTCTTCGCTATCCCGATGAGTTCACTACTAAATTAAAGGGAAAAACTTACCA
AGAAGAAATAAAAATTATTACTGGGCTTAGTAAAAGAAATAAATGGATCGCTAAATTAGC
TATTAAACTTGCGCAAAAAGATGAAAACGCTTTTGTCATGTTTAAGCATGTATCACATGG
TAAAGCTATTTTCGATTTAATTAAAAATGAATACGATAAAGTTTATTACGTATCAGGAGA
AGTTGATACTGAAACACGCAACGTAATGAAAACCTTAGCTGAAAATGGTAAAGGAATAAT
TATAGTAGCTAGTTATGGTGTATTTTCTACTGGCATTTCAGTTAAAAATCTTCATCACGT
TGTTTTAGCGCACGGTGTTAAATCTAAAATTATCGTATTGCAAACAATAGGTCGCGTATT
ACGTAAGCATGGTTCTAAGACAATAGCAACAGTCTGGGACCTCATAGATGATTGTGGCGT
TAAGCCAAAATCTGCTAATACGAAAAAGAAATATGTTCATTTGAACTATCTTTTAAAACA
CGGCATTGATCGTATTCAGCGCTACGCAGATGAAAAATTTAATTACGTAATGAAAACAGT
TAATTTATAAGGGCTTCGGCCCTTTGGAGAAAAAGATGTTACTAGAATTTAAACAATTTC
TTTATGAAGCTTCTATTGATGAATTTATGGGTAAAATTGCCTCTTGTCAAACATTAGAAG
GTTTAGAAGAACTTGAAGCTTATTATAAGAAAAGAGTTAAAGAAACTGAATTAAAAGATA
CTGATGACATCTCTGTGAGAGATGCTTTGGCAGGAAAAAGAGCTGAATTAGAAGATTCAG
ACGATGAAGTAGAAGAAAGCTTTTAAATTAAAAAAGGCCCAACCAAAAAGGAAGGGCCAA
AACTATAGACTAAAGGTCACACTATAGCAAAAGTTGTGTTTCATTTAATTGTTCTTCCGA
ACTTTCTGAAACTGGTAGTTCTTTAATGTAATTATAGCAAGGCCCAGGATGTACAGGACC
TTTGTCTGTTTCAACAACCAATGCAGAATCGATTGGAGTTTTACAGACAACACAAATCTT
ATCTGACATGATTGTCTCCTCTGAATTATATATCTATTTATACAACTCTCATATGCATAT
CAATGCCCATATCTTTAGAATAAAAATATTCATCAAGATATCCGGCAAATTTTCCTTTAA
TATAAAGGACATCTTCACCACATGGATGATCGGCCAGGATACGAATATCCTGACGCTTAA
GATTATGCTTTTTCATTAAGAATTGAATTTCCGTTTCAAATTCTTCTTCATAATTAAAAG
CATCATCAATGCTATATCTCATTATTTTCCAGCCTCAAATGCCCGCATGTCTTGAATATG
CTTAATAGCAAATCCGCGTGATTTAATAGCATCAAGAGCTCCGCTACAGAAATCTAATAA
AATTCCCCAATATTGTAATGAAGTATCAACCTTTAAAACATCCTTATCCGCTGATAGAAC
TGTCTTCATTTCTGATTTCTCGTAACGATCCATACTAAATTCATCACCATCTCCTCGTCC
CGAGTAGTAGTCTAATTTAGCTTTAAGAGCAACTTTTTTCTGTGCATCAATTCTAAGCAT
TTCCTTTTTAATACTTGAATGCTTATTAAGCCATTTACTATATAACATCACATTATTAGC
TGCTTCATACTGTAATTTAGTCGAATCTATAAACACATCTTTCTTCAATTCTTCTTGAAG
ATCTTCTAATTTCATGTTGTTCTCTATTCAATTGTTATTGGATGGACTTAGATTCATTAT
ACCACGTTTATACGTGAAGCATTATACTCTATTACTGGAAGCCAGCTGCAGTTTTATCTG
CTCAATATCATCAGGGTTATCGATGACTGAAAAGCGTATTTCTACTATCAGAGTATAATC
ATCATAAACTGGTATCACATTAACTGCTAATTTGTCAATACGCGGCTCATAGTTTCTTAC
TGCGCTTTCAATGTTACGCTCAACCGTGTCAGCAGTAAGAGGAGTCATATTCTCAAAAAG
CTGATCAGATAAATCACATCCAAACTCAGGGTCAAACGGTCTTGACCCTTTTCTGGTTGT
AATAATTCCCAAAAGACTGTTTTTAATTGACCTTAATCCAAGGGATCTAGAAACATCTTT
GTCCCAGTCCATTTTCATTTCTGGGTCAATGTCAGAATAAAGCTTATTAATATTTGCCAT
TACAATAGCTCAAAGAATTCTTTGAGTCCTCTTATTACATGAGCGTGAGATTTTCCACAC
TCTGGACATTTAATTGGAACAGCCAAATAAACAGTAGGCTTTAAAAGCATATCTTTTATA
GCTACAATATCTGACTCTGTGATGATAGAATATAAATCTTCCAACTCTTTTTCATTTAAG
TCTTCAATTGGAATGCTTTCCCCGTTCGCGTGAATCGTTTCTATGCATGATACTATCATA
TGGGCTATATTTTTATCATCAAAAATTTTGGGGTAATGGAACTTAATTTTAATGTCACCT
AGTGTATACCAGAGGTCTTCTGGTGCATCTATTTGTGTATGTAATAGATTTATATGGGTT
GGTATTTCAGTTCCACAGGTGCACTTCCAGGAGTTTTCGTGATTAACTTCTCCAAGAGAA
TGCGCCCATAAATGAATCAGTAATAGTTCTGATTCTTGACGGTTTAAATCTTTTGCATTT
GTGCAGTCTTTGATTAGCTTTTTAACAATTTCTTCTACGGAACCGTTATTTTTAGCAGTA
ATAAGTTCTAGATACTCTTTAAGAGTAAATGCGCGACAATTGATTATTTTAGAACCAACT
CTCACGTCAAATTTATATTCATACATATTTAGCTCCTTTATTTATCATATTTATAAATAG
AATAAAAGGAGCATCTATGGCAAACATTATTCGTTGTAAATTACCAGATGGTGTTCATCG
TTTTAAACCATTTACGGTAGAAGATTATCGAGATTTTTTGTTAGTTCGAAACGATATAGA
ACATCGGTCACCACAAGAACAAAAAGAAGTAATTGCTGATTTAATTGCTGATTATTTTGG
AGACTATCCAAAGACTTGGCAACCATTTATATTTTTGCAGGTATTTGTAGGGTCAATAGG
TAAAACTAAAGTACCAGTCACATTTGTATGTCCAAAATGTAAAAAAGAAAAGACAGTTCC
ATTTGAAATATACCAAAAAGAATTAAAGGAGCCTGTTTTTGATGTAGCTAATGTTAAAAT
TAAATTAAAGTTTCCTTCTGAGTTTTATGAAAATAAAGCAAAGATGATTACTGAAAATAT
TCATTCTGTTCAAGTAGATGAAACTTGGTATGATTGGAAGGAAATTAGCGAATCAAGTCA
AATAGAACTTGTTGACGCCATCGAGATAGAAACATTAGAAAAAATTCTCGATTCAATGAA
TCCTATTAATTTAACATTGCACATGTCGTGTTGTAATAAGTATGTAAAAAAATACACTGA
TATAGTAGATGTGTTTAAGCTATTAGTTAACCCAGATGAAATATTTACTTTTTATCAAAT
TAATCACACACTCGTAAAAAGTAATTATAGCTTAAATTCAATAATGAAAATGATTCCTGC
CGAGCGCGGATTCGTATTAAAACTGATTGAGAAGGATAAACATCAATGAGTATGTTACAA
CGCCCTGGATATCCAAATCTCAGCGTTAAATTATTTGATAGCTACGACGCTTGGAGTAAT
AATAGATTTGTTGAATTAGCTGCTACTATTACCACATTAACTATGCGGGATTCTCTTTAT
GGACGAAATGAAGGAATGCTGCAGTTTTATGATTCTAAAAATATCCACACAAAAATGGAT
GGAAATGAAATAATTCAGATTTCTGTAGCTAATGCAAACGATATTAATAATGTTAAAACA
CGAATTTATGGATGCAAGCATTTTTCCGTGTCAGTAGATTCAAAAGGCGATAACATCATT
GCTATTGAATTAGGAACTATTCATTCTATAGAAAATCTTAAATTTGGTAGACCATTTTTC
CCTGATGCCGGTGAATCTATAAAGGAAATGCTTGGTGTCATTTATCAAGACCGCACATTA
TTAACTCCAGCAATAAATGCTATAAATGCTTATGTTCCTGATATTCCATGGACTAGTACA
TTTGAAAACTATTTGTCGTATGTTAGAGAAGTTGCTCTAGCTGTAGGAAGTGACAAATTT
GTATTTGTGTGGCAAGACATCATGGGAGTTAACATGATGGACTATGATATGATGATAAAT
CAAGAACCGTATCCAATGATTGTCGGTGAGCCATCTTTAATAGGTCAATTCATCCAAGAA
TTAAAATATCCATTAGCATATGATTTCGTTTGGTTAACTAAATCAAATCCTCACAAACGT
GACCCAATGAAAAACGCTACTATCTATGCGCATTCATTTTTAGATTCTTCATTGCCAATG
ATTACTACGGGAAAGGGAGAAAACTCTATTGTAGTGTCAAGGTCAGGTGCTTATTCTGAA
ATGACTTATAGGAATGGCTATGAAGAAGCTATTCGTCTTCAAACTATGGCACAATATGAC
GGCTATGCTAAATGTTCTACTGTCGGTAATTTTAACTTGACTCCTGGCGTTAAAATTATT
TTTAATGATAGTAAAAATCAATTTAAAACCGAATTTTATGTTGATGAAGTTATCCATGAA
TTATCAAATAATAATTCCGTAACTCATCTATATATGTTCACTAATGCAACGAAACTGGAA
ACAATAGACCCAGTTAAGGTTAAAAATGAATTTAAATCTGATACTACCACTGAAGAAAGT
AGTTCTTCCAATAAGTAATAAAGAAGTTTCTATTCCTAAAATGGGTCTTAAACATTATAA
TATTTTAAAAGATGTTAAAGGTCCTGATGAAAATTTAAAACTTCTTATTGATTCTATTTG
TCCGAATTTATCACCGGCAGAAGTTGATTTCGTTTCTATTCATTTATTGGAATTTAATGG
AAAGATTAAATCTCGTAAAGAAATAGATGGCTATACTTATGACATAAATGATGTTTATGT
ATGCCAAAGATTAGAGTTTCAATACCAAGGAAATACATTTTATTTTAGACCTCCTGGAAA
ATTTGAACAATTTTTAACGGTGAGCGATATGTTATCCAAATGCTTGCTTAAGGTCAATGA
TGAAGTTAAAGAAATTAATTTTCTTGAGATGCCAGCATTCGTTTTAAAATGGGCAAATGA
TATTTTTACAACTTTAGCAATTCCTGGCCCTAATGGTCCAATAACTGGAATTGGCAATAT
TATTGGATTATTTGAATGAAAAAGCCACAAGAAATGCAAACGATGCGTAGAAAAGTTATT
TCAGATAATAAACCAACACAGGAAGCGGCTAAATCCGCTTCCAACACTTTATCTGGGCTT
AATGACATTTCTACAAAATTGGATGATGCTCAAGCTGCTTCTGAATTAATAGCTCAAACT
GTCGAAGAAAAATCGAATGAAATAGTTGGAGCAATTGATAACGTTGAAAGCGCAGTGAGT
GATACTACTGCTGGTTCTGAGTTAATTGCCGAGACTGTTGAAATTGGCAACAATATTAAT
AAAGAAATCGGTGAATCACTCGGAAGCAAATTAGATAAATTAACAAGTTTACTAGAGCAA
AAAATCCAGACAGCTGGAATTCAACAGACGGGAACGAGTTTAGCAGTAGTAGAAAATGCT
ATTCCTGTTAAAGTCGTTGAGGATGATACAGCTGAATCTGTGGGTCCTTTATTACCGGCC
CCCGAAGCAGTTAATAATGATCCTGATGCTGATTTTTTCCCGACCCCTCAGCCAGTTGAG
CCAAAGCAAGAATCACCAGAAGAAAAACAGAAAAAAGAAGCATTTAACTTAAAATTATCT
CAAGCTTTAGATAAATTAACAAAGACAGTTGATTTTGGATTTAAGAAATCCATTTCAATT
ACTGATAAAATATCAAGCATGCTATTTAAGTATACCGTCAGTGCTGCTATTGAAGCTGCT
AAAATGACTGCAATGATATTGGCTGTTGTTGTTGGAATAGACCTGTTGATGGTTCATTTT
AAATACTGGTCAGATAAATTTTCAAAAGCCTGGGATTTATTTAATACTGACTTTACTAAA
TTCTCTAGCGAAACCGGAACATGGGGTCCTTTATTACAGAGCATCTTTGATTCTATTGAT
AAAATTAAACAACTTTGGGAAGCGGGAGATTGGGGTGGATTGACAGCAGCTATTGTTGAA
GGACTCGGAAGTGTTCTTTTTAATTTAGGTGAACTTATTCAATTAGGTATGGCTAAATTA
TCTGCAGCAATTCTTCGAGTCATTCCTGGTATGAAGGATACTGCTGATGAAGTAGAAGGA
AGAGCATTAGAAAATTTCCAAAATTCTACTGGAGCATCTCTCAATAAAGAAGACCAGGAA
AAAGTTGCAAATTATCAAGATAAACGAATGAATGGAGACCTTGGTCCGATAGCAAAAGGA
TTAGATAAAATTGCTAATTGGAAAACTCGTGCATCTAACTGGATTCGTGGTGTAGATAAT
AAAGAAGCACTGACTACTGACGAAGAACGTGCAGCAGAAGAAGAAAAATTAAAGCAGCTT
TCACCTGAAGAAAGAAAAAATGCTTTAATGAAGGCCAATGAAGCTCGTGCCGCGATGATT
CGTTTTGAAAAATATGCTGATTCAGCTGATATGAGTAAAGACTCAACGGTTAAATCAGTT
GAATCTGCCTATGAAGACCTTAAAAAACGGATGGATGACCCGGATTTAAATAATTCACCG
GCAGTTAAAAAAGAACTTGCGGCTAGATTTTCTAAAATTGATGCTACTTATCAAGAGCTC
AAGAAAAATCAACCTAATGCCAAACCTGAAACTTCGGCTAAATCACCAGAAGCGAAACAG
GTCCAAGTTATTGAAAAGAACAAAGCACAGCAAGCTCCTGTTCAACAAGCATCTCCTTCA
ATCAATAATACTAATAATGTTATTAAGAAAAATACTGTCGTTCATAATATGACACCTGTC
ACAAGCACAACTGCTCCTGGTGTATTTGATGCGACTGGAGTTAATTAAGGAATAATATGG
CAATTGTTAAAGAAATAACTGCTGATTTAATTAAAAAATCCGGTGAGACAATTTCAGCCG
GACAAAGCACTAAATCAGAAGTAGGAATTAAAACATACACTGCCCAGTTTCCAACTGGGC
GTGCTAGTGGTAATGACACTACAGGGGACTTCCAGGTAACAGATCTATATAAGAATGGAT
TATTATTTACTGCATACAATATGTCATCTAGGGATTCTGGAAGTCTTAGATCGATGAGAT
CTAACTACTCTTCTTCATCTTCGAGTATTTTAAGTACAGCTAGAAACACTATTAGTAGTA
CAGTATCAAAACTATCAAATGGATTAATATCAAATAATAATTCAGGAACAATAAGTAAAG
CTCCTGTCGCAAACATTCTTTTACCGAGATCTAAATCTGATGTTGATACATCATCACATA
GATTTAATGATGTTCAAGAAAGTCTTATCAGCAGAGGCGGAGGTACTGCTACTGGTGTGC
TAAGTAATGTTGCTTCAACCGCAGTATTTGGGGCACTGGAAAGTATAACACAAGGTATAA
TGGCTGATAATAATGAACAGATTTATACGACAGCCAGAAGTATGTATGGTGGTGCTGAAA
ATAGAACTAAAGTGTTTACGTGGGATTTGACTCCACGCTCAACAGAAGATTTAATGGCTA
TTATTAATATCTATCAATATTTTAACTATTTTTCTTATGGTGAAACGGGTAAATCTCAAT
ATGCCGCTGAAATAAAGGGGTATTTAGATGATTGGTATCGTTCTACGTTAATTGAACCTT
TATCTCCGGAAGACGCAGCTAAAAATAAAACACTATTTGAGAAAATGACATCGAGTTTAA
CTAACGTTCTAGTAGTTTCAAACCCGACGATTTGGATGGTGAAAAACTTTGGTGCAACAT
CTAAGTTTGATGGAAAAACGGAAATATTTGGTCCATGCCAAATACAGAGCATCAGATTTG
ATAAAACACCTAACGGTAACTTTAACGGATTAGCTATTGCACCAAATCTCCCTAGTACAT
TTACTCTCGAGATTACTATGAGAGAAATTATTACGTTAAACCGTGCTTCTTTATATGCGG
GGACTTTTTAATGTATTCTTTAGATGAATTTAATAATCAAGCAATAAATGCAGATTTCCA
ACGTAATAATATGTTTAGTTGCGTTTTTGCGACAACTCCATCAACTAAAAGCTCTTCGTT
GATAAGTTCAATTAGCAACTTTTCTTATAATAACTTGGGTCTAAATTCAGATTGGTTAGG
ATTAACCCAAGGTGATATTAATCAGGGAATTACCACGCTAATTACAGCTGGCACACAAAA
ACTGACAAGAAAATCAGGGGTCAGTAAATATCTTATTGGTGCCATGAGTCAACGTACAGT
TCAAAGTTTATTAGGCTCATTTACAGTTGGTACATATTTAATTGACTTCTTTAACATGGC
ATATAACTCATCTGGATTGATGATATACTCTGTAAAAATGCCAGAGAATAGATTATCCTA
TGAAACTGACTGGAACTACAACTCTCCTAATATTCGTATAACTGGGAGAGAATTAGATCC
TTTGGTTATTTCATTTAGAATGGATTCAGAATCGTGTAATTACCGTGCAATGCAAGACTG
GGTTAATGCTGTTCAAGACCCAGTAACTGGATTACGTGCTCTGCCACAAGATGTCGAGGC
AGATATTCAGGTTAATCTTCATGCTCGTAATGGATTACCTCATACTGCGGTGATGTTCAC
TGGATGCATTCCAATATCAGTGAGCGCTCCTGAGTTATCATATGATGGAGATAACCAAAT
AACTACATTTGATGTTACTTTTGCGTATAGAGTGATGCAGGCTGGAGCAGTTGATAGGCA
AGCTGCGCTTGAATGGCTTGAATCTGCTGCTATAAATGGCATTCAAAGCTCTTCTGGAAA
TAATGGAGGTGTTACTGAACTATCTAGTTCGCTTTCACGACTTAGTAGATTAGGTGGAAC
TGCAGGAAGCATTTCAAACATTAATACTATGACAGGGATTGTCAATTCGCAGAGTAAAAT
ATTAGGAGCAATATAACAATGGGGACCGAAAGGTCCCCATGTTTTTATTTACGGAATGAA
ATGAAAGCAGCAACTGAAGCAACTAAACTGTCTTCAATATAAACTTCAATTTTTACCGGA
GCTTCTGACTCAAATTTACCTGTTACTACGCCTTGGAAAATACTTTCAGTTTGTTCTGGC
TTTGAAAAATTTTCAGAAGGAAAAATTCCGAACTTTTTATCTGTTCCAAAAATTTTGACA
AATTCATCGTAAACTGCTTCATTAAAAGCATTATCAGCAGGAATAACGCCTTCAACTACA
AGTTCTTGACCTAAAAAGCGCAAAGAAGATTTCATTTTGTGTTCCTCATGTTATGTTAGT
AAGACTACTATAACACAACACGAGGGACTTGTAAACTACATTTTGAACTTTTTAGACATT
CCGTTAATGTTAACCAAAGAAGCTAAGATTTGAGAAACTTCGTTTTCCTCTTCTTTTGAT
TCTTCTACAAGGAATTGATTAAATCCAGCCATTGGACGAACTTCACCAGTTTCCATCAGA
TGGTCGCCATCATATACTGATTCTTCTAATTGTTCAGAAGGAGGAACGATTGCACCTTCG
ATTAGATACTTGTTATAAGCAGTTTCTTTCATAAAGTAAGTACTTACTTTATTAATCTTT
AGTAAAATTCCACGTGGTAGAATAACTTCAGCTTCTGATGGAAATCCTGATAAATGACCT
GGAACGATAACTTTGATTCGCTCAGCTCCTTTAATTACCATACCTACATTAGTTTCAGCG
TCTTCATTCGCATATGTAGAATGACTACCCATATGCATTAAATCTTCAGCATCAACTGAA
CCTTCTCCTTCACCAGAAAATACTGCTCCGGAATCATCTAAGGCCATATAATTTTTACCA
TATTCACCGAAGATATTTGGCTTGAGTGAAGTAGATACAAAGTTCTTGAAATAGAACATT
TTATTTTCAATGTTATGACGCAAAGTTTTAAAGGTAACTTCTTGCCCACGATAAAGAGTA
GTTCCTGGAGGAAGAACTGAACCTTTAGAAAATGCAGAATCCAGCGTCTCAATATGTTTA
ATAGCTCGTTCCATATATTCTTCACGGGTAGAATCAGGTTTACCTAAAAGGAATGAGTTC
ATTTCAACATATGAATCTGCACAATAATCTTCAATTACATCAGATTCAGCCTGAGTTAAT
CCTTTTGGAGTTACTTCAGTACTTGCATATTCATATGCCTGAGCGGCAGATTCATCAATT
AATTTATAAATTCCATTCATGACAAATTGAATAATAGCTGTCTTTTCATCTGGTGTAGCT
TTAGAACCTTTAACTAAATCATTGACAATTTTCTTAATAACATCAAAGCTATTAGAAATA
TTAATGTCAGCAAGATCGCTTAAAATTTTATCAGTTTTATAATCAAAGAATTCTTTATTC
TTTAAATATTCTTGAGAACCTTGATATGTTATATCGCTCTGCAGCTTGATAGATGGATCG
CGTAAACGTGCATGGGCCAATGCAATATGATTTCGGAAGCTTTCGAGTTCATAATCACTA
GATTTAAAACGAGAAGCACTTCTCATACCACCGATAGCTCCTTTGCTAAAGTTTGAACCA
ACCTGAATAACGCCAGAGTTCATTGGTCCTTCTGCTTTATATACCGGAACTTTAGATTCA
AACTCTTGATATTTCTTAGCAGCGAAGCTATCACCCTGAAGTGAAGCATCAACAGTAGAA
TATTGAGCTTGTGCTGCTAATCGACGACTAATTTTAGTTTTCTGAATAACGGCTTGATCC
GTGCGCTTATCATTTTCTAAAGCAATAGAAGCAGCAACAGCAACAGCTTTAGGAACAGCA
TTACCTGTTTTAACGTCTACATAAACATCACCAACCTTTGATTCGACTTTTGTGAATAAC
TCGGTTGAAATAGGAGGTACACCTGGAATGTCTTCTAAATTGGCATTTTTACGGTAAACC
ATAATATATGCGTACTTTTTATCATAATCCCAGATTTCCTTTAAAAGAACATATCGACCT
GCTCCTTTAGTACGTACTAAACGGTCAGCAATAACTTGCATTTGACGAGCTGCGCCATTT
GTTTTACTTTTTAGTACGCGGAATAGGCATGCATCAATTTTATACTGCTTCATTGTTTGA
AGAGCAGTATCAAAAACAGCATTAATGACGCCAATTGGATTTCCACCCAAGTTTTTAAGC
TTAACTAATGATAGTTTCTCATTAACACCTATCATTACGATATGCATCATTTTGTCGCCT
GGCTTAACGTTTTTATTCGTATCACCGCCAGAGGTGTATGTACAAAATCTAAATCCAGGA
AGCACGCTTTCTTCACCTGCTTGAATAGCAAAAATTTGAGGTATTTTATGCTTAGGATTT
AAGTTAACAACCGGCGCCGAAGCGCCGTCAAATAATTCTGTAATAAGTTCCATGATTTAT
CCTTGAACGAACTTGTAAGGCATGTTTGTAATATCTATGCAAGACGCAATAATTCCAAGA
GATGATTCTACTTTCTGTTTAACATTTGATGAAACAAATGATGCAAAGTCAACTCTGTCT
TCTATTTCAATATCACCTGTCATTGCAACTACTTCACCGGTTTCCATTAAATGGTCTCCG
TCATAGATTACCGATTCGGTGAGCTCTTCCGTGGTCATAACTTCAGCTTGAATGAGTTTT
GTATTATTAGATGTTGTTCCGTCATTATTAGAAGCATCAGTTATTTTATTAACCTTGACC
ATCAATCCGCGTGGTAGAATAACTTCAGCTTCTGTTGCTATTCCGAGACTTCCTGGATAT
ACAACATTAACTTTATGAGCTCCATCAATTGCCCATCCTATTTGAACTTTAACGTATTCA
GGATTTTCTTTATACGCTCTTATTTCGTTTGGATTAATAGTTATTCCTTCTTCATTTTTA
TCAACTGTCAATTCATTACGAGCTTCTGGTTCTAAAAGACCAATACCAGCATGTGTAATT
CCAAAACGTCCAAAAATGATAGGAGTTAAAGAAGTAGATACAAAATTTCTGAAGTAGAAC
ACTTTATTTTTAACTAACGCTTCATATATAGGAGCAGTCATACTTTGAGCACGATAAACT
GTAATGCCTTCTGGTATACGGTCACCATTTTCAAAAGCTGAATCTAAGTTATTTATAGCA
GATTCAATTTCTTTTTCACTCATTACATCGTATCGTTCTGGATTGTAACGACCTAAAAGA
AGATTATTGATGTCAGTATATCCTGAACCGCAATATTCTCTAATGCCACGCTTTTGTGAT
GGAGTATATTTAGAACCATCGCGTGCAATAGTAATATCAATCATTGGACCAGCACCAATT
CCAGAAAAACTGTAAATCATTCGTTTGAGGAATTTAGTTTTTGCTGCGTTCCAGGAATTT
TTAGTTATTTCTTCCCAGACTTCATCTGGTTGTCCTTTACGATTTTTATTATGATTAGCA
AGCCATTTATCTTTATAATCTTCAAAGAATTGATTTACAGCTGCTGCGTATTTCTCTAAA
CATTTTATTGAAGTAGTTGGTTCATTTTTAATTGCATTAAAAATTACTTCTTTAATTTTT
TCTGAAACTTCACCGACTTGACTCATTGGAAAGAATTTATAATCATAGTGAAGTTCATCT
GCCGTTCCTTCAGCAATAATTTTTGCTGCCTTTGTTTTAGAAGCTAATGAATTAATTCCA
AGCTTCATTTCTTCTGCTTCGGGAATTAAAGGTGCAGTAGCTGGTTTATTAAAATTAGCT
GCTGTAGATTCATACTTCTGGAATAATTCACTTTCAAATCTAGAAGATTCCAATGACTGA
CTTTGTGCAATTGCTCTGCGAGAAATTTTAACCTTAACGATTACAGCTTGGTCAGAACGT
TTATCATTTTCTTGCGCAATAGATGCAGCAATTGCCTCATTTTTGGTTACTTGAGCTCCA
GTATCTTTATTAATATAAACATCACCGACCTTCGATTCAACTTTAGTAAAGAGTTCAGTG
CTAATTTCTGGAACTCCTGGAATGTCTTCTAGTGATACATTTTTACGATGTATAAGAATA
TATGCATACTTTTTATCATAATCCCAGAGTTCCTTAAGAAGGACGTATCTGCCACCTGAA
CGACTGCGGATGAGTCTATCAGCAATAAGTTGAATTTGTCGAGCTTGACCGGCGGTTTTA
GACTTAAGAATACGAAGCATGCAGGCATCAATTTTATATTGACGCATAGTTTGCATTGCA
ACAGTAAAAACTGAATTAATATAATTAATTGGGCTTGGACCAAGACCTTTTAATTTAGCA
ATTGAACCTTTAGCAGTTAATGTAAAAGGAACAATATGCATCATTTTATCGCCCATCTTT
AAATCGCGATTAGTATCACCGCCAGATGTATAGGTACATAAACGAAAGCCTGGTTGTTCA
ATTGCGTCATCAACATGAACTGAAAAAATTTGTGGTATTTTCTTCTTTGGATTTAAGTTT
GTAATCGGAAGAGTAGTATCTTCGTCAAATAATTCTGTAATAAGTTCCATCATAGCCTCT
CTAGTGTTTATTCTATTTATAAAATTAAAGGCCCGAAGGCCTTTAGTAATCTAGTGGTAA
GAGAGTACGATATATTTCAAACTTTGGTCCTTTTTCATAGGCATCAAATGTTTCCGTGAA
TTTATTATAAGCATATGCATCTACAAATTCGAGAATGACTTGTGATACAGAAGTAGAAAC
ATCTCCACCTTCTTTTTGAGCAATGACAATTGTTTCTAAGTAAGCTTTCATAGACCAGTT
ACCTCATGAAAATCACCAAATACATCCTCGAATGTATTAGCTTTAGTTTTATCTTCACGT
AAACGAATCGCAATCGGAAGAAATAATTTAACGTAATCAGTGCGGCCATCAGATTTTAAC
CAACCGTTGCATTCGCACTCTAGAATTTTTCCAATATAATAATTTTGGTTTTCCATAATG
CGAGTACGGTCAAGTTCATGCGATTTTACGCCGGCTTTATCTTTTAAGCCTGAACCAGCA
TTTACTTTAATTTTTCCACACTCTGACTCAAGAATAAATCCGCCTGCTTTAGTAGGGTCT
TTACGGTGAGGATAAATTCCTACAATTTTTAAATCAACATCAATTACTTCTTTAAATTTA
TAAAGATTTTTTGAACGAGCATTTTCCCATAATCCATCAACGTTTTTGAGAATAATACCT
TCAAGACCTTGGTCAATATACTTTTTATAAATTACCTTAGCTTCATCTAGGTTATTTACT
ACCTGGTTTTCAATTAAAATTACTTTATCATAGCCTGGTGTCATTTGTTCTAGTTTAGAA
AAACGTACATCATATTTCAAACGAAATGCAGGAAGACCATATATTTCTACTAATGGAACA
TAATCCCAGACCTGAAACTTCATGCATTGAGCTTCTTTTTCTGAAATAGTTCCCCTTAAA
GATTTATTAGCGATTCCATTAGAAGTAGTACGTGATTCAGCTACTTCGGCGAATTCTTTA
GCTTTACTAATTTCAGGATAAGCATCAAAAAGAAAATCTAGGCCTTCTGGTTCCTTTTCA
ACTTGCTCATGGTATACCAATTCGCCATCAATTAACACACCTTCTGGATGAATCTGGCGG
GCTTCAGCGGTCATTTTGATTAACTCTTCTTTGAGAAGGTCTAATCCTAGGTATTCATTA
CCAGCTCGTGATAAAAGACGAACATCATCTAATTCATCACCTCTGACTTCAGCAAAGCAC
CGAGCTCCATCAGCTTTTAATTGGGCAAAGGCTGGAAATTTGATATTCTTATTAATGCCT
TTTTCATCATAAGAACTTGCCAGCATTTGAGGTTGTTCAGGAATTAAACCTGGCCAAACT
TTGTTTGCAATAGATACTGAAGCACCGCATTCAAGGTCTCGCATCATCACCCGACGCAAA
ACTTCAACATCATCTTTTTTACCGTCAGCAATATATCCAGTTAATTCCTCAATTGCCGCA
TTTCCAGTCAATTTCCGAGTAGCTAACGTGAATTCAATGAAGTCGAGCATATCTGCAAGA
GTCAACATTCCAAAACTCTGGGTAGCAATACCAGGTTTAGGCCATTTCTTGATATAATAC
TGTAACCCACGAGAATAAGTCAGACGATATACTCGTTTAAGCAATTCATTATCTTTATTC
TTTTCAAGAATTGCTTGCTTCTGCTTAGTTGAACCAATAGATGCTATTTCGTTCAGAATT
TTAAGAATCATTATTCATCCTTCAGAGTTTGGTTTACAACTCTATTATAAATCAATTCAT
CATTAAGCTCAGTCAAAGACCTGTGGTACGTGGTTCTAACTTTATTTCCTTGCATCCAGT
GCTTGATATAAATAAAACCTTGCTCTACACATTTTTTAAAAATTCGTTCGTCTTTTTGAG
CTCGGAATTCTGGATTGCATCTAAAAAATTGATTTACGTGACCGTAATCACGTGTAGTAT
TACCTTCATTTTCATAAATAGTATGAACGACAAACATTAGAATGCTCCTTGGAAAATATT
ATCACCACAAGTAGGTCTATTATACAAATACTCTATGCCACCAGGTTTAATATAGTTCCA
TGTCTGAAATGGATGTGTCTGATATGGATGGTATGGATGGTATAGATGATTATAAGGATT
AAATCCAGGAGTTCTCCAGGTAGTATTCCAAGGAAAAGAATCGTTTTTGATCATCTTCTC
AATTACATCTTTTATAACTTTTTCACTATCAAAACTTTCTTTATTTTCCTTCGATGGAAA
AAGCTTATTCTCTACATCATTCCATGTATAAACTCGCTGTGCAGTTTTTGGAATACTGTC
ACGCTCCCCTCGAGCCATCCAATAAACAGGAACATTTAATATTTCACTCGCATGATCGCA
ATGGTGAGCGAGATCGTCAATATAACAAATTACGTTATATTTCTCTTTTGCCTTTTTGAA
CAACTCTTCTTTTGAAGAATCATGACCACACATCAGTACTTCTGAGAAGGCACCAGGAAA
AAGAGCGTTCAAATTAAATTGACGATTCAGCAGAGCGTCAATAGAATCACCTAATGCTGT
AACAGCTACAAAATTATAATCTTCTTTTAATTTGTTAATTACACACAGAGCATCTTTATA
TGGAGACAAGTAACGAATAAAATCTGATCGATTGTATTTTTCAATTAGCTTGACACCAAG
TTCTTCATCACAATTAAAGAGTTTACCTGGAGAAATAAATTTCTCATCTTGGATCATTTT
TAAAATATGTTCTAACGGAAGATTATATTTCTGAGCAAAATAAGGAAGGCCTGATTGCCA
GCTCAAACATACTCCGTCAATATCAGTTAAAATAGTTGGCTTCATAGAGAGTCTCTTAAT
AGGTTTAACACATCAATAAATTCAGCTTCGGTTAGTATTGTATCATCTTTTGTTAGACCA
CTAGCCATGCTGTGCTTCAAAACTTTTCCTTTCGAGGCTTGTAATGCATCACGAAAGCCC
TTGTTTTGAATCGCTGCTTCAAAATATGCATTTGTGTATAATTCTTTCCACGCCGGGGAG
TATCTTGAAAACGGAACTCCAAGCCAGAAGAGGGTCCCACGGTCCTGAGCTCTAGCATAA
GACCTTCCAGCTTGTTGAGCGGCAAGCCCGGATAACCCAAATATACGACGTTGTTGTTCA
ACGTTTTTCACCTTGCATCCTTGGAGGAATCCTTCAAGACCTCCAAATTGAATACCATCC
ATAACGAAAGGCCATTTGGCGAAATTACTTAATGCACATGATGGCCACCTAAAATTACTT
CTAATCTCTAACTCAGACATTTTCAATGCTTATAATTTCAACATCAGCCCAATGACCATA
GCAAGGAAGACGAAATTCAACTGGCCAGTTAGGGTCCTTTTCTAATATAATAGACTCAAC
TCGTGGTTCTTCATGTTCATCAGTATATGGATTTTTATCTGTTACTTTATATGTGACCTT
AATGTACTGAATTCCAAAAATCTTATTAATTATATTCATACTAATTCCTTTAATCCGTAA
ATAGGAGATAATTCATCACCCATGCGAAGGTCTTCATTTCCATCTACCCAGGAAACAATA
TAAGCCTCTTTTATTTGAATACCACTCCATTTAAATGGAGGTAGAACCTTAGAAATTAAT
CCAGGTATACCAACTCCCTTTAATTCAACAGTTTGGCCTAAAAAGAATTTCATTAGAACC
TCATCTGAAAACCGTGCGATTTAACATTACCGCCACCAATATCAGAGATATTAATTTCGC
GCGCAATTGAAGGGTCAATGTCAATTTCACGATTAAGTTTAGTGATAGCTAAAGTATCGC
GCCCATTTACAGTACGAAACTCTAAAGGACAAACCACATCAACGTAGTTTTTAATCGATT
CGCTAGTAGGTTGCAAATGTGCAGGAAGGTCTTTAGGTGCCTTTGAGAAAACAACTTCAC
AGAAATTTTTGCGGGTATCAAAATAAGTAGTCATAAACATAATATTTTCCTCAATAGGGG
GCCGAAGCCCCTGTTTTATTTTAAATATTAAATTCGTTAAGAACTACATCAAAGATTGCT
TCAAGATGCTCAGGTTTAGCTCTGTTACTCAGAATATGACGAATCCAAGTTTTAACTAAG
AGTTTACGATTAGCACCATTCCAGCAAGGATGAGTCCCTAAATCACGTTGACGAAAATCA
TCATCCAGAGCGATTTTGAAGTTGGAACCTTCCATCGTGATGGAAACTGTAATACCATTT
TCAAATCGCATATAAACGTAGTTAGGAGTCATATACTGTTCAATTTCGCATACTGATCCA
TTTTGATGTTTCCAAAGGCAGATAGTATCAATAGAACCTGCAATACCGTTAGAAACATAT
TTACGTTCAAAGTTGATGTAGTTCATTTTATTCTCCAAGATGTTTAATTGCGGTACAGGT
ATATAATATCATATCCTGCACCAAAGTAAACAATTATTTTACTACTTTCCAATGCTTCAT
ATCAAGTTTACCAACTTTTTTCATCTTCTCAATTAAGCGTTCGGCACGTTGGCGAGCTGT
AACATAATACCATTCACCTAATTCATTTTGTTCAATTTTTCCAACGATTACTGTATTCAA
TTCATAAATCCAACCAGTAAAGAAATTATGAACTTGAATTGTAAAGGTGAAATCTGTTCC
CATACCTTCTGTTGTTTCTACTTCAATAATATCACCTTCAACTGCCATTAAGAACCACAT
AGTTTCATCATATTTACCATTGAAGCATTTAGTTTTAACTGCAGCGTTCAGATTAATCGT
TTTCATTTTATTCTCCTTTGTTTGTGTAAGATAATACTATCACAAAGGAACCATACTGTA
AACAACTTTGTGCAATCTTTGGAAAATAAAAAAGGACTCCCGAAGGAGTCCTCAACTTAT
GCTTTCTGCTTACCAAAACGAGAAGCATCATCTCGAAGAACCGCACGTGCTCGGCGCATG
ATCTTCTCAACAGTTTGATTGATACGAGAGTTCGACCCACGCTTGTAGCCAGCGCGTTTA
GAATCACCAACTTTCTTTTCAACTGCTTTCTTTGCTTTAGCTTGTTTTGCCATTATAAAT
TCTCTTTTAAATGAAAATGCAGGACTTATTGGCATTGCCTGCGAAAGCCCTCAAGGGGTA
CTTAGGTTTTGAATATTTACCGACAGGATAACCATAAACCTCGTCAACATTCAAGAGGTA
CACCGTAAAACAAAGTTCGACGGCTCCTCGTTTTAACTTCACACTAAGGCAGTGACTCTC
CAATAAATTACTTCAGTGTTACCACAAAGTGACGAACTGCTTTTCGTGCGGCAGAAGCCA
GAGGCTTAGCATATTTAAGTTCATCTTTTTCCTGAAGCTCGGCAGCTAATGCAGTTTGAG
CAGGATTCAGATGTTTGAAATAACGCAGGATTTCAAGAGCTTCGGCTTCAACATCAATAG
ATGCGCCATAGTTTTCGTGACCATTATTCCATGCGTTTCGTTGCAGTTCAAGAGCGTGTT
GTAATTGTTTAATCATTTAAAAATTCTCGTTAGAGATTAAAACTCGGTAGTCACGTTCTT
CTGAATTTCATCTTCTTTCGACAGATCTCTCAGTTGTAGACTACCACATAGAATTGAAAC
TCAATTCATATTATTATTTATATCACTTATAAAGACACGGAATAGCTTTATAATGACAGG
TAACGAATTTTTGTTTAATTTCTTTTGGCTGCTTAAGACCCAGAGCTACAAAAGGATGCG
GAACGTTTCGAATTTGACCAACTGGAAGAGAAGTCAAATCACCGACTTCGCAAAAACCTT
CAGGAACATCAGGACCAACAGAGTGAACTACACATAGTTCAGGAACTTCACCTTGAACAC
GTTTACCGATAATAAGTCCTGATTCTGTAACTTCTTCATCACCGGCTTGTGCAGGTTCAG
AAACTAAAATAACATATTCACCGACAGCACGAATTGGTAGCTGTTGTACTTCAGACATCG
TTTTTCCTTTTTGTTAACAGATGAATTAATAATAACAAATAATTCTTAAAGCATTTATTT
ACCAATAAATTGAAGCAAATGCTCAACTTTCATACCATTAACGGAAATCAATTTGTCAAT
AGAAAAACCTCGCCATGCACCAAGTTCAACATCAAATACTGGAATCATGTCAGTAGATTC
TTTCCGAGTAGATTCAGTCAATTTACCAGTTTGCATGGTTGGCATAAAGTCTGCATCACG
AGTACCTTTCATGGTACGAATAGTACCATCAGACTTTTCAAAAACTACGTTTGAAACACC
CATGGACAGTTTGGTTTTCAAAATTTCGCGAATTGCTACTTTCTGCTCAGTTGTCAGTTT
CATTTATTTACCTATCACAGTTTTAATATGAGTTGTTCCACGTTCTTTAAGGGTGGAAAG
TAATTTTTGGCATTTTTCTAAATCAGATTTCCAACTATATGGTCTATCAATACTAGTCCA
ATCAGTTTTATAATACTGTTTCCATTTAGAGAAAAAATATTTCTTATACTCTACAGCAAA
CGAGATGTTCTCATTAGAATAAGAACTAATTGCTGTAAGCTTTACCAAACGAAATTTCAT
TATTCACCACAGAATTCGTTGATATTTTCCCAGTTTAACTTATTCAAGTTTTTCTTAGGA
ACATTAAACACTTCAATACCTGCATTTCGCAGAATATCGTCCCAGCCAGGTTTATTTTTA
TCGTATGTTTCGCAATAAACCAGCTTTTTAATACCAGATTGAGCTATCGCTTTTGCACAA
TCTGGACAAGGAGAAAGTGTTACATACATAGTAGCACCTTCAATAGAAGAACCATTTCGT
GCAGCAAACAAAATTGCATTTAGTTCAGCATGAATTTCATTTTTAGACGACCAATCAGAG
TGAGCGCTGCGATATTCTTTTGCCAAAACAAATCGATCAGTTAAACCAAATGATACGTAT
TCTGGCTTATGAGCTTGAATAATAGTATGTTTAGGCTTATTCAGCAACCAGCCTTTCTCG
GCAGCATAATCACAGCAGTTCACACCACCTGCAGGTGAACCATTATACCCAGTAGAAATA
ATACGTCCATTCTTTTCAATTACTGCTCCTACCTTCCAGGAGCAACATTTTGATTCTTGT
GATACTAAATATGCAATTTGAAGTACTGTACTCGCTTTCATTTCATAATCACCAGATAAG
CAGATTTAGCAGTTTCAACACGATAAATTTCGTGACGAAGTTTAGTTATACTTTTAATAA
CAGAACTAATTATATTCTGCCCATCTTTAAAGCGGTTTTTCTTATCGATAAAAATTGCGC
CAATCATCTTTTTGTGAAGCTCAACTGGATACTTCGTCACAATAATAGCATCATACACAG
AAGGATGAATACTATTCACTAGAGTATCATTCATTAAAGTTATTCTAATGAACTGTGCTG
TTTCAGAATCAAGCGCTCTATGATCGCCAGTATCATTTTCAAGACAATTATCAATTATAT
CAGTTAAATTCATCATAGTACGCCATACACCCTTTGTGCTTCAACTAATCCATCAAAATC
CAGTTTAAGATGCGATATTTGATCGCCATCACCTGGATTCACAATTACTAACACTGAACG
AGGAGTTTCGGTAATAACACGAACCGATGTTTCAGGAAATCGTTCAGAAACCTTATTTAC
TAATTCCTGTGCAAATAGTTTAACTTTTTCTTGGAATTCTTTAACAGTAATTGGTTTTTC
ACTTAGCATGTTGATCCAAGCTCCTTACTTTCAACGTTTTTAACTAATTTGACAGAAACT
AATTCAGCATCTTGGGTAATCATTACCGGGCCTTCTTCATATTCTTCAAGATATTCTAGA
GCTTTCTTTTTAGCTTCTTCCTTCGTATCAGTTTGAGCATAGATATAGAACATACAACCA
GTAATACCTACTACTTTCCACTTAATTTCTTTATCAGTTTTAATTTCAAATTTACTGACA
GAATCATCTTTTTGAACTTCTTCGAAAAAAGAATATTCTAACATATAAGCAATTGAAAAT
AACGGGCTATCTTTATAGGATTCGCCCATTACATCAATGGCTTTATACCAGCAGTCATCA
ATTTCGCGTTTAATGCTAATAACATTCTTTGCAGGGTCAATTTTTACTTTAAATGAATTT
TCATCAATAAACTGGGCAATTCGTTTATTAGCCCCGCAAGTTTCATTAAAAATATCTTTA
TACCCAGTTTTAAAGCGATAAACCTTATCTTCTTCAAACCATTCGCTCATTTCAATTTCC
TCAATTGTTTTGGTAGAGCTATAATATCACAACTCTACCGTAAAGTAAACCATTAAATCG
CTTTGAATTCTGATGTCTGTGATTCAAAGCGAATATCGCCTTTGATGACTAGCTCAGCAT
CAAGACCGAATACGACAATGATATGCGCGGAACCTGGATACAGCGTAATTGCAATAGAAT
CCACTTGGTCTGGAAGCAAAGCGTTCAATACATGAGTCACTTGAGCATGAATTCGAAGCT
CAGCTGCGTTATCAAGTTTTTCAAACATATTATTAGCGATAATTTGGCTAAACACTACTT
CTACGATTTTAGAGTAAGTCGGAAACATATTTACCTCACATAATTTTCTTCAAGCCAATT
AATAATACCCAAGTTTCATGATGTAAAGCCATTAAAAATCTCCCGAAGCGACTTGCCAGC
ATTCAATACCGATGCGACGCCACATTTCAACTACTTGAGTTCGGTCATCAATAGCTAATT
TCACATCAAAATGTGGTGCGATGTGTTTCCAGAAAATTTCTTCTTTAACTACATCATCTT
TACGGGTATCGCCTTGTTCGCGTTGACATTGCATAACTAATGGAACGCCAGCAATATCCT
CAACCCATTTACGGGTCATACGATAATATTTCGTCGGGTCTTCTTCAGTTCCACTTTCAC
GGCCTGAAACGACTACGATTTGATAACCCATAAAAGCACACATCTTAGACAGTTCAACAA
CCATAGGATTGATAACATCGGTATCGCATTTTTCAAGGTCATAAGGACCACGACCATTCA
TTTTGGCTAGTGTACCATCGACATCAAAAATAACTGCTTTTGGTTTACCAGGAGTCCCTT
TGTATACCGGAAGACCGAGATACTCTCGCATTCTTTTATACATTGAGCGTAAAACATCAA
TTGGCACTGCTTTAGTTCCACGCTTTTCGTTACGTTTAACTAATTCTGTCCAAGGAACAT
CAAACACTTTATATTCAATTTGATGGCCAAGCTCTTTGGCAAACTCTTCCCAGACCTTAC
GTCGTTCAGGATTCAGATTAGTATCTGAAACAATTACACCCTTCGTTGCGTCTTGGCAGA
GAATCATGTTAGCAACATCATGTTGCATGTAAGTTACGATGCCTTCTTTCTTTTTGGTAT
ACTTATACTCATCACGTTCTTCATGCGCCATAATAGATTGGCGATAGTCATCACGATTGA
TATTATAAAACCCGGGATTCTTAGCAATAAATTCACGAGCCCAAGTGCTCTTACCAGAAC
CAGGACAGCCAATAGTCAAAATAATCTTTTTCATCATTTAATTCCTAAGAAAACTTCAAG
AATACGAATATTGTGCTCACGCCGTCCTTTGTACAATTCAGCTGTTGATTGATTCGCTGA
TTTACTCTGAACATTAGATGAAATAAATTTTATCATGTGATTTTTAAGCTGATACATATC
AAGTCCACGAGCTTTCGCTTCTTTTCGCAGGGCTTTACCAGCATCATCTAAAGCTTTAGC
AGGGTCTTCATCATTTAATACTATTCCACGATCCAAATCCATGTATACTGCGCCATGACA
TGCATCAATGTAACGATCCGAGCATTCAATATAACGTTCTAGCAGGGTTTTCATTTATTT
TTCTCAACCAATGATTGAATATAATCATGCAGGTCTTTAGATGCTTTACCCCACTTATTT
TGATATTCATTTTTGAGATTAGCACGTGATTGAGCTAATAAAACATCATTAGTTGGAGGT
AAAGATTCTAACCGCTGAATCTGGCGTCCATAAATCATTGCAGCCATCTCGGATTCATAA
ATCAATCCTTTGAGATGTTCAAATTGATGCCATGAAATCATTTGCATTTATCCTCTTTTA
ACTCTTGACGATAATAACATATCATAGTTTTCTGATCATGTACATATCGTTTTACATCAT
TAAGCCAAATACGAAATTCCTGGGAATCTTCAAATGGCATACCGACCCAAGCTTTACCAT
CAATAACTTTAACTTGCCAAGATAGTTTAGCTTCGTCATATGACTTTATTTGTACAGGCC
AATTAGGATGAACTGTTTCTTTCTTTACTTCTAGAGGCTTTGTCGAACAACCAACTAGAA
GACCAATAGATAATATTACTGCTGATAGTTTAATCATTTAGAAAGGTCCTGGATGTCTTC
TGCGAACTTGTTGAAGGAGTTGTTGATTTGTTTTTCAACCAATCCTGGCTTATGAGCCAC
CACATCCGCCTTCTTTGCATCTTTGCGCAGTTTTTCATTTTCACGCTCAATAGCAGCAAT
TGCCTCACGATTTTTATTATTCATCGCATCAATATAATTATACTGAATTCGCAAATTATT
TAATGCTAAGGCGTTTTCATTGGCCGTTTTTGTAATTTCAGTAACTGATGTTTCTAATCT
TTCTACCTTATTTTTTAAAATAATAGATGTTCCGCCAAATGCTATTACAAGTAATAGCAA
TCCAGCTGTTGTATTACTTAATTGCATAAAGTTTTAATAACCTCTATAATATCGTCTTGA
GAAAGACCGTTAATTAAAATATGATGTTCAGCTGGAGATTTAGAAATTTTAAAGCATGCC
GCAACATCTTCTGCCATATCCGATGCGCTACGATTTGGATTACTAATTCCAAGACGATGT
TTTCCCGTCAAAGGATTGACGATGATATAGCATTTGCAGCTATTGATATGAACATTAGGT
TGAGTCTGATTAATGAACACTTCACAATCATACTTAGCGAGTTGATTTTCTAAAAAGACT
TTCATCTCCTCAACCGCATCAGGAAGCATATCACGGGCTTGCTCAAGACGACGATTTCGA
TATTCTTTAATGGTCGTTTTCCGCTTGACTTGTTTAGCTAAATCTTTCTTAAGATCGGTG
ATATATCCAACTCGACGATTTCCTTTAAATACAGAAATCCCATCCGTAGTATCACCGTAT
GCTTCAACGACCATTTCAGTAGTAATAAGCTGCAAATCCATCATAAAGTCCTCATGTTAT
GTCAGTAAGTCTACTGTAACACAACATGAGAGACTTGTAAACAGCTTAGTATCCTTCTGG
GATAAATTTTTTATAATTTTTCAAAAAATTCTGTTCGATTTCACACATAACCTTCTCTTG
ACTATCATACCCTTGGTAGAGGCTCATGATGATACCGAACAGGTGTTCCATTCCAGCACC
TTTAGCAACGCCTTGCGCTTCCATCGCATAAGTCTTTCTATCTTTACCACAATGCTTATT
GTGACAGTCAAGAACTAAAAACAGAGCTCGGTCTAAGTACTTCAGATAAGTCGTCTCAAA
TGCTTCAATTTTTCTATACGAATACTCATCATCAGCGTACATTGCTTTAAGATCGTCTGA
TGCACCATCAATAATAGTCTTAAACAGTTTTTCTGGATTATCTAATGAACTTTTTGTACT
ATGAAGAGACACATACCAGTCAGACTTAATTTTAAAATGAGAACCATCTTTCATCACAGC
AACATAGCCTTCGATGTTTTCTGCATTTTTAGCTTCTTCAACCCATTTAGGACTATCAAT
TTCGTATCGTTCAACTAAATATGGACGAAGAACAGCATCTTTATAAATATCATCATATGA
AATGTATTCGCCTGTTTCATTTTCACGAATATTCAATAAAATGATTTTCATCTCTTGATA
AGCAAGAACGATTCTATTAGTTGGAGCGACAAATTCGAAGTTAGCAGTAAATCCATCTTC
GGCTAATTCTTTAAGTCTGTCGCGCAACTGGTGATGATTAATATTCATCAAAATTCCATT
AGCCATTAAAGCCTGTTCGGATTTGATTGAACCCTTTGATTTGAACAGAATTTCATCACC
GTCTAAATAAGTTGATACCAAAGACCCATCTTCTTTTGTTAGAATGTAATCAACATCATT
TAAATCGATATTCATCGTGAATGGATTTTCATTCAAGTTAAAAAACTTTTCCATAGGACG
AGAAGCAATTCTTACCGGTTTTTCTCCATCCATTTCAAACATAATTCCACGACATTCCAA
TGCGTCTGGAAGTAACCAATCAGAATAAGATGCATAATTATATGAGAAAATTCTGTAAGT
TCTTCCAGATGCACTTACATCATCCGAGTAAAAAAACTTACGTTGTGAATCCTTACATAG
TTCCATTAAATTGTTAAAAAGTTCTTGCATTGTGTATCCTCTTTTGTGTTTTGAATATAG
TACCACACTCCATGTGGAAGCATCATTTTTTCTTATGTTGAATATTCCAAGGCGGGTTAA
ATAGCTTAATGAATAGCGGCTCCTCTAGGTCAATCGTTGCGATTGTCATTGTACCTAACT
CATTTGTCATAGAAAGATTAAAGCATTGGCGGGCGTAAAATTCAACTTTGCTTCCTTCCT
TTAGCGCAGCATGAATTAATGCAGATTTAGTAGAATCAGACGTTTTGTCTTTACGGTTAA
TAGCAGTTCTATAATAGTTTATTCTTTTACGTAAATTTTTAGTTTTTCCAATATAAACAA
GCTCATCATTTATAGCAATAGCATAAATTACGTTATACTTGTTTGGAATAGATAATTGTT
TTATACTTCCATTGTCGTCTAATTCTAACTCAGTATATTTAATAAATGAATATTCTGTTG
CAATTTCTTTCATAATAAAATGGGCCTTGCGGCCCACTCCTTAAAAGTATTTTTTAAAAC
TCATCATAACTTTATCATCAACATCATTATCAATCTGTGCAACAAGGTAAGATGACAGTT
CTACTTCTTGCGGCGCGGATTGAACATTATCAGAATTAAGGTATTCACGAATCCAAGGAT
ATGGATGTTTAACCGGAGCATCGGTAATTGGGCATGGAAGACCACACTGTTTCATACGAG
ATACAGTTAAGTAATCAATAAAGCTCCACATACTATTTGTATTTAATCCAGGAACATCAC
CATCTTTAAATAAATGAACTGCCCAGTCTTTTTCTTGACGGTTAACTTCCATGAAAATAT
CAACTGCTTCTTGTTCACACTCTTGGGCGATTTTAACCCATTCATCACCATCAGTGCCAA
GTTGAAGTTGACGAATAATGTACTGAGTACCTTTAAGGTGAAGCTGCTCGTCACGAGCAA
TGAACTTCATAATCTTGGCATTACCTTCCATGATTTCCATGTTCTTATGGAAGTTAAAGG
TACATGCGAAAGATACATAAAAACGAATAGCTTCCAATGCGTTGATTACATGCAGACAAA
GGTAAAGAGAACGCATTAGTTCGTATTTGCATTCTTCTACATGCATAAGGCTATTTGAAT
ATGAGTCCAAATCATATTCATTCTCTGAAAAACACCTAAAAATTTCTTTTGCGTTTTCCC
ATTCACGAGTTTTCTCAATAACATCATCATAATAACGACCAATAGATTCAGCGCGTTTCA
TGATAGCTTTATCTAATACAATCTCATCAAATACCTTTGACGGATCAGTATAAAGATTTC
GCATGATATGAGTATATGAACGACTGTGAATAGTTTCACTAAAAGTCCATGTAGCAACCC
ATGTATCAAGGCTTGGATCTGAAATTAATGACATAAGTACAGCAGACGGTGCACGACCCT
GAATGCTATCTAAAAGTGATTGATACTTCAGGTTATTAGTAAAAATATCTTGCTGATACT
GAGGAAGCTTGTTAAATTGTGCAGCATCCATCATCAAGTTTACTTCTTCAGGACGCCAGA
AAAATGACAATTGCTTTTCGGTTAAATCTTCAAAAACTTTATGACGTTGAATATCATAAC
GCGCAATACCAAGACCTGAACCGAAGAACATAGGTTCCTTTAAAACATCAACTGGATTTG
TATTAAAAACTGTGCTCATAAATTTTCCGCTTAGTTAATAGTTGGTGACTCGTCCGTGAG
TCAAATTATATCATAATTTACAGGATGAACAATCTTCAGCTTTTGGAGTTTCTATTTCAT
AATCATCAGTACCGGAACCATCACGGGTATTATGATAATAGAAATTTTTTCCGCCAAAAT
ACCAGAAATACAAAAGGTCATCAATCATTATTGACATTGGAACCTTTCCTTTTGGAAAAA
TCTGCGGGTCATAGTATGTATTCGCTGAAGCTGATTGACATACCCATTTCAGCATAATAG
CTACCTGCGTAAGATAAGGTTTATTACCTTTCTTAGCTAATTTCCATGTATAATCATAGA
GGTCTATGTTATGCTCAATATTGGGCACGACTTGATTAAAGGAGCCCTCTTTTGACTCTT
TAACAGAGACTGGTCCACGTGGAGGCTCGATACCGTTTGTACTGTTAGAAACTTGGGAAG
ATGACTCACATGGCATAAGTGCTGATAATGTGCTATTACGGATGCCAAAGAGCTTAAGGT
CTTCCCGCAGCGACGACCAGTCACAAACGTATTTTGGAGCTGCGATTTGGTCAATCTTTT
TATTGTACCAGTCGATAGGTAATTCGCCTCGAGACCAACGAGTGTCTGAATAATATTCGC
AAGGTCCTTTTTCTTTGGCGAGCTTAATGGATGCTTTAATGAGTCCATACTGTAATCTCT
CAAATAGTTCATGTGTTAAATCGTTGGCATCTTCATAAGAAGCAAAGTTACTTGCCAGCC
AAGCTGCATAGTTGGTAACACCTACACCGAGGTTACGACGCTTTTTAGCTTTTTCTGCTT
CAGGAACTGGATATCCTTGGTAATCCAAAAGATTATCAAGAGCACGAACTTGAACTTCTG
CCAATTCATTAATTTTATCTTGGTCTTGCCAGTCAAAATTATCTAGTACGAATGCAGAGA
GAGTACACAATCCAATTTCAGCATCAGGACCATTCACATCATTTGTTGGAATAGCAATTT
CACAACACAAGTTACTCTGGCGAATAGGTGCCTTTTCACGAATAAACGGAGTATAGTTAT
TCGTATTATCAATGAACTGCACATAAATCCTTGCTGTTCCTGAACGTTCAGTCATGAGCA
ATTCAAATAGTTCACGAGCTTTAATACGCTTTTTACGAATATTAGGGTCTTTTTCTGCTG
CTTCGTATAATTCACGGAAACGGTCTTGGTCTTTAAAATAAGAATAATAAAGTTCTCCAC
CCATTTCATGCGGACTGAACAAAGTAATGTAATCGTTCTTTCCAAAACGTTCCATCATCA
AATCATTCAGTTGAACACCATAATCCATATGACGGATACGGTTTTCTTCTACGCCTTTGT
TATTTTTCAAAACGAGAAGATTTTCAACTTCCAAATGCCAAATAGGATAATAAGCAGTAG
CAGCGCCGCCACGAATTCCGCCTTGTGAACATGATTTAACAGCAGTCTGAAAATGTTTCC
AAAAAGGAATAACACCGGTATGGCGTACTTCACCCATGCCAATCTTAGAACCTTCGGCAC
GAATCATACCAACGTTAATACCAATTCCAGCGCGTTTAGAGATATATTCAACAATTGAAG
CGGAAGCCTTATTGATAGACTTTAATGAATCACCTGCCTCAATAACAACGCATGAACTAA
ACTGCCGAGTTGGAGTACGGCAACCAGCCATAATAGGAGTTGGCAATGAAATCTGTCGAG
TAGATACTGCTTCATAAAAACGGATAACATGTTTTAGTCTATCAACAGGTTCATCTTGAT
GCAATGCCATTCCAATAGTCATAAATGCAAACTGTGGAGTTTCATAAATTTGACCGGTGG
TTTTATCTTTAACTAGATATTTTTCTTTTAATTGCATCGCCCCGGAATAAGTAAATTCCA
TATCCCGCTCGTGCTTAATTTTTGATTCTAAAAATGTAATTTCTTCTGCAGAATATTTTG
ACAACAATTCAGGGTCGTATTTACCTTCATTTACACAGTAAGAAATATGGTCAATAAATG
AACGTGGTTCATATTGCCCGTAAACATGCTTGCGAAGAGCGAACATTAAACAACGTGCAG
CTACATATTGATAATCAGGTTCTTCAACCGAAATAGAATTCGCAGCGGCCTTAATGACAA
TAGTCTGAATATCATCAGTTGTCATTCCATCACGGAGATAAGATTTAATATTTTCATATA
ATTCATAAGGATCGACTGATGTTCCTTCAGCTGCCCAAGATAAAACTTTAATAATTTTTT
GTGGGTCAAAGCTCTGAGAAACACCACTACTTTTGATAACATTAATTAATTGCATAAGTC
CTCAACTTGAAAATCGTCTTTAAACAATCGGTTAACTATATGAGCTATTATATCACCATG
ACACGGCTTTGGTTTACATGTGCATCCTAGCCTCATTCCACGTAAAGGCTCTAAATGTGC
TTTAGTTATTTCTCCGGATTTAATTCGACGTATAAAATCTTTTTTGAATAATTCAATGGC
AGCCTCCCGGCTGCCAGCATCTTTACCGACGTAATTTCCCCAAAATGTACCACGGTGAAT
ATTAACATCAAAGTCGGATTTATATTTATTCACTACTCGGCATATACGGCCTGCGCGGTT
GTAAGTGTTCATATTGTTCTTCCGTTAAAACAGTAATATCGTAGTAACAGTCAGAAGAAG
TTTTAACTGTGGAAATTTTATTATCAAAATACTCACGAGTCATTTTATGAGTATAATGTT
TTTTACCATAAATGATAATAGGCTGATTTGGTCCTGGAACTTCTAGCTCACTTGGATTAG
GAAGTGTAAAAAGAACTACACCAGAAGTATCTTTAAATCGTAAAATCATATATCCTCGCA
ATTAAATTAAAATTATACCGCCATTTTTCCTTTAATTGGCAGATGAGATACATAGTTGTT
AAGAACAAAATTATGAGGCTTTGCAAATTGACTCAACCAAAATACCTGCGATTCTGTGCC
CCATTCATCAAATTCATCTGGAAATTTTAATTGTAATTCGCATAAATCCATAGGTTCACG
ACGTAAAATTTCTTTACATTGTTCTACGTGATTCATATAGATATGAGTATTACCACCAGA
AAATATCAAATCTCCAGGAATAAGATTACACATTTTAGCTACAATATGAACTAACGTAGC
ATATGATGCAATATTAAATGGAAGACCGAGGAAAACATCTACCGAACGTTGATACCACTG
GAGGTCAAGGTATCCATTACGCACATTAAACTGATAGAACATATGACAAGGCGGTAATGC
CATATATTTAAGTTCAGCTGGATTCCACGCAGAAACAATTTGACGCCTATCATTTGGCAG
TTTTTTAATACGATCAACAACTTCTATAATTTGGTCTACACCACCGAAATCACGCCATTG
TTTACCGTATATAGGACCAAGTTCACCACTATGATATCCTAAATCTTTTGCTTGATTTTC
GTAATTTTCATCCCAGACTGTTTTGCCTTGAATTAATGAATCGTGCTGAATTAATCGTAA
ATCATTGACATTTGTGCTTCCTGATAAAAACCAAAGCAGCTCAGCAATGCAAGCTTTCCA
GGCGAGCTTCTTAGTTGTTACCGCAGGAAAACCTTTAGTTAAATCCCAGCGTAATTTAGT
ACCGAACAAAGCAATTGTTCCTGTGCCTGTTCGGTCATCGGTTTCATAGCCATTTTCAAA
AATGTCTTTAATTAAATCTTGGTATTGTTTCATTTAGTACCTTATACAAATTATAATACA
TTTTATGAAGCTAAATAATCAATACGGTTTAGCATCAAATTTTCTCTCAATTTCAGGTGT
GAAATATAATTCTTTGCCACGTTTGGAAAAGCGACCAATAATATGATAATTATTCTCATC
AAACGTGATATTACCAATATCCATAGCTTTCAACCAAATATCGATATTTCTATCCAGCTT
TATGTCAAAATTCCAATACGGAGAACTATTACCGAAAATACTGCAAGCGGATTCAGTGAA
ACAACTGCTATAAATCTTGTCTTTAGGAACTACTAATTGATAGACACCTTTAATAAACTG
AGGACCCTGCCACTTTGGCTGTTTCTCATCTTTTTCTAATAGAATAGGGTAATAATTAAA
ATTCATATTTTCCACCCCGCGGTATTTCATTTTTATATACTGATTCCGTAAGAGTTGTTA
CTTCATCTATTTTATACCAATGCGTTTCAACCATTTCACGCTTGCTTATATCATCAAGAA
AACTTGCATCTAATTGAACCGTTGAATTAACACGATGCCTTTTAACGATGCGAGAAACAA
CTACTTCATCTGCATAAGGTAATGCAGCATATAACAGAGCAGGCCCGCCAATTACACTTA
CTTTGGAATTCTGATCAAGCATAGTATCAAATGGTGCATTAGGGCTTGACACTTGAATTT
CGCCGCCAGAAATGTAAGTTATGTACTGTTCCCATGTAATATAGAAATGTGCTAAATCGC
CGTCTTTAGTTACAGGATAATCACGCGCAAGGTCACACACCACAATATGGCTACGACCAG
GAAGTAATGTAGATAATGACTGGAACGTTTTAGCACCCATAATCATAATTGTACCTTCGG
TACGAGCTTTAAAATTCTGGAGGTCCTTTTTAACTCGTCCCCATGGTAAACCATCACCTA
AACCGAATGCTAATTCATTAAAACCTTCGACTGTTTTAGTTGGAGAATAAGCGAATACCA
ATTTAATCATTACGCAAAGCCCCTTTCAAGAAACCATTCAGTGGCTTTATTAGCATCAAA
GAATAATTCTTCATATGTCTTTTCTTTGTTTTCAAAGACTGTCACACAAACACGTTGACA
TTCTCCGCAGTATTCTTCTGACATACTCAAAGCGTCAGAAAACATTTCATTAAATTCACT
TAAATCAGGATTATGCAATGCGTTAAAAATTGCATAATCGAATTCGTCATTCATAAATTC
AAATACAAAAATCATATTATTTTCCTTAAACAGACTTTTTCACATTTTTCCAATCAGCTT
TAAACTGCTCGACGTCAGAATGGTAAATCCAAAATCCTGCGCTTTCTCCATCTTCATAAA
GAGGACATCCATCGCATTCATCTTCCCATCCCATATCACGTAAAAGATGCTCAGCTTTTT
CAACAAGTTCAGAATCTTTACCGATGATATTAAAATACCATTTACCTTTAACTTGTGAAT
CTTTGATGCTCTGGCGTTGTAATCTCATTTTATTCTCCTTAGTTGATAGGGTAATAGTAT
CACACTACTACCCTGATGTAAACTACTTTTTGAAAGTTTTTCGCAAAAGTTCAATAATTT
CATCTACATTGTTTTCGTCAACAATGCAGTGAATTTTCGTTACGCCGGAAACCTTGTCTT
CGACTTCATCTTCTTCAGAAGTAGGTTCTTTATACTCACGAAAACAATGAAATTCGTCTT
CACAAACGTTAAAGTAAAAATGCTTTCCATTTGCGCATTCAATGTGTTTTATTACTCTAA
ATCCATCAGCAGAGAAAGCTTCTTTAACTTCAAACCATCCGCCATTTTCTTGAATAATTT
TAACTATTGCTGAATTAGAACGTGGGCTATAATTAATAAATGTATCAATAAGTCTTGGAA
CAAGTTCATACTTTTTACCAGTATACATAATGTTTCCTCATTTTAATAGGGGCTTGATAG
CCCCTTAATAATTATTGTTCGATCAGTCCCATGTAAAATTCTGCGTCTTCAGAATCCATG
CCATCACAGTATTCATTAGCCATAAAGCGGGTGAGGTCTTCAAGAGGACCTTCAATAACG
ATTTGAATACTCCAAAACTTAGAATCTTGTACATTTGTGATTCTAAGTTCAGGATAACGA
TTACGAATAATTTCTTCAATATATTCAAAATCAACGATGTCAATATCAACTTTAGCCATG
TTATTTTCCTCTTTAATCATCAGCAGTATTGCCGATAGTTGTATAGTACCATAGAAGAGC
AAGGATGTAAACCATTTTGTGAAAAAAATTTGAAATAAAAAAGGGGACCTCTAGGGTCCC
CAATTAATTAGTAATATAATCTATTAAAGGTCATTCAAAAGGTCATCCAGGTCCGTGTCA
TCAGCACTAGATGAACTGCCAGAGCTTGAGCTCATAAAATCATCTTCAGTTTTTGTTTTG
AAGTCATCAACATTGAATGCATCCAAATCATCAGCAACTTTATCAGCTTTCTTAGCAGCA
GTTGCAGCGGCACCGCCCATCACAGCAGTTCCCATGACTTGACCGAATTTAGTGCTCAGT
TCTTCAAACGATTTGAATTTATCTTTAGAAGTCATTTCAGAAAGGTCAACCATTTGTTCG
AACAGTTCTTTCTGGAAAGATTCATCATCAATGTTTGGAATCGCAGATTGATTCAGGAAT
TTAGATTCATCGTAGTTACTAAATCCAGAAACTTGTTTAACTTTCAGTACAAAGTTAGCA
CCTTCCCACGGACAAGTTACATCAACCGGAGTTTCACCCATTTCAACATCAACCGCAATC
ATTGCATTGATTTTATCCCAGATTTTCTTACCGAAACGGTATTTAAATACTTTACCTTCG
TTTTCTGGAGCAGCTGGGTCTTTTACAACAAGAATGTTAGCCCAGTAAGAAGTTTTACGT
TTAACAAGACTGTACTCTTTATTGTCAGTGTTGTACAGATCATTTTTACTGATGTACTGA
CATACTGGGCAAGAATCGTAATCACCGTGGGTAGATGAGCAATTTTCGATATACCATTTA
CCGTTTTTCTTGAAACCGTGATTTACAAGAATTGCGAATGGTGCTTGTTCATCATTTTTA
GACGGAAGAAAACGAATTACTGCTTGACCGTTACCCGCATTATCGAGTTTCAGTTTCCAC
TCGCCTTTATCTTCAGAAGAAAAACCACCTTTATTTCCAGCCAGTTTAGCCATTTGTGCA
GCGAGTTCAGCAGTAGATTTACGTTTAAACATTTTTATTTCCTTTTTAATTTAATTAACA
GTTGGTGCTATGACGATGTATGACCTCATAGCTGGTCAGTGAGATAATTATAATCTATTT
ATAATAAGCAATTAATACTTACAAGATTTCACAGTTTCAATGAAAACATTTTTAGCTTTC
TGTGAATCAATATTTAAAATTTTTCTATAAGCCTTTAACTTTATAGAATAATTATTCCAG
ACTAAATTATCAGTCTGTTCATCATGTTTATCAATTATATTTAAAAATGAATCAAGCAAG
ATAAACGTCTCAAACGAAATTATGTTCGATTGCAGAAGTTTAAAAATATAACTTGACTGA
ACTTTTGGATTATACTCAAAGATTTCTTTAAAAGCAGAAACTTCAACTTTTTTACTAAAA
TAATAAATGTTGCGAATATCTTCTTCAAACTTAAATTTAATTTGCTTTAAGCGTCCGATA
TATTCACGATAAAACACAAGTGCATCAGCGTCAGAGATGTCACCAATCCAAGCATCCTGG
TTAGCAACCAGATTGCTTATAAAGATTAAAGCAAGTTCCTTTAATTTATATTTTTCTGAT
AACTTCTGGAAAAAATACTTATCCCTTCGCTTTTGATAAGCGGCATCAGACACCCGCATG
CACCAATTATACTTAATTACATCATACTTTCCATTCATATGTTGTTTTATCATTAAGTAT
AATTTATAAACTGATTTACCATCAATATATCTTTCACCACCAGCAGGCATGCGGAGTTTA
ATCATAGTAGAAAATCTAATGTATTAGTTTTTTCACAACGAACAACAGAAGGACGTAAAA
GATTTTCGTCAATAGCTTCTGACTGAATTTTTTCAATTATACCCGAAGGAATAAATTTAG
CAAATTGAGTTTCAGGAATAGAGTTTTCTTCCAAGAATGCTGTCGTAGCTTCAAGATAAC
TCATTCCAAATTCTTCTACCATCTTTTCAATAATAAATCCATTTTCTTGTCGATCAAGAA
GCTTTGCGATTTCATCCTTTTCTTTTTTGATTGAAAGTTCTTTTTCTGAAAGACCGGTCT
CATCGACCGGACGAATATCATTTAGAGAAAACTGTGTCATAAAGTTCAACTACCTCTTCA
GTTTCAGCTTCAAACACATCACGGTTATCTTTATGATACAAAGCTAATAGACGATTAAAC
ATCTTACCATCAACGCCAAGTTCATCTTTGGCGCGAATTCGAATATCTTTAATCAATTCA
TTATAACCAGAAATTTTCAGTTTATGATCAGATGCTTCTTTGATAAATTTAGCCAAGTCT
TCGCCGTGGATAGCTTCATCAAATTCAACCATTTCTTTTTTAGCCATTATTCACCTCAAA
ATTCATTAATGCTATTAGTTAATTTAGAAAGACCCGCTTTTACAAAATATGAATAAATTT
TGCCACGCGGTGGTAATTTATATGAATTATAGTAATTCACAATGTTTGAAGCAATATTAT
CAGGAATATAATCAAAATCAATTAGAACTAAATTTTCTTTGTATCGATTATATTCAGATT
CGGTAAGAAGCACCTTAGCTTGCTCACGGTCATTAGCAATAGCTTCAACGATTGAAGTTT
TCATTGAAGGAGTTCGTTCACCTTCAACTCTGGTAAACCAAAAGTCAGACCGTACTTTAA
CTGAAGCAACGTTATCCTTTTTGTCGCCTTTAAGGATTTTAGTCATACAGTCAATTTCAG
CAGAACCACTTTTAATTTTAACCCATTTCTTGTGCATCGGTGACCATTGCTTAACATTTG
GATATTTGTGAAGTTGAGTAAAGTCACCATCCGATGAAATGATTAAAATCTTATGTCCTT
CTAAAGAGAACTTTTTAACAAGAACAGCAATGTGGTCATCCGCTTCATACTTATCAATAT
CCATAACAATATATGGCATATAAGCTTTCAATTCATCTATAACTTTATGGCTGGATTCAA
AATAACCTTCCCAGTCCCAAGTAGATTCTTCTCGTGCTTTTCCACGGTTTTTCTTATAAT
AATAAGCGAAATCACGACGCCAATATCCAGATTTCGCGTTATCAATACACAGCACAATTT
TAGTGTATCCAAGCGTTTTTGCTTTTTTGACATTAAACTTAATTGAGTTCAATATCAAAT
GACGAACCATTGATAAGTTAATTTTTTCTTTATCTGGGAAGTTTACTAAAGCAGTTGAAA
GCGCAATCTGACTAAAGTCAATTAAGCAAATTCCTTCTTTGTAATCTTCATCCAGCATCA
TTTCTAAATCCATATGAACCTCGTTCAATTAGTGAGATTTCTATTATATACCATCCAAAT
CTTAAAGTAAACAAGTATAAATACTTATTATTGAAAACACAATAGGAGCCCGGGAGAATG
GCCGAGATTAAAAGAAAGTTCAGAGCAGAAGATGGTCTGGACGCAGGTGGCGATAAAATA
ATCAACGTAGCTTTAGCTGATCGTGCCGTAGGAACTGACGGTGTTAACGTTGATTACTTA
ATTCAAGAAAACACAGTTCAACAATATGATCCAACTCGTGGATATTTAAAAGATTTTGTA
ATCATTTATGATAACCGCTTTTGGGCTGCTATAAATGATATTCCAAAACCAGCAGGAGCT
TTTAATAGCGTACGATGGAGAGCGTTACGTACTGATGCAAACTGGACAACTGTTTCATCA
GGACCTTATCAATTAAAGTCAGGCGAATCAATTTCAGTTGATACTGCAGCCGGTAATGAC
ATTACATTTACTTTACCATCTTCCCCAATTGATGGAGATACTATCGTTCTCCAAGACATT
GGAGGAAAACCTGGAGTTAACCAAGTTTTAATTACAGCTCCGGTACAAAGCATTGTAAAT
TTTAGAGGTCAGCAAGTACGATCAGTACTAATGACTCATCCAAAATCGCAGATAGTTTTA
ATTTTTAGTAATCGTCTGTGGCAAATGTATGTTGCTGATTATAGCAGAGAAGCTGCAATT
GTAACACCGGCAAGTCTTTATCAGGCGCAATCTAACGATTTTATCGTGCGTAGATTTACT
TCAGCTGCGCCGATTAATATTAAACTTCCAAGATTTGCTAATCATGGCGATATTATTAAT
TTCGTTGATTTAGATAAATTAAATCCTCTTTATCACACAATTGTTACTACATATGATGAA
ACAACTTCAGTACAAGAAGTTGGAACTCATTCCATTGAAGGTCGTACATCGATTGACGGT
TTCTTGATGTTTGATGATAATGAGAAATTGTGGAGATTGTTTGACGGGGATAGTAAAGCA
CGTTTACGTATTATAACAACTAATTCTAATATTCTTCCAAATGAAGAAGTTATGGTGTTC
GGTGCGAATAATGGAACAACCCAAACAATTGAACTTCAGCTTCCGACTAATATTTCTGTT
GGTGATACTGTTAAAATTTCCATGAATTACATGAGAAAAGGACAAACAGTTAAAATCAAA
GCTGCCGGTGAAGATAAAATTGCTTCATCTGTTCAATTGCTGCAATTTCCAAAACGCTCA
GAATATCCGCCTGAAGCTGAATGGGTAACAGTTCAAGAATTAGTTTTTAACGGTGAAACT
AATTATGTTCCAGTTTTACAGCTTGCTTATATCGAAGATTCTGATGGAAAATACTGGGTT
GTACAGCAAAACGTTCCAACTGTGGAAAGAGTAGACTCTTTAAATAATTCTACTAGAGCA
AGATTAGGCGTAATTGCTTTAGCTACACAAGCTCAAGCTAATGCCGATTTAGAAAATTCT
CCACAAAAAGAATTGGCAATTACTCCAGAAACGTTAGCTAATCGTACTGCTACAGAAACT
CGTAGAGGTATTGCAAGAATAGCAACAACTGCGCAAGTTAACCAGGATACTACATTCTCT
TTTGCTGATGATATTATCATCACTCCTAAAAAGCTGAATGAAAGAACAGCTACTGAAACT
CGTAGAGGTGTTGCTGAAATTGCTACACAGCAAGAAACTAATGCAGGAACCGATGATACC
ACAATCATTACTCCTAAAAAGCTTCAAGCTCGTCAAGGTTCTGAATCACTATCTGGTATT
GTAACTTTTGTATCTACTGCAGGTGCTACTCCAGCTTCTAGCCGCGAATTAAATGGTACC
AACGTTTATAATAAAAACACTAATAATTTAGTTGTTTCACCTAAAGCTTTGGATCAGTAT
AAAGCTACTCCAACGCAACAAGGTGCAGTAATTTTAGCAGTTGAAAGTGAAGTAATTGCT
GGACAAAGTCAGGAAGGATGGGCGAATGCTGTTGTAACGCCAGAAACGTTACATAAAAAG
ACATCAACTGATGGAAGAATTGGTTTAATTGAAATTGCTACGCAAAGTGAAGTTAATACA
GGAACTGATTATACTCGTGCAGTCACTCCTAAAACTTTAAATGACCGTAGAGCAGCTGAA
AGTTTAAGTGGTATAGCTGAAATTGCTACACAAGTTGAATTCGACGCAGGCGTCGACGAT
ACTCGTATCTCTACACCATTAAAAATTAAAACCAGATTTAATAGTACTGATCGTACTTCT
GTTGTTGCTCTATCTGGATTAGTTGAATCAGGAACTCTCTGGGACCATTATACCCTTAAT
ATTCTTGAAGCAAATGAGACACAGCGTGGTACACTTCGTGTAGCTACACAAGTTGAAGCT
GCTGCAGGAAAATTAGATAATGTTTTAATAACTCCTAAAAAGCTTTTAGGTACTAAATCT
ACCGAATCGCAAGAAGGTGTTATTAAAGTTGCAACTCAGTCTGAAACTGTGACTGGAACA
TCAGCAAATACTGCTGTATCTCCAAAAAATTTAAAATGGATTGTGCAGAGTGAACCTACC
TGGGCAGCTACTACTGCGGTAAGAGGTTTTGTTAAAACTTCATCTGGTTCAATTACATTC
GTTGGTAATGATACAGTCGGTTCTACCCAAGATTTAGAACTGTATGAGAAAAATAGCTAT
GCGGTATCACCGTATGAATTAAACCGTGTATTAGCAAATTATTTGCCGTTAAAAGCAAAA
GCTGTAGATAGTAATTTATTGGATGGCCTAGATTCATCTCAGTTCATTCGTAGGGATATT
GCACAGACAGTTAATGGTTCACTAACCTTAACAAAACAAACGAATCTGAGTGCCCCTCTT
GTATCATCTAGTACTGCTACGTTTGGTGGTTCAGTTTCGGCAAATAGTACACTAACCATT
TCTAATACTGATGGAACAGCAACTCGTCTGATTTTTGAGAAAGGACCTCAAACTGGAACG
AACCCGGCTCAAACGATGACAGTCAGCGTGTGGGGGAATCAATTTAGTGGGGAATCAAAC
ACAACACGTTCTACCGTATTTGAAGTTAGTGATGAAACATCTTATCACTTTTATTCTCAA
CGCGATAAAGATGGTAATATAGCATTTAGCATTAATGGTACTGTAATGCCAATAAATGTG
AATGCTTTAGGTTCTTTGAACGCGAACGGCGTTGCAACATTCGGTAGTTCAGTTACTGCT
AATGGCGAATTTATCAGTAAATCAGCAAATGCTTTCCGTGCTATTAACGGAAATTATGGT
TTCATTGTTCGCAATGATGGATCAGTAACGAATTTTATGCTTACTGCATCGGGTGATCAG
ACTGGTGGATTTAATGGATTGCGTCCTTTAGCTATTAATAATCAATCTGGTCAGGTTACA
ATTGGTGAAAGCTTAATCATTGCCAAAGGTGCTACTATAACTTCAGGTGGTTTAACTGTT
AACTCGAGAATTCGTTCTCAGGGTACTAAAACCTCTGATTTATATACCCGTGCGCCAACA
TCTGATACTGTAGGATTCTGGTCAATCGATATTAATGATTCAGCCACTTATAACCAGTTC
CCGGGTTATTTTGAAATGGTTGAAAAAACTAATGAAGTGACTGGACTTCCATACTTAGAA
CGTGGCGAAGAGGTTAAATCTCCTGGTACATTGACTCAGTTTGGTAACACACTTGATTCG
CTTTACCAAGATTGGATTACTTATCCAACGACGCCAGAAGCGCGTACCACTCGCTGGACA
CGTACATGGCAGAAAACCAAAAACTCTTGGTCAAGTTTTGTTCAGGTATTTGATGGAGGT
AACCCTCCTCAGCCATCTGATATTGGTGCTTTACCATCTGATAATGCTATAATGGGTAAT
CTTACTATTCGTGATTTCTTACGAATTGGTAATGTTCGCATTGTTCCTGACCCAGTGAAT
AAAACTGTTAAATTTGAATGGGTTGAATAAGAGGTATTATGGAAAAATTTATGGCAGAGT
TTGGACAAGGATATGTCCAAACGCCATTTTTATCGGAAAGTAATTCAGTAAGATATAAAA
TAAGTATAGCGGGTTCTTGCCCGCTTTCTACAGCAGGACCATATGTCAAATTTCAGGATA
ATCCTATCGGAAGTCAAACATTTAGCGCAGGACTTCATTTAAGAGTTTTTGACCCTTCCA
CCGGAGCATTAGTTGATAGTAAGTCATATGCTTTTTCGACTTCAAATGATACTACATCAG
CGGCTTTTGTTAGTTTCATGAATTCTTTGACGAATAATAGACTTGTTGCTATATTAACTA
GCGGAAAGGTTAATTTTCCTCCTGAAGTAGCATCTTGGTTAAGAACCGCCGGAACGTCTG
CTTTTCCATCTGACTCTGTATTGTCAAGATTTGATGTATCATATGCTGCCTTTTATACTT
CTTCTAAAAGAGCTATTGCATTAGAACATGTTAAACTAAGTAATAGAAAAAGCACAGATG
ACTATCAAACTATTTTAGATGTTGTATTTGATAGTTTAGAAGACGTTGGAGCTACAGGAT
TTCCTAAAAGAACATATGAAAGCGTTGAGCAATTTATGTCAGCGGTTGGTGGAACTAATA
ACGAAATTGCACGTTTACCGACTTCATCCGCGATAAGTAAATTATCTGATTATAATTTAA
TTCCTGGCGATGTTCTTTATCTTAAAGCGCAGCTATATGCTGATGCCGATTTACTTGCGC
TTGGAACTACAAATATATCTATCCGTTTTTATGATGAATCGAATGGATATATTTCTTCAA
CACATGCTGAGTTTACTGGACAAGCTGAGTCATGGGAATTAAAGGAAGATTATGTAGTTG
TTCCTGAAAATGCAGTAGGATTTACGATATATGCACAAAGAACTGCCCAAGCAGGTCAAG
GTGGCATGAGGAATTTAAGTTTTTCTGAAGTATCAAGAAATGGCGGAATTTCAAAACCTG
CTGAATTTGGCGTCAATGGTATTCGCGTTAATTATATCTGCGAATCTGCTTCACCTCCAG
ATATAATGGTACTTCCTACACAAGCATCGTCTAAAACTGGTAAAGTGTTTGGGCAAGAAT
TTAGAGAAGTTTAAATTGAGGGAGCCTTCGGGTTCCCTTTTTCTTTATAAATACTATTAA
AATAAAGGGGCATACAATGGCTGATTTAAAAGTAGGTTCAACAACTGGAGGCTCTGTCAT
TTGGCATCAAGGAAATTTTCCATTGAATCCAGCCGGTGACGATGTACTCTATAAATCATT
TAAAATATATACAGAATATAATAAACCACAAGCAACTGATAACGATTTTGTTTCTAAAGC
TAATGGTGGTACGTATTTAAATAAAGTAATTTTTAATAAAGGAATGACTGTTCCCGGCGC
GGGGTCAGGTGATAATGGCATTTTTGCTGGTCCTGGTGATAGTGCCACGTATGATACTAC
AAATATGGATATTGTTTCGTGGTATGGTATTGGTTTTAAATCATCACAAGGAACAGCAGG
TAGAACTGTAGTAATTAACACACGAAATGGAGATATTAGCTCAAAGGGCGTAATTGAAGC
ATCACAAATCCGTGTAACTTCGTTATCACCAGTAAATAATTATGACCTTACGCGGAAAGA
TTATGTTGATGGAGCAATAAATATTGTTACAGCAAACGCAAACTCTAGGGTATTACGCTC
TGGAGATACTATGACAGGAAATTTAACTGCGCCAAACCTTTTTTCACAGAATCCTGCATC
TCAACCCTCACATGTTCCACGATTTGACCAAATTGTTATTAAGGATTCTGTTCAAGATTT
CGGCTATTATTAAGAGGACTTATGGCTACTTTAAAACAAATACAATTTAAAAGAAGCAAA
ACTGCAGGAGCACGTCCTGTCGCTTCAGTATTAGCCGAAGGTGAATTGGCTATAAACTTA
AAAGACCGTGTACTTTTTACTAAAGATGACCAAGGAAATATTATTGATTTAGGTTTTGCT
AAAGGCGGTAGTATTGACGGGAATGTTATTCATACAGGTAATTATAACCAAACTGGCGAT
TATACTTTAAATGGCACCTTCACTCAGACAGGTAATTTTAATTTAACTGGTATTGCTCGA
GTAACTCGCGATATTATTGCTGCTGGGCATATTACGACTGAAGGCGGAGAATTTATTACA
AAAAGTTCAGGTACAGCGCATGTTCGTTTTCATGATTCCGCCGACCGTGAACGCGGTATT
ATTTTTTCTCCTGCTAATGACGGTTTAACTACACAAGTAGTTAACATCAGAGTTCAAGAT
TACAAAGCTAGTTCAGAAAGCACTTTCGCTTTTAATGGAAATGGTTTGTTTTCTTCACCA
GAAGTTTTTGGGTGGAAATCTGTATCAACTCCGGTAATTTATACCAATAAAGTTATCACC
AATAAAAAAGTTAAAGGTGATTATGACATCTATTCGATGGCAGACAGTGTTCCATTGTCT
GAAAGCACTACTGCTATTAATCATCTCCGTGTTATGCGCAATGCTATAGGCGCTGGTGTA
TTCCATGAAGTTAAAGATAATGATGGAATAACTTGGTATGCCGGAGATGGCTTAGACGCT
TATCTTTGGTCGTTTACCTGGTCCGGTGGATTGAAAGCAGGCCATTCTATTTCTGTTGGT
ACTCCTGGTGGCAATAAAGGATACTCTGAATTAGGGACTGCTTCAATTTCTCTTGGCGAT
AATGATACCGGGTTAAAATGGTACCAAGATGGTTATTTCTATGTAGTAAACAATGGTACG
AGAACTTTCCTTTACAGCCCTGAATCAACTGTAAGCCTTAGAAAAATGGTCATGGGTTAT
TCTGTAAACGGCAACGATTTAACTACGCCGCCAACAGAAAACTATGCTTTGGCTACTGTC
GTGACATATCACGATAATAACGCGGTTGGAGATGGCCAGACTCTTTTAGGATATTATCAA
GGCGGTAATTATCATCACTATTTCCGCGGTAAAGGTACTACAAACATTAATACTCACGGC
GGTTTGTTAGTTACTCCAGGCAATATTGACGTTATTGGTGGTTCTGTTAATATCGATGGT
AGAAATAATGCTTCTACGCTGATGTTTAGAGGTAACACGACCGGAGCTAGTTCAGTTGAT
AATATGACAATTTCCGTGTGGGGTAACACGTTTACTAATCCTAGTGTAGGTAATCGTAAA
AATGTCATGGAAATTTCTGATGCAACTAGTTGGATGAGCTATATTCAAAGACTTACTACT
GGTGAAGTAGAAATGAACGTTAACGGTTCATTTGAATCATCTGGTGTTACTGCTGGAGAT
AGAGGAGTTCACACAACAGGCGAAATTTCATCTAGAGCAGTGAATGCTCTTCGCATTTGG
AATAATGACTATGGAGCCATTTTCCGCCGTTCAGAAAACAGTCTTCATATTATTCCTACC
GAGTTTGGACAAGGTAAAACCGGTGATATCGGTCCACTTCGCCCGTTCCGCATGGACCTT
GATACAGGTAAAGTAAGTATTCCTAATATGGATACTACTAATTTGGTTATGAACACAAAT
GGTTTTATTAAATTTGGCGGTCATGGAGCGGGTGCCGGTGGTTATGATATTCAATATGCT
CAAGCAGCTCCTGTTTTCCAGGAAATCGATGATGATGCTGTAAGCAAATATTATCCTATT
GTTAAACAGAAGTTTCTAAACGGTAAATCCGTTTGGTCTTTAGGTACTGAAATTAATTCG
GGTACATTCGTTATTCATCATCTGAAAGAAGATGGTTCACAAGGCCATACGTCTCGTTTT
AATCAAGACGGTACTGTTAACTTCCCAGATAACGTTTCTGTCGGCGGTGGTGAAGCTACT
ATTGCTCGCAATGGTAATATCTGGTCTGATATCTGGAAAACGTTTACTTCAGCAGGCGAC
GTAACTAATATTCGCGATGCAATAGCTACTCGTGTTGCTAAAGAAGGCGATACGATGACA
GGTCGTTTAACTCTTAAAACCAACTCAGATGCTGTTGTTATTGATTATCCGGCAGATGAA
GCGGGTTATATTAAGGGTAAAAAAGGTGGTGCTGATAACTGGTATGTCGGTAACGGTGGT
GCTGATAATGGTTTAGCCTTCTGGAGCTTCCAATCCCAAGGCGGTATTAATATTAACCCT
AATGGCGAGGTTATTTTAGCCCCACAAGGTGCTGCAATGTTCAATATAAACCGCGACCGT
ATTCATATGAATGGTTCCAACTGGGTTGCACATAAATCTGGTGCTTGGGGCGACCAATGG
GGCTTAGAAGCACCTTATTTCCTTGAGTTTGGTAGCGTTGGCGAAGACAGTTATTATCCT
ATCATTAAAGGCAGATCTGTAATTAGTGGTCAAGGATATACTACTTCTGTTGACCTTGGT
ATTAGACGTACACCCCAAGCATGGGGACAAGCGATAATTCGAGTTGGTAATGCCGAAGGC
GCTGACGGTCCTGTGGGTATTTTTGAATTCCATTCGTCTGGACGATTCTATAGCCCTAAT
ATGGTTCAAACTCCTGCAATCGGTGTTGGTACTGATAATGGACTTGGTGCTCCAAGTATT
GCAATCGGTGATAATGACACGGGCTTATCACATGGTGGTGACGGTCGAGTTAATATGGTT
GCTAACGGGATTCATATTGCATCTTGGTCTAACTCTTACCATATTCATGAAGGTCTTTGG
GATACCAATGGTGCTTTGTGGACTGAAACAGGAAGAGCTATTATTTCTTTTGGCCATTTA
GTCCAACAAAGCGACGCCTATTCTACATATGTTCGAGACGTTTATGTTCGTTCTGATATT
CGTGTTAAAAAAGACCTTGTTAAATTTGAAAATGCTTCCGAGAAGCTTTCTAAAATTAAC
GGTTACACTTATATGCAGAAACGTGGAACTGACGAAGAAGGTAACCAGAAATGGGAACCT
AACGCAGGTTTGATAGCTCAAGAAGTTCAAGCTATTTTACCAGAATTAGTTGAAGGCGAC
CCTGATGGTGAAGCTTTACTTCGTTTGAACTATAACGGCGTAATTGGTTTAAATACAGCT
GCAATCAATGAGCATACTGCAGAAATTGCAGAACTTAAGTCAGAGATTGAAGAGCTTAAA
AATTTAGTTAAATCATTGTTAAAATAATAAGAGGGGCTGAAGCCCCTTGGAGGTTTATAT
GGCAGTTGAAGGACCGTGGGTAGGATGGTCTGCGAGAGTACAAACTGGAGACCCTTGGAT
GGGTGGTGCCGCACAGAGATTGAGAATGGGAATTCCGTTTTGGATGAGTAATATGATAGG
TCGATCTGTTGAAGTAATTCACACACTTGGAGCAGACCATAACTTCAATGGTCAATGGTT
CCGAGATAGATGTTTTGAGGCAGGTAGTGCACCTATAGTGTTTAATATTACTGGAGATTT
AGTATCATATTCTAGAGATGTTCCTTTATTCTTCATGTACGGAGATACACCTAATGAATA
CGTTCAACTGAACATACACGGCGTAACGATGTATGGTCGTGGTGGGAATGGTTGGGCCGC
TGGTGCAATTGGGGCATCTGATGGCGGTGTATGTATCCAGAATGATATAGGTGGACGTCT
GCGAATTAATAATGGCGGAGCTATTGCCGGCGGCGGTGGTGGCGGTGGTGGTTATTCACA
AGCCAACAACTGGGCGGGAAAATATGTTTGTGGTGGCGGTGGTGGTCGTCCATTCGGCTT
AGGCGGAAATAATGGTGCTCGATGGCCTGGTGGTAATGCTAGTTTGACGTCTCCGGGTGC
TGGCGGGAATACTGGTACAGGGTATTATGCAGGTGGAGGTGGTGAAGTTGGTCAGCCAGG
ACAATATGCTAATCCAGGTGCTGGTTATTCAACACCTCCGACAAGTCCTGGCGCTGCTGT
AGCAGGATCAGCTCCAACATGGCAGAATGTTGGAGCAATATATGGTCCAAGAGTATAATT
TGAATAAATATCCTTAAAAGGAGGGTCTATGGCAGCACCTAGAATATCATTTTCGCCCTC
TGATATTCTGTTGGGTGTTCTAGATCGCTTGTTCAAAGATAACGCTACCGGGAAGGTTCT
TGCTTCCCGGGTAGCTGTCGTAATTCTTTTGTTTATAATGGCGATTGTTTGGTATAGGGG
AGATAGTTTCTTTGAGTACTATAAGCAATCAAAGTATGAAACATACCGTGAAATTATTGA
AAAGGAAAGAAATGCACGCTTTGAATCTGTCGCCCTGGAACAACTCCAGATAGTTCATAT
ATCATCTGAGGCAGACTTTAGTGCGGTGTATTCTTTCCGCCCTAAAAACTTAAACTATTT
TGTCGATATTATAGCATATGAAGGAAAATTACCTTCAACAATAAGCGAAAAATCACTTGG
AGGATATCCTGTTGATAAAACTATGGATGAATATACAGTTCATTTAAATGGACGTCATTA
TTATTCCGACTCAAAATTTGCTTTTTTACCAACTAAAAAGCCTACTCCCGAAATAAATTA
CATGTACAGTTGTCCATATTTCAATTTGGATAATATCTATGCTGGAACGATAACCATGTA
CTGGTATAGAAATGATCATATAAGTAATGACCGCCTTGAATCAATATGTTCTCAGGCGGC
CAGAATATTAGGAAGGGCTAAATAATTATTTGTTCGTATACATCTCTAGATATCGATATA
CACCCTCAAAACCCTCGTTGAATTCGTCGATGAGGGTTTTCTTATCTTCTTGGGTTAATT
CAGAAACAATTTTACGAAATGAATTCTGATTTAACTTTCTACCTTCATGCGTTACTCCAA
TCTCATTCAGAAATGCAATAAAATTAGCACGATTTTCAACAATATCTTCTCTGGAAAATT
TAATCAAAATAGACGCAACAGTAATAATTTCACGAACTGTATCAATGTTTTTATTCATTA
ACTATACCACTCAATTAGTTGACTTTATTATAATATCATCAGACGCTTGATTTGTAAACT
GGTCTGTGTTATTTTCTTCAAAAATTTTTTCTACGAATTCCTTGAACGACTTACGTTCCT
GAGCTACATTATGCTCGATTACCTTTTCAAGATTATGACTCATTCGAAATAATCTTCAAT
TTCATAATCATGGACATAAATCATTATAGTTTTTAATACATCATCAATACTTTTTCCTGG
AGCTGGAATTACGTAGAAATATCCTGCTTTTGAGAGGTCTTTATAAGTTCCAATCAAGAA
ATCATTATTCTCAAGATGAAGTTCTTCAACTAATTCATTAACAATTGAATGGTATAAATT
TGGTAGAAACTTATATAGCTTTTCTAGAATATCAATTTTGATTGTGTATTGAACCACGGA
CTGAGAATCAATAATCATAGACCTTCCCCTTATGTTTCTGTTTGCGATTAGATTCTTTAA
ACGCTTTCTTCTTATCCTTATGAACAGAAGCTTTATTAAAATTATGTTTTGCTACTAAAT
TGTTCATAGTGTTGAATTACCTCTCTTAAACATTTGCATGTGAATGAAAACTTTTTAGCT
ACACCACATTCAAATATATGTTCTCTTAAATCACGTGTATCGGTATATCCCATCTCAACG
ATAAAGTGCCGTATTAGATTTTTATCTTTATCATTGAGAGAATTAAAATAGTCAGATTTT
GAATTAATTTCCCTGGCCAAGTTGAATCACCTTCAGTTGACGTTTTAGTTCTTTTATCAT
CTCTTCGTTCATTGCAATATAAAGATCGCGTAAAGCAGGTTTTAGCATTCCATTTACTGG
AGAACTAAATGGACACACATAATCTTTTCCTACAAGCTTTTTAGTTAATTCCATATCACA
AAACTGAAATGCAGGTTCATTAGCATAAATTCCCCAATTAGTTGACATCATTTTATTGGC
ATATTCCAATGCCTGGATTTGATTAGTAATTCCGTCAATTTGAAACTTTTTAATATTCAT
TAGTAAAGGTCCTCAGAGTAAAGTTCTTTTTCACTACCACCACGTTCAATACGTACTTGT
CCAGCGTAAGTTGCAATAATCATTGCTTCTTCACGTGTCCAGTAATTACTATATTGGTCA
ATAAACCCTTGGTCATCATCGCAAACTTGCTGAGTAACTAATTGAGGTTTAACTACATCT
AAAACTTCTGCCATATCTTTAGAATAATGACGAGCACCTGGAATAATAAGAATTCGTCCA
TCTTTTAATTTAAAACGGTTGGCTGCACAGACAATTCGTCGTTGATATTTTTGGTTTTCA
TCCCAATGTGCAGTCTGCCAACAGATTTCAGGAACTTCTTTTAGAATATCTTCTTCTGTG
CATTTATAACCATGTGCTTTAAATTTTTCAACAAGACTTTCTGGAGTCTCACGAGATAAA
GGAACATTCAGCATTTTTAAACGATTGATAAATGGGTTCATTTAAACCATCCTTTAATAC
GCTGCCACAAAGTTTTCTGTTGAGCTTTGTTAACACCAATTGAACGAATAACTGGTTGGG
ATTCCTGGAATTCTTTATAATCAGCAAGGTAAATTTCGTAAGCTGAATCTGTAAAGGAAC
TTATCGCTGCCATGAAATTATTGCGAATACCTACTGGAGCATCTTTACTTTCACGAATAA
TCATGTATTTACCAGTCTTAATCTTTACGATAGTTCCAAGATAAGCTCCGTGGTACCAAA
TATCCCACCCCTCTTGAGTAGGTTCTGCACAGCGACGAAGTTCATTGATAATTTCTAACT
TGTTCATTATTTATTCCTCACAGTTCAGATGCTACGGTGATTACAGCTTCAATGTTTTCT
GCAGAGCGTTTAATGTCAAGATACACATTACCATTTTTAGCGATTTTACATGACATTCCG
ATATCAGTAAATTTCTGAATATGATGTTCCATCATTTTGTATCCAAAAATTCGCATATTT
CCGTTGTTATTAATTTCAAAATTACGAATTCCGTGAGTGCGTTTTTCTAAAATAGCAAGA
TAATTACTACGATAAGTTTCAACCTTTTTAAGAACAAATCCGTTTTCATCCAAAAGTTTT
AACATGAAGTCTTTATCTTCTTCCATATCAGAAGTAATCTCACGAGCTTTACGAGTTGCT
CGTTTTTTCAGCAGTTCCGGGGCATTTTCCTGTGCGTATAAAGTTGCTGCATTTGAAATA
ATATCCTGAGCTTCACCAGTAATGATTAATCCATCACCAGATTTCTCCACCAGGCCTTTT
TTAATCAATACCCCAATATTACTATTAACTACTGCGTTACCTAAATCTGGATGCACCTCA
CGAACTTCTGCAGCTGTAATGAAATCTTTCTTAGCAATAGTAATTAAAATCGCAGCAGTT
TTTTCATTCAGAACATCGTTAGAAGCTTTGATGATGTAAGTTACTTTAGACATTTTCTAA
TCTCCGTAATTCTGTATCAGTAGTTGATAGTTGTATAATACCACAGTATGCTTTGGTTGT
AAACAGTTTTGTGAAAAAATTTTTGAAATAAAAAAGGGAGAGCCGAGGCTCTCCCTAAAA
TTACTGCATGACTGTGATAACTGTCATGATAACACGTTGAATTCCGAACGCAAGAAGACC
TCCTGCTACAGCTGGAACAATACCTAAACCCGCCAGCAAAATGCTACCGGATACTAATGC
AGCGCTTGTAATGCCTATGAATGGACTCATTTGATTTCCTCTAAATCTTTGGTGTATTCT
GTAACTACATTAGTAGTTTTCCAATATTCATTTTCTTCTTTTTTAGCTTTAGCTTCTTCA
GCAAGTTTCTTCGCTTCATCGGAAGTCATATGAAAAATATTCATTCCGACTAGTTTATCA
ACATAAGAAGAATACATCTCAATTTTAGAAAGTTCTTCAGTCAGTTCTTTACGAGTTTTA
CCCTGTACAACAATTTCACCTGAAATTACTTTCTTAATGAAATGTGCCTTGGCAAAGGCT
AAACGAAATGCTGATTCAGTTTCTTTAATTTTGTTATCAATTCGTTTTTGGACATAAGTT
TTACGAACTTCAACAAAGTCTTTAATTAAATCAACTACGTTATCGTAAACTTGTAGCTTT
CCTTTCTCATTAATAACGGTAATATTTTGGGAACGACGCTCAATCAACCCAAAGTCTTTC
ATAATTTTTGCATGGCGTTCTTCTTCATTATCGCTCAAAGAATATTCTTTACGGAATTTA
ACTTTAAAGCCAAAACCATGCTCACCACAAGCATCGTCCCATGTAATGAAGCCTTTATCT
TCAAGTGGGTCTAAGATTTTACTCACATAAGTTTCACGATCATACTTATACGGAATCTCA
GTGATGTGCATTTGAGTTCGTGAAGTAAACTTATATGTTCCACGAATTTCATATTGTCCA
TCAATTTCAACAACTTCACCACGAAATTCTGGGAATTCTACCTTCGGTTTAGTTACTTTC
TTTCCTTGAAGAGCTTGTAGTACAGCTTTCTTGACAGAAGAAACACTATGAGGAAGAATG
TAAGTTGCATAACCAGTTGCAATACCGGAAACGCCATTAAGAAGAACAGTAGGAATAATA
GGCAAATAGAAAGCAGGCGGAATGTGTTCTTTATCTTGATGTACCGGAGCATACTCAGTA
TCTTTATATACGTTATAGAAATTTTTACTTACACGAGCAAAAATATAACGACTTGCTGCT
GCCTTTTGGACAGTACGAGAACCAAAGTTTCCTTGACCATCTAATAGAGGAAAGTTATTA
TTCCAAGTATTAGCCATCAAAGCGCCCGCATCTTGTGCAGAGTTTTCGCCATGATGATAT
CCAAGGTCCGCTACACCACCTGCAATAGAAGCGAGTTTGTGAAACTTATCTTTATTTCCT
CGCGCCAAATCAAGAGCTCGAGCAATAACAAATCGTTGAACTGGCTTAAATCCATCAATC
ATATTTGGAATAGCACGATTTTCAACCGTGTACATAGCATAAGCCAATGCTTCATTATCA
ATGATACTTTTTAAATCGCGATTATTCAGTTGCATAAATTTACCATACTAGTGAATGTAG
TGCCATAATAACATCAGAAATGAAAAGCACGACTTGAATTAATCCGAACATTATTCCGTA
ATATAATGCTATCAATAAAATAGCAAGGGCTAGTGAATAGCCCAAGATTTTCTTAATCAT
TAGTAGATAACAACACAAATGTTAAACATGCACACATACCCTGAGCTAAAGCCTGCGAAA
ACACGCTACTGGAATCGGTATAGATAGTTAAAACGCATACTATTATCCAACAAATAAATG
AAATAACTCCTAATAATTTTGCGATATTCATATTTTCCTCACTGGCGTCCGAAGACGCCT
TTGGTTTTAAGATTGTTACGATAGAACTGCATCACGTGTTCGTTATGGAAATTACTCATT
AGTATGCCTGCAAAACGAATTTAAAGTTATCAGCCAACATACGGTTCATTTCTTCAAGTG
TTTGATACTCAGAATGATGATTACGAGTAAACGCTAAAGCTAACTGTCCTTTTCCAAATC
CCGTCGTCAGAGGTTTCATCTTAGAAGCAGGCAGATAAAATACTGTGTATGGAACATTGT
TATTTGCAATAGTACGTGCAAGTTGAGACCGACGCTGGCGAATATGACTTAGAACCGCAC
TGAATCCTTGCTTAGAACGCTGATTACCTACATAAAATCGTGCAGACACACATGGATTAC
TAAATGGACGACCATCTAATTTACTTACTAAAAAGTAAAATCCAGGTTTAGATAAAATAT
CTTTATGCGGAGTTCCTAAAAACCATTCACCACCCTTGATTGTACCAATAACAGTTGCGC
CTGCATTGTTCAGATCAGTAACAGTCATGTATTTCATATTAATTTCCTCTAAATTATTTT
CTACTCCAAGGCCGCATGAATACACACGGCCATTAAATTAATCGTCGCAGTCGACGCTCA
ATTCCCAAAACTCTTCTACAGTATAAGTTTCAGTATCATTTTCAATACAGAAACGTTCAT
TACTGTTATTTGCTAAAGTAGCATTAACTGTAGGTTTCTCGCTAGTGCTCTTAAGAGGTG
AAATGCGAATTAACTGATCACCGTTATCTAAACAGAAAATTTCACCAACTTTTACATCTT
TAAAAATTTTCATAATTCACCTCAGGGAGTATAAAATCCAAATGCAGTTGTTGACCATCC
CATCCAATACGGGAAATTTGCGCCAATGTAAAACATGAGAATATAAAACCAACCACTCAG
CAAATTCATCATTTTACACCATTCCAAATTGTTTCAACTACGGATTTTAAACCATTTTGA
TGAATATCAATTCCGACTACTGTCATCAAATAGATTCCAACTACAACTGAACCTAAGGCG
AAAATCAGCATGAAAATGAATAAAGCTGGAAAAATATTATCGAAAAACCATTCAATAAAT
GTAAAAGCACTGCGTTTACGCTTCATATTTTCCTCACATAAATCCAAAGTAAGCGTTTAA
TACATCAATCATTAAAACGATTGGGAATATACTCAAAACTACTAGTATTATAACTACATT
CCATATAGCTTTAACAATCTTTTTCATTTTCTGTTCCTCCGTAGTTGATAGGGTAATAGT
ACCACAGAGGAACAGTCTTGTAAACAACTTTTTTAAAAATATTCGTAATAAATGTGAATA
CCAACTACTACCGCTGAAACCTGTGCAACCCACCACGCACAAGCAATAAGTACAGAATTA
AAAATTTTCATAATAACCTCATCACAAAAGTAAATGTTAAACAAATCAATGGAATACTAA
TTAACCAAACAAAACACCACCATAATGAACTCATAGTTCAATCTCAATGATTTTCATTTT
ACTCAATAATCCGCTAAAAGATCGACGATTGCATCACGAAGACACTTATTCGCAATACGT
TTAAGAGCAATTTCAGTTTCTGGAGCATTTTGAATAATCATCGAATTCAACTCAGCCTCA
GCAAATTGAAGTTCTTTAACTAGTTCAGCTTTATATTTCCCTTGCCCTTTCTTAGCTTTT
GCCCGTTTTAATTCAGCTGTAGTAAACATTTTATTCTCCAAATCCGTATCAGTTGATAGT
TGTATAGTACCACAGTCCTTGTGGTATGTAAACCGGTTTGTGAATTTTTTTAAATGGAAA
GATACCATCCGTTGTAGTTGCTTTTTCTTACAACCTTACGAAGGTCTTCTCTATCACCGA
TGAATTTCGGAGTGTACTGGATGACACCTGGATGAATTTCTTTAGTGTTGAATATAATTA
TACAGTCCGCGACCTGGTGATTTAGAATGGGCCCTAGATTTATTCCAGAACCGTATGGAT
ACTCTCCGCTGCATCCTGTTGTTACAGAAATCCAACGTGAGTCAGTTTGATGTGTCTTAA
CTTCTACACGAAGCCCGCAGTATCTTGGATGCGCCAATACATCCCATGCGTATGTATACG
GGTCATTAACGTCCTCTTGGCCTTTGTTAACATACCCGCTTAGCCAATCTGCTACAAAAA
ACTCTGCGTACACCGCGATACGGCATCTTTCGATAACTTCTGCTTTATCCTGGTTCGGGT
TTTGTTTTAAAGAATATCTTGCTGTATCAGCAATTTTGACCTTCATTTCACTAGTCAAAT
CACTGTTCGATAGGGTAAATGTCGGAATCTGAAATAGTCTCTGTAAACCCGGATTCGTTT
TCTGCATTTAGACTTTCCTTTTTACCGCTGAGATAAGCGTTATATACTTTAAGAGTGCCG
TAATAAATTCGGTCATTTTCATCTAAAGACTCACGGTCAAGTTCATCGAGTTCCTTTTTA
TCCATGACTATAATATCATTGCAGTAAAGAAACCCAAGTTTTTCGTGACCAAACTCAAAT
TTATTACAGTACACAATATTAGCGTGATGATTTCCATGCAGTTTAATCTCTTTTATGTCG
GAATCACCGATATTCATACAATAAATCATAATTTTTCCTTAAAACAAAAGGGCCGAAGCC
CTTTATTTTACTTGAATTGTGCAATTCTTTTCTCTAGACATTCAGCATAAGATTTCATTG
AGATGAACTGTGAAAGCAGTAATTCTTGCTCAACTGCACTAACTGTTAGAAACTTCGCGC
TTTCTAAAAATTTACTCAGTGCATTAATTTTGAGCATTAATTGATCGTATTCTTCTTTTA
CTCGTGCTTGATAACCTAACATAATTTTCCTTAATATGATAAGGGCCGAAGCCCTTATTT
AAATTGTTCAGTAACATCTTCAACTACTTCGTATTGGCAGGTACGCATTTTAGCGTCGTT
ATAATCAATCGGAATTGATACTACATCGCGAGGATGTACTTTAACTTTTACAACTCGGCT
GGTTGAACTACCAAAGTGACGAATATAAGATTTAGAACACACATGCAGACCACGAGAACA
GGTTTGTGTATCATCGTCGTTCACACGAGTACGTGGCATTTTAACTACTTTACCCGGACT
GTTATCAAAGGTATTTGAGTGACAGTCAAAGTAATTACTGCGAACTACTTTCCAAGCATA
GAAGTAACCATCTTCTGTAATTTCAATATCGTTTGCTACCAAGAAATCAAAGAGTCGAGA
TACCGCTTTTTGGCTTGGGTTTTCCAGCAGATTTTCCAAGAACGGAAAATAAAATTCAAA
GTTTTCGCCTTTTTCCATCGAGTCAAGAATACGATCAACCAGACCAGACCGTAATTCAAT
ATTTTGATAGAACAAGCTTCCACCTTCAATTCGAACATCGCCGGAAATATATTTTTCAAC
AGCGCGACGAACATTAATTTTTTGTGCCGCTTCTTCCAATTTATCTGCAACAAGCAGATT
AAGAATTTCCTGGAAGTTTGAATGAGTATTAGGAGTTGCGTTATAAGTTACACCGTCAAC
AGTAATTGAAATGAATTTTTTAGAAGCATTCCAAATAATATCAGATTTAGCAACTGGAGC
AATAACTGCATCGCTATTAACTTTAATTGTAATATCACCGCTAATAGTAACTTTAGAGCG
TTTAGCTTCTTCAGCATTTTTCAAAACACGACGGATTGTGTCAACCGATACACCTTGCCA
ATCAGCCAATTCCTGTTGGGTGTAATTACCACTTGAATACAATTTAACAATTTCAGCTTG
TTCGTTTTTGGTCAGGCATTTAATATTGTACATAATTTTCCTTATTAGGCCGCAAGGGCC
TTCATAGTTTTAGCGATTTGGGAAACTTCATCATCACTTAAAGAATTGCGATAACCGATG
AAGTCGGAAACAATACGGAATTTCTTGGTAAACTCAGCAACCATTTTATCACTGTTTTTT
GAAGCATTACGTGATAATTCATCAAAGAGATTAGTTACCGTCCAGATATCATGACCAATG
GTATCTTTTCCACCATTAAAATATACACCCTGTAATGAACTAACCATATTAGCGAGTCGT
GTATATTCTTCAGAAACTTCATCTACACTGAAGTACTTCATCATAAAATCTAGCTCAGGA
TACTTGATAATTTTATCAATATATCGTTTAGCTGAACTTGAATAACCTACATACTTATCA
TAATCTACATCATCAAAAGCATCTACATATAAATCACGCAAAGCTTCAAAAATACATTGG
CACTGACCGAGTTCTTTTACCTTTTTCTGTAAAAGCGGACGAATAACATAAAATTCATTA
ATGCCAATAAGATTAGCCATACGAATCAAAATATTCATAGATGGATGACAAAGAGATGTA
GTACCATCCATAGAGAAAATATCAGAACGATGCATATACGCTACATAACCAGTAATTTCA
TCTGCTTCTGACGTAAGCGTAAATAGTTCCTCTTTTTCCCATCGCCCATCTTTAATTTCA
AACTTAAATGCTGTAGCAGCTTTAGGACGAGGAGCTTTACTTTTAACTACCTTTGGAATA
TAGCTTTTAACTAAAGCTTCAATTTCTGACAAATAATGAATGTTAACTTCATCACTTTCA
AACATCGCCATAATATCAGGGAGTAAATCAATCTGCGATTCTACTTCTGGATTAATAAAC
AGAAGACGCTCATTGTGATGAATATTCAGAGTGTTATTAAATTCACTATCATCTAACGCA
CGTGCTAATCCACGGACAATATTAACACGATTTTTAATATTATCAATAACGATATTAATT
TTTGTTGTATTAATACCAAACAGACGATAACTTGATGCAACGGCTGAAGTTTCATGGCTT
TGCTTAATACGTTTCAGCCGAGGGTCAAGATTTACTTCATACACAACCCCTGCATTACAT
AACTTACTATCAGGTTCAAACATACTCTGCATCTTCTTATATGACAGATTTTTAGTCGTG
AATTTGACCGAATTACTAATCATATAATCTCGAGCAGAATACCCCATCTTCATCAATTCA
CGATATGTGTGACGAGGAGATGTAGATTCTTTAAATCGTTTTACATCTTCATTAAATGCT
TTCTCACTGAGTTCTTTAACTCGTTCAATAATATTTTTACGAGTACGATCATCCAGTGAA
AGAGCCTCACGAGATGGAGCAATATCAAGTGAACCCATTGGAAACTTAATGTAATTCACT
TCATTGCGAATGCTTAGCCAGTTACGGTCTCTAATAACACCGTCGATAGGATAAACAATA
CCGCCATAGATAGCATATAATCCGCCGCGATCTGGCCAGTATCTTTCTGGATTTACACCG
TAATAATCATCAAAATCCGGAAAATAATCAATTTCGCGGTCAAGACCATTAATGATAGCC
AAATCTTTGAACGGTCGCATGATATAAGAAACTTCATAAGCAAAGTTTCTAAAGTCTTTT
TCTTCAACTGGAACTACGATTTCAATACCAGTTTTATCATCTGGACCCATTTCTTTTACG
AATGTAGGTTTAATCTGCGGACCGTCACCATCCATGTAAGCTACATAACCACGAATTTCA
CCTTTATGATACGAAGTAATACTAAATGTATCAGTATAACTAAACGGAGATTTAGAACCT
AAACCAAATCCGCCAATGAAATCGTTAGATTCAGCCTTAGATGAACTGAAGTATGAATTA
TACAGACCAGGAGAATTATCATCACCCTGAATATCAAAATCACTCATACCTGGACCAAAA
TCTCGACAAACAAATCGTGGATCTAAACGTCCAGGAACTTGTATGATAAATTTTTCAGGA
TTTCCATTGAGTGCATGGGCATCAATCATGTTGGTAATCAATTCACGGACTACTGCGCGA
ATTTTGTTTGTATACAGATCAGATGATAGAATTTTAAATACTTTAGGAGATGCTGTGATG
CTAAATGCTTTTGATTTAGAACCATTACCAAGAATTGTTTCTTTTTCAGTGGTGATAATC
ATAATTTCCTCATTAATTCATATTACGCTTAATAACTTCAGCAACTTCTAGTAGTTCATC
TTTAGTTGCGATGTCGGATTGAATTTTATCTCTAATATCTTTAAAGCGGTTTTTAAATTC
TTCGGCTTCTCCCATATCGAAAAAGCGTTGAATGATTCTATATTCTCGATGAACTGCTTT
ATCAAAAAGTTCTAAATTTACTTTATATGATTTCATTTCAATATCCTCATTTGCCCAATT
AATTATACCACATCCTTGTGGTAAAGTAAACTACTGGCTCATCCATTCTTTACGAAGGTC
AGCGTTATCTCCCATGAGCATTTCAAAAAGCTCTTTCCAATTCTCAGGAAGTTTAACAAC
ATCATATACTGGGTTTTGAATCATCTCACGATATTCAGATTTTTCCAAAGAGCCAAGTCC
CTTAATATAACGGATGCTATGTTTAGGTAGAGCATCTTTGGCACTCTCATATTCAGCGAC
TGTATAAAACCATTCTTGTTTTTTACCGACCTGAGCGATGATTACAGGAGTTTTGACAAA
GCGAATTCGTCCTTGCTCAAACAATTCTGGCCAATTACTAAAAAACCCGAGCAGAGAAGG
ATAAATGCTTCCTAGACCATCGTGGTCAGCATCAGTCATAATAGCAATATTATGATAATT
CAGGTTTTCAGCTTTTTCACCAAGAACTAATCCAGTGATTGCGCAAATATCAAACAGTTC
TTTGTTTTTAAGCATATCGGCATATGACATACCCCAGCTATTAAGAACTTTACCGCGCAA
TGGATAACCACCGTGAAGTTCTTTATCACGAACATCAATAAGATATCCGATAGCCGAATC
ACCCTCAGTCAAGAACAATGTAGTGTCAGCATCTTTACCGCAAAGATTCGCTTTAATATG
TTTATGAACCTTTGCCTTAGAGGCCTTTTTAGCTGCTTTAGTTTCTGCTGCTTTTTCTGC
CGCCAATTTACGAGCCAAAGCAGCTTCAATAATCGGCATTAGAATTGCTTCATTATTTAG
AATAGCGCGTGAAATCTTTTTAGCATCAAGCTGAATATGACTACGAATTTCACCAAATGG
AGAAGTCAAACGCTCTTTAGTCTGAGAGTCAAATCGCATGTTTTTCATATCACGAACAAA
CATAACGATAGTCAAACATTCTTTGACACGTGCTTTAGTTACATCAATTTTGAACTTACG
TTTGATTTGTGGAATAAGGTCTTCACAAATATCATCCATAACACAGTCAATGTGATGGCC
ACCATTCTTAGTGTGAATGTTATTCACATAAGTTAATTGACGAAAACCATCCGGTGAACG
ACCAACTGCAATAGAACAATTTTCTTGTTCTTGAACGATAGCATGCTCATCATATTGGCG
TGCATATTTCTTAAAATTACCCTGAACCTTTTTACCATTAAAGGTAAATTGAATATCAGG
ATAAACAACAGCAAGTGTCTGGAGACGATCTAGTGTAATGTCAAGATAAACTTGGGACAG
CTCATTAGTTTCAAATGACATAAAATCAGGAATGAAAGTAACACGAGTTCCTTTCCATTT
TCCTGGAATAGTTTCCCATGATTTATTTTCCATGCCATTTGAACAACGAACTACAATATT
ATTTTGACCATCGCCAGTTTCACCGACAAACATCACAGAAAAAATGTTAGTTAAACTAGA
ACCAACACCATTCATACCACCGGTGACGCGTTCTTTATCATCACCAAAGTTACCACCTGC
TTTTGGAATAGTCCATGCAGCAACAGGACCAGGAATTTCTTCACCGGTAGGTGTTTTAAC
CATCGCTTGTGGAATACCGCGACCGTTATCTTCAACTGTTACCTGATTGTTTTTAATGGT
AACATTAATTTTATTTGCGAATTTAAACTTAGTACGAATACCTTCATCTACTGAGTTATC
GATAATTTCATCAATAAGCTTAACAAGACCAGGTACATACTGAACACTTTCCCATTTACC
AAACAGAAAGCGCTCATGCATTTCATTAGCAGAAGAGCCAATATACATGCCGCTACGCTT
TTTGATATGTTCAATATCGCTCAGAATTTTAATTTCATTCTTAATCATCACTTATCCTCG
TTTGGTTTCGGGAATATTATACTCCAATAATCATAAAGCTAAAGGCCCGAAGGCCTTTTA
TTTAAAACGAATAGTTGAATCCTTAAAGAACAGCCCAGAACATACTGTTCCTTCTACTTT
CTGCCCAGTAGGTCCAATAGCACGAAATCCAGTATGCTGGAAATCATTTTCAGAGCAACC
GAACCAATTATATCCAGTGATTTCAATATTAGTAAAACCGCTTGAAGACAAAACTTTAGT
TGCATTATCAGCGTCAGTACATCCTATTAAAGACACTGCTAATACTAATGCTGCAATAGA
ACGATTAACATATTTCATAATTTTCACTTAAATTTAATGGCTTGAAGAAGACTAATAACT
CTCAAGCGACTTCTTTCATCTTTAACTATAAAAGAAAGAGGGTCACCAGATTTCATAGTA
ATAGTACATTCAAAATCAAAATCTTCGGGAACTTCTTCGAATAGGTCAAATTCTTCATCA
TAAATTAGAACATTACTCTGAAAACTGTGAAGAATTTTTCCATCATTTCCAGATGTTGTA
CTAATCATTGTAACATTATTACCTTTCATATCTTCAACGATAAATTCGCTTGTAGATATT
ACAACATTAATAGAACCATTCCTATAAATAGCAGAAAATAGATATTTCTTTTCTTCACCT
TCGCGAATGCGATATTTCTTACCGATTTTAAACATAATCACCCTTTAAGTAAGTCGTAAA
ATCCACCATTCACATGCTTAGGAGCAGAAGGCCGACGAGTAGACAAACGATGACATTTAG
GGCAAACATCATTTTCTCGTTCAGAAATCTTTTTAATTTTTTCATATTCATGCCCACAAT
CTTCGGATTGGCATTTATAATCATACATTGGCATAATTATTCCTTAAAGTGAGCTTTCAA
CATCTGATACAAGGACCATGCCTGTTCATTATTTTCAATAGTAACTTTCATGACAGGAAA
TTCTGTGAAATCTTCTATTTGTTCTTGCTCTTCCTGCTCTTGCTCTTCAGCAGCCTGATA
TGGATTTTCCACTTCATTAAAGAACTCGGCTTCGTTGCTAGAAAGCCAGATAAAGTTTTC
GTCAATGACTGTACCTCGTGATGAATATCCAACTATGCCAGTAGATGTCACAATTTTAGT
AGGACGCCCGTAATAGTCAACATCTAAAATTTTAAAAGGTTCCATACCTAAACGCCGCGC
ATAGATTCCGTTATCAGTATGGTCTTTAATAAAATTTTCTTGAGCTTGTTTATTTTTAAA
TTGATACCATTTATTAACTTCAAATTTAATAGCCATTAATAAATTTCCTTCCAGTAAGTT
GTGCCATCTTCAGTAATTTCACGAAATACACCATAAATTGGTTGTTTATCACCGACTTTC
TCATACACATAAACAGAAGTCAAGTGAGTAAACTTGCTAGTATGTTCCTTTTGAACTATT
ACCAAATTTGGATCAAATAATACATCTTCAAATTCATCATTAGTACAATTCTGAACAATT
TTACGTTTCATTACAATTTCCTCATTAATTGAACAGTGGAGCGATACGTTTCAGAAGAGT
AGCAGCACCTTTGGCGAATTTTACATCATGAAAAACAGTTTCTTCTTCCGTTACAACACG
AACTTTAATGTTTTCACAATCCCAATTTTTACGAACAATCTTCAAAAGCTGCAGTAAATC
TTTACATTCAGCAATATCGATAACACATCCACGAGAATCTTCCATTATCGCACGATAACC
GTAAGCCATACCATAATCGTTGAAAGATTGCTCAATGATAATTAAGTTTTCCATTTTATT
CTCCAAGTTGTTTTCTGTATCAGTAGTTGATATTGATATAGTACCATAATCAACTACTGA
TGTATATAGTTTTATGAAAAAATTTTAAACTTTATGCACAGCGAGCTTTGCTATAGTGTT
TAATCCAACTTTCAGGAATGACTTTGTATGTTCCTAAAAATACCGCGTTGTACAACTTAA
CGCCATCTTCTACCCATTGATCGGTAATGTATGCACACATAGCACGAGTACGATGTTTTT
GAACAACCCCTTCCTCATCTTCGGTAAATTCGAATTCATAAGGAGCAATGAACTTAATAG
CCTGACCGAGTTTCCACTTAAAGTCTACACCTACATGCGAAGTATCAATCGTTTCAATTC
CTTTAGCAGGAACAGCTTTCAAAAACGCAGACTCAAGAAATTTCGCACGAACATAGCCAA
ACTGAGGTTTAGACTTTCCATCTTTAGGAATGATACGCACTTTTACTTCAGAATCTTCAT
CTTTAACACCGTGTTTAAGCTGAATGCTTACAATTTCAACCAATTTTCCTGCTGCTTTAG
AACGGGATTTATCAGATACACGAGCAATTTCACCAATATTAATAATCATAGTTATCTCTC
ACTTGTTAAAAAGATTTTATACTCCACGGGACCATTATACTCTGGTCCCAAGAGTTTGTA
AACTATTAATTTAAAATAGCTACCACCGCACTACGAGGTACTACGCTAAAATCACCTGCA
TGAACAACGTTCAGAAGTTCAACACCATCTTCAATCCATTGGTCTGTTACCCAACCACAG
ACCGAAATAAATGGAGTCTTGATAGCTACCGCATGAGTTAGAAGGTCAGTAGGATCAACT
TCTTTGAAGAGGATAAGCTCTGCTTCAAAGACTATAGTTTTAATTACTTCATCATTATCT
AAACGGTGTACTCGAATCACGTAAGCTTTATTCTTATCATACCAGTTACTTTTTGAAAAA
CTTTTAACCACAAACTCGCCTTCACCAAAAGCATTAGTCAATGCTTTATAACCCAAATTT
AGTTCAGTAGTTTTAATTTCAGTTTCAACCAGTTTGTAGATTTTACCAATTTCGATGGTC
CGAGCAGTCATAAAGGTTTCCTTAATTTCTAATGGTTTAACAAGAGTGCCGTACATGCTT
GCTATATCCATGTCAAGCAGCTTATATACAGGATTCGGTGCGTATTCAGGATTATAATTA
AATTTCATAATTATCTCATTTCAATAAAATCTACGAGTTCAGCATGCGATTTACGGAACA
TTACTTGGTGCCCGCCAATGATAACTTCATCTTCAGGAACTTCGTATACAGCGAGATAAA
ATCCTTTAGAAGATAATTCTTCCCGCTCTTCTCGTGTGAACCATCTCATCATATCATATT
CACTAGCGAAAGCAAAATGATAAAGAGCTATAAACCATCCTGGAATATGATATTCTACTC
CAACATAATCTTTCTTGAACTTAGTATTAATTACTATATTAGCGTTTTTAACTAATAGTT
TATCTTCGTGTGGTAAAGGAATTCTTTTATTATTATCGCTATGATGCATAAAATTAGGTC
TGTCATAACCTACGTGTAATAGCCACTCTTCGCTCCATGAATCTATTATACTCCTGTACG
GCGTTATTTGAACACAAAGATTTCGACGTATTGTTATAGCATCTTCATAATCAAGAATAC
TAAACGATGATTCAACACGATAAATTTTCATTTTATTATCCTCAGTAGCTATGGTGTTAT
AATACCATAACTAACCGAGGAAGTAAACAACCTTTTATCGTTTAGTTGGAAGAGACAGAG
GATCGCAATCTTCCTCTGACGGAGCATCTTCAAGACCCATAGCATATCGCAAAGCATACT
TCATCATCAGGATGTCTTTCGCACAATCATGAATAGAATCATGTGCAACGAATCCATCTA
AAGTTCCCTTTGGAAGAGGACATGTAGTCATATCACGAACAAGCAGAAGTGCTTCAATTC
TGGTACGAATATCACGCTGATTCCAGAATTTACAAGGTTCTAACTTAAACGTATCAAGCT
CATTCTCAGAAACGCCGTTAAGACGTTGAATATCACGAATGAGATCGACTAAAATTGGAA
AATCAAATGACATTCCACGGCACCAACCATGAGATTTCCAAGGATCGATATTATGCGCAT
TAATGTAATCATTGAATTTTGCAATACCATCAATAGTGCTTACATCTTCATCTGATGGTG
CAATATTTTTTCGAGCTTCAGGGGATTGATTCTTCCACCATTCGATAGTACTTTTAGTAA
AAAGACGGTGTCCTTTTTGGCTTTTTAAATCAAATTTGATTTTAATGCCACGTGAAACTA
ATTCATCAAATGTTTCAACAACTTCCGGGTTAGGGTCAAAAGCAATTACAGCCAAATCAA
TAACAGCTGCTTTTTCACCGCTTCCCATTGTTTCAAAATCTATAATAAAATCAAACATTA
AATTTTCCTCGCTAAATCACGAATTTGACCTACAGTATAATCTTGGATATAAACTTTATT
AATGGGCTCATCAATAAATTTTGCCATAGATTCAATATCTTTTTGTATCTCTTCAAGACT
GTATACTATCTTTGAAGCTTTTTCGCGAATAGTAACATTATCAGGTCCTGGATTTTCCTC
AATGACAGCTTTAACATTTGTCATAAGAGATTTAAACTGATGCAAACTTAATTCAATCAT
TAATAATCGCCTTATAAAGATGGCTAATTTCACCTAAAACATAATCACTGATTGTAACAG
TTTTTACTTCACCACAAAAGAATTCTAACGCAATCAAATCTCGTTCAATTTCTTCCAGTT
GAAGCATTAACTTGCCTGATTCAATTTTCACGTTTTTGCGATTTTTACTATAAGCTATTT
CATAAATTTCGCTCACTTTATCTTGAAGTAGATAAAACTGGTCTTTAGTTATTTCCATGA
ATAGCTTCCTCAAATTTAATCATACATAAAACACATCATAACGACCACGAGTGACACCAA
CATAAAGAAGCTGTTGAGCCAATTCAGCGTCTGCATAATGAATACAAGGCGTATAGATGA
AAGCACGGTCCACAGACATACCCTGAGCTTTATGGAATGTTGATGCAGGAAGTGCTTTCA
CTTTACTAAACTGCGATTTAGCATCCCAAAAATCACTCCACGGAGCTTTTCCGCCTTTAT
TCCAATTTTTATAAGTTTCTGCCGTTTTACCTAAAAATAAGTTAAACTTATACAGCTCTT
CATCAGATGAAATTATTTTAATCTTTTCACGATAATATTCATCATCGCCGTAAGTTTCTA
CTGTTAAATCCCAATGACGAATTAGATATTCTCCAGAAACACCACGAGCTTTAACAAATG
TTGATGTATATTCTGCTTCTATAATACGAACTAATTGTCCGTTATTAAAAATAATTTCTG
ACACAGGCTTTCCATCAATTTTATATGTTTTAATTAATGGTTCCTGCATTACAATAATTT
CACCGACAATAAAATCTTTATCAGTTTCAAAAATCTTTTTACGAATAATGCTATTTAACT
TATCAACAGATTTATTCGTAAATGCCATTACACGATTTTCAAACAAATCATCTAGTGATT
TGACGATTGAAAAATAATTTACCATAAAATCGCGTAAAGCGGTATCACCAATAAATCCAC
GTACTCCATGCCCGTCAACAATTTTATCATAAATCCACTTACCGTTGCGAACATCAGTAG
CTACATCAATAATAGGAGCATTACTGCGTTTAACTTCAGTGAGTTCACATTGATAAAAAT
CTTTGTGCGTGAAGAATGGACTGATATAAGCAGTGTTTTCTCCTGGGTCAACAGGTCTAA
TTTGCTTATTATCGCCTATTCCAATTATAGTACACCAAGGTGGAATAGTTGAAAGCAGAA
TTTTAAATAGCTTTCTATCATACATTGACACTTCGTCGCAGATTAATACCCTGCATTTAG
CTAAATCTGGTACTTCTTTTTGTTCAAAAAGAACGTTTTCTTCATATGTTACTGGGTTAA
TTTTAAGAATGCTGTGAATAGTACTTGCTTCTTTCCCAGATAGTTTTGAAAGAATCTTTT
TAGCTGCATGAGTAGGAGCTGCTAAAATAATACCAGTTTCACCTGTAGATATTAAAGCTT
CAATGATGAACTTAGTAAGAGTAGTCTTACCGGTACCAGCAGGTCCATTAATAGTTACAT
GATGTTTCTTTTCTTTAATAGCCCTCATAACAATGTTAAAGGCATTTTTCTGGCCTTCTG
TCAAATCATCAAATGTCATCGGAAAGTCCCTGCAATTGGAATACTAACAATACGCCCAGT
ATCTAAAATTCGCTGATATAATCTTCGTGTGTCTACATCAGGCTTAACATGTTTAACTTC
TATTTTATTAAACCAAAATTTACGTGGAGTCTCAACTAATCTTGGAATTCCCTTACCTAA
AGCTAGTCGATACTGCTCTTTAAGAGTGGTAAATACTTTATCAGCAATCTTCCATTCAAA
AAATATAGCAGGACGATGTTCATCAAGCGGAACTGGCGCCGTAAATCCGTCTTTGTCTCG
GTAAACTATCGCATATACATAAACCATATTATCCTCGGATAAGTTTAAAAATTGAACAAT
TTAGCGGATATCCTCTTTTCAGTTTAAGTTTATCAATAAAAGACAAGTTTTGATACCGCT
CTACACCTTGAATAATTTTATCACACATATCATACTGCATTTCTGCTTCTGACAACTTTT
TCACAATTTTCCAATCCGAGCCTTTAAGAAGAACGTTCAATTTAACAACTTCAGCGCCTT
CTGCTATACGAGAACCATCAATACGAGCTTTAAGTGCTATAATCGTTAGCTTAACGTCAG
AAGTTTGTTTTGATTTAGAAAGCTGAGAAATGTGCTCAATTCGGTTTTCACGTTTTTTCT
GTATAGCTTTAATTTGATTATAAGTCTTTTTGATTTTAGCCCATTTCTTTTCATCTAAAT
TTAGTTTATGAACTTTTTTCGCAGATGAACGACCAATTCGCAAAGCAAATAAATCACGCT
TTTCAATCAACTCTTCTAAAGTATAATCAGAACGAAATGTATTGTACTTTTTCTTTACTG
CAATAACATTCCCTTTAATGTATCCAACGTTATTATCAAAACGTTCTAATGATAATTTCT
CTCCTTCAATACGATTATCAAAAGGTTCTCCTGAGTAAGCGCAAACTTTCTGATCTAAAA
TGTTCTTAATGTAATTGAAGTCTAAGTTAAAATCTTTAGAACGTCTTTTGGCAGATGCCT
GAGTATGCTCTAGACGACGTTTAATTTTACGAATTTGATTATTAGACAGTTTCATATTTT
TCTCACATCTTACGGACGATTTAATACTTTATTACTATAACATTTTTACCTTAACTTGTA
AACAACTTTATGTAAAAATGCTTTAAAACTTTCGTGGTATAATGAATCTAAGTCCTTCCA
TTATAGATTAAATCCTTCAAAATCAAGAGTATAGATAGTGTATGTTGAATACTTTTTGTA
CTCATATCTATCTGCAATTCTAAATACACTTCCAGCTGGTATCATTACTTCTTGTTCATC
TGAAACTAATTCCATATTACGATAGCGATGGCTATCCGGAAACTTAAAACTTGGACTATA
TTCTTTACAACGTAGAGCTTTTATAGCATACTCCTGGAAATTAAATACCATAGGAGCTTT
GAATTCAAAAATAACTTGCGTATTGTATTCTAATCCAGAAGCAAAATGTAGAGCTATATT
TTTATCATATGAAGCTGATACGACTTTATCAAATGTAATAATATCAATTCCTTGATTTAA
CACCTGCTTAGTCTCAGCTGGAACACCTCTCCAAAGAGGTTTATCATTTGGTTCCAAACG
AGATTTGATTATTTCATTTAACCAAGTATGGTCATCTGGTTTGTTGGTAATACAATGAAT
TAAAAGTTCAATTTCAGATAAATTAAACCCTTCAGAAAGTAATTCTTCACGAATAGAAGC
ACGCACCGATGCATCCATTGATTTTATTTTAAAATCTTTTAGTTGCATTACTGAGTATTT
CATTCAACTACCTCAATATCATAAACTTTAAATGTTCCAAATGAATCGTGTAATTTTTCT
TTTGAAATAGAAGTTATTTTATACTTTCCAATTGGAATCATCCATTCTTGTTCATGTACA
ATCATCATTAAGTTATCAGTACGCTCTGAATCTAATCCATCAGTATCTTCATACGTATAC
TTAAACTCAGTATTAGGAGAAGAAAGTATAATATCACTGATATGGTCAGAGTAATTAAAA
GCTTTATCAGTTTTTAAGCGAAGTACTATTTCAGTGAAATATTCAGCATAAGAAAAAGAA
CACGCTGTATGCAAACTAGTAGTAAATGAATCTACCCTGTTCGTTGAAAACACTTCTCCA
ACTTGTAAATCTTTAATAAGTTCTTTTGTCGATTTTGATATACCACGATATAGCTGATAA
GGTGATTTAGTTAAATGCTTTTTAATGATTTTATTCAATTGCCGATGAAGAGCTTCATTC
TTTTTAGCTTCCATACATTGCCAAAGAACAGACTGCTCAAAATCAGTAAATTTTTCACAG
ACCTTTTTATACATATCATATTGAAAATCAACGCTTTCAGCTTTTATAGATAACTGTTCA
ACATCTGCAAGATTAATAATCATGATAGCCTCCGTATACTTCAGAAGCTATCATATCATC
GTTAGAAAGGAAAGTAAACAACTTTTTGAATTATTTTGCCCAGGGAGCCCAAGGCGGAGG
GTCAAGATGGTATGAAGCTAGTTCTTCTAGAAGAGCATCTGGGGCTTCAATTCCATAATT
CTGTAATACTATACGGTACTCTTTCTTATAATTACTAGAATCATTCTGGATATTCGTAGA
ATGATTATCTTCTAACATCTCAAATAAATCCATATTAATTCCTAGCGATAAAAACCAAAA
TGACGATTAGCTTCAATAATCTTTCTTTCTTCTTCTGACATTCTCCAGCGTAGTCCAACA
TCAAAATGAGCCCAGACCATCTTAACAAATGCATTTATATCTTTAATATCTTCAATAATG
AATGTTTTACTTTTAGAAGGTTGACTAACTAATTTAACTTTATCGTCTTCAAACAGGTCA
AAAAGACCATATTCATGAGCTCTTTTATAGCCTTTAATAGTTAAAGCTTCGGAAGAAGAA
AACGGTGAATCAGTATTCTGCAAAATATCTTCAGTATGCTTTATAATTAGAATAACATTT
TCTGGATATTTTCTTTCTTTTATATCTTTAATTAAAATATCCGGATTTTCTGCTAAAGGA
ATAATTAATGAGCATTTTTTACCAAGAGTATTTACTGATTTACCTTCTTTAGACATGAAT
TCTACTGAATAATGTTTTGCTACTTCAATCATGTGATTTCCTTTTGCCTACTAATGGACC
ATCGGGAATTTTGTTTTCCTGGATATATTTCTCATTTTCTTCCATCATTTTACTACCGAT
TTTAAGAAGCAAATCCAACGCTTCATTTGCTTTAGCCTTGGCCTCTTCTAACGTCATATC
TCTGTTCACGATTTATCCCCATAGATGTCTCTCATCAATTTAAGCGCTGAGCGTTCTAGT
TTCTTTTCTTTCTCAGCACTAATCATTGATTTCATCCATTCTTCTGATTCGTTCTGCATT
TCTTTATTTGCCTGTTCAACCCAACCGTCATCAATATACATTGAGTTTGGTCTATTGAAC
CATTCAAGAATCTTCTTGAGAGCTTTCATTTATTTTACCTAAAACAATAGTATGGACACC
GTCAAATTCATGAATTTTTAGCAAATTTGGATTTAAATTATTCCATAAAGAGGTAATAAA
ATATGATAGCGCACTTTCGTCCGTAATTATAAATTTATTTCCTTTATCTATTTTCCAATC
ATATATTGAATCATATGAATAGAAGGATAACGGTTTATTATTATAATATGCTTCAGCAAC
ATCAATATAGTTAGATTTAGTAAATGCTTGAATTGCCATAAATGGAGAATTTTTCACAGT
TTCAATAATTCCGATCTTTTTAAGTTTTATTTCAACATCTTCTGGAACTGGCATTGAAAT
AAAATCTTCTACTAGATACATGTCATTGTCATATCTTTTATCAATCATTACTGCTACTGT
AATTGGAACATCCTTGACAAACGCCATACTAATACTATTGATAGACATTTCAAACAAAAT
TGCTTCCATAATTTTCCTCAATCACAAGATGTAGATGAACAACTAGAATCACAAGAACTT
CCACATGAATCGCCCGTCCATACATGAACAGGAACATTAGTATCATATGAATCAGAACTA
GATTGTGTATTCTGTGTGTTAGATGATGTAGTAGGTACTGACCAGCGCCAAGGATTTTTA
TAATATTCTTGGGCTTCTTCATAAGTCATAGTAACTGCTTCGACTGTTCCATCTCCCATA
TAAACATACTCAACTACTGTTAAAGGAAGATAGTCATTTGAAATAGGAACTACACCTTCT
CCAGGAGTTGTAGAGAAAAAATCCGTAAAGAAACTTTTAAACCAATTAAATATAAACATT
ATAAAAAGCCTCTTTGAAATTCGACTCTTTGAAATCCACCCCAGTCAGTGTATCGCATTT
CAGCATTGAACTCGACTGAACCATCTACATGCATCATGAATGAATGCGTGACGACATTAC
AATCCCAGCTTTTCATACCCCATTTGTCAGAGATAGCTTTATCAAGAACCTTCTGGAGGT
CTTCATTTGGTTTAATCCAACGATTTAACATAGTGCTCTCCTCTATAAGATAATTCTATT
ATACCATACTCATTGTGGAAAGTAAACCGTTTAAATGAAAAAAGGACTCCCGAAAGAGTC
CTTGAATTATTAACCGCCAGTTACTTTCCACAAATCTTCGTTTGCAGCAATCCACGCAGC
ACGTTGATTTTCTTCATATACAGTAGTATATGCTGCTTTTTCTGAAGGGAATGTCTGGTA
ATGAGCGCCAGAAATTTTGTGAACGTCAGAATAAAGAGGGAAAGCTACTGAAATTTCCTT
TCCTTCAATTTTCTTATTTCCATCTAATTTCTGCTCAAATGTTTTGATATTAACATAACC
GCGAGTACTAGCCATGTAATTCTCCTTTTATTTAAATTACATGATTATTTATAATAATTC
TCACGGCTTTTAAGTCGTCGTTTAAATAAACGAGCTATTAATAACCTCGGTCTTGACGAG
CGAAATTTTCGGCATTTTTCAGGTAATAAAGTTTAAAGATTTCTTCTGCTGTAAGACCAA
GACCCTGGAACATGTTCAGAACGAAATGAAGAATATCAATCATTTCGAATTTAATTTCCA
ACTGGTCTTGCGGAGACAAATCAGTAATTAGAGTTTCACGACGTTCACCATGTTGAGCTT
TCCAAGGCTTCCATACAGCAGATGCATCTTTTTCGCCATTGCTCATACCGCCAAGAGATG
TCAGAAGTTCACGGAATTCATCGTCAATATAATCTTTCTGATTACGTAGCCAATCAACAA
CTTCACCAGCAGTAGCCAAATCATCAGGATGACGGTTATATTCAGGTTTATCTTTAGCTA
AACGAACTTGCAGAGATTTTTGCATATCAAGCATAACTTGCAGCGGGTCTTTTTCATCAC
CGAGAATATCCCAGTATTCATTTTGAGCTTTATCAGCGCCTTCGATCAGTTGACTACATT
CGTTAAAGTAAGCCATTATTTTTCCTTTCAATTCATGGGTTAGTAGATTAATTATACAAT
AAATATATAAAGCAATAAGGAGGACATATGGTACAAAAATTAATGGCACTTGTTAATGCC
ATAAAAGGTAATAAAAAACGTATAGCTTTTACTATTTCTGCTATGGTAGGAATTTTACTC
TGGAACTTTATTCTATCACCTGTTGCAATTGCACATGGTATTAATATTCCAGTAGTTACT
CTTGATACATTTGTAGATTTAGCATTTGCTTTAGTTGGGTTAATTTAAATCTTAGCATAT
TTAGATAGCCGCATTTTAGCCATCAACCCCTGGGCAATATTATTTTTCATATATTCCATA
ATTTGTTCAGGGGTTGCACCTTCCTTTCTAATCATATCATTGACATCTTTTGATTTCCAG
GGAGATTTATCCCAAAACATAACCCTTTCTCCTGCATCAACTAATTTAGTCATTCGTTTG
ATAGTGTCAGGATGACGAGGTTCATTATCTAAAACCCACACACGTCTATCTTTAAATGGA
ACAACTTCTAGGTCTAATTGACCACCCGTAATAGCTATACCATTTTCAATAAAAAGTGAA
TCTATAGGTCCTTCTAGAACATATACATCACCATCTTTAACTCGTTCGACTCCATAGATT
TTTGTTGCCTCAGGATAAGCTTTGATGGTGATATATTTTTGAGGAGCATCTTTCTTTAAT
GCACGCCCTTGAAACGACTCGGCTTTTCCATTAGCATTATAAATTGGAATAACAAGACGA
GGCTCAGGTATTTCCTTTTTATATGTTCCCGGTGCTATGCTATTAACTAATTTAGGCCAT
TCAGTTGTAAACCAAAGATATTTCCATTTATCCTTTGGAATACAACGAGCTTTTACGTAT
TTTATAATTGGATGGTCTTCCGCCAGTTTATCTAATCTAACACATGACGGAAGAGATTTA
ATTATTTTCTTCTCAGGTTGTTTAGGAAGTTCTTTAGGTTTTTCTACTGAACGACTTTTA
CCTTTTTCTTTTCTTATTTCAAAGATATACTCACGATATAAATCAGGTTCAAACTCCTTT
AAATATATTCCGATTGGTGCATGATAGTTACAGTTATAACAATGAATATTTCCTTCATTA
TTATCGCCGTAATACCATCCACGGGCTTTATTTTGGTCGGTTTTTGAATCTCCACAAACA
GGGCATCTAAACCGTAATTTAAAAGTTGAACTATTATTTACTTGTGTGAATTTCGGTAAA
TGAGCTAATGCACGGTATGCAAACTCATTATCAATCCAAGGTATTGATGACATTTTTACT
CTTCTTTTTCTTTAGATTCCTCTTTTTTCTTTTTAGGAATCTGTTCAGGACCTTTATTTA
CTACAGCACCTGATGTTGTTCCAGTGGAGATATTTTCAGGATTACCGCCTGAATCTCCAG
CTACCATATCTTCTTTGATAAATTCTTTATATGTTTTCATATTAACCTCTATTCATAAAA
GCATTAAAAATTTGGTCATCAATAGATGGCGCAGTAATATTTTCTGCATCATTTAGCAAA
TCATTAATTTCATCAGATAGCATAACACATGTACCTTTATTTCCTGTAATTGTTACTGCA
CAATTACGAACGTTTTCTTTATCAAATTTTAGGTTAATATTTTCGTAGTGAAAATCCTTT
AATGCTGAATATATTTTTAAAATGAAATTGTCTTTTACTACAATAAACCCAACCTCACTA
TTAAAACGTGGTTCATGGAAACTGTAATAAACCTTTTCATCTATAAAATCGTATGAAATT
TTTTCCATTTTTAAATATGAAAATTCAGAACTATACATATTAACCTTTATTCATAAAAGC
ATTAAAAATTTGATCGTCAATAGAAACTTTTACTTTAGGCTGTTCTTCAAACGGTAATTC
ATATCCACATATTACAATTTTGTGATCGATACCAAAATACGCAGAAGCAATATGATTAAT
ATTATTTTCAGTGAAATCTAAATCAACATCAATATCTTTTTGACTAACGCTCAAAGGATA
ATTAATACGAATAATTCGATTATCTTTAACAAAGATTCCACCGACATACTCTGTGTTGCG
TTTAAAGTTTACACGTTTCCTAAATGAAAAATATTCAGGTTCTTTATGAGCCCGACTCAT
AGGACACAATGAGTAGCTAGAATAAGAGATGTCAAATCCTACACCTTCAATATGAGCCAA
CGCGTCATGATTAAACCAATTATAATCATATGCCAAATCCATTATATTGTAATATGTGAA
AGGCACCGGATTAACATCATGTGTTGTACCTTTAAAATCTGCCCAGGCAACGATTTCGTT
ATCTTTAACAATTACAAAAATTGTGCCAATAAGATATCCACGGTTATTTTCATCAGGCGT
TATATTATAACATTGTGCATCAGGAAATTTACCGTATTTAAACGGTGGATTTTTGTGCAT
ATAATAAATCATATTATTCACCTGTGATTTCGGTTACGATATTTTTGTTATTAAAGTTTT
TATCGCAATACAGAACATAATTATACTGCATTACACCACCAGACTTAAGCTGTTTTTGCA
CTTCAGCTTTCATTTCAGGACGATCGCGCTCAACGATATTCATAATATCCGCTTCAATTT
GAGTTTCAACTTCAGTCTGATCCGCAGTCATAGACCATTCACACAAATCTTTATCATAAC
CTGCCATAGCAGGCTGAGCAGCACAAGAAGCCAAAGCAAAAATTGCAGCAAAGATAAATT
TTTTCATGATAATCTCCTCAGTAGTTTATGTTTATATAGTATCTCAATTTCCAACAAAAG
TAAATAGTTATTTTAAAACTTCTGCGTAATCACATGTTACAAACTGTTTCTCTAGCTTGA
CGATTTTACGAAAGTATCTTTTGCATTGACGAATCTGCCGCTTCGTAGGACGTACAACAA
ACTTAATAAATTCCACTCGACCAAATGGAGGACTTTCTTCTGCTGGAATATCTAACACCA
ATTCCCACGTATCTGCAATAAGTGCTTTGAATTGCGTATTTTTCCTGACGTTATACGGAG
TAGGTTTAAATAAAACAATATGCATATTATCCTCGGCAATCTACTTCACATACTTTCTTG
TCATCAATGAAAGCTTTAACTAATGCTTTATTAACTTCAGCATATTGAGTAGTGGCCCAT
TGAACGTCATTTTTCATCATTGTGGTTTCTTTAGTAAACATGCTTTCATTCTTAAACCAC
CCCATAAAAACTACCTTTACCAATTCCATAACAATATCCTCATTTAACCAACAAGACTAC
TATACCATAGTCTCGTCAGCTTGTAAACTAAAATTTTAATTCATTTGCCAAAGCATCTAA
CTGAGCTCGAGTAGATTCATTTCTTTGATAGCGATTCTGTTCAGCCTGAATCTGTTGTGA
ACCTGCTACTTCACTCACTTCAGTTGGAGTAGAATCTTGTTCAATTTCTACCCATTTTTG
ATTTCCTTTTTGAACACCCATCAAAAACTTATTCCACTTATTCTTATCGCCATATCGTGA
TTTGATTTGCTTAATGAGTTGTTGTTCAGCAGCTGCTAGCTCCTCGGTTTCAATGACCGC
AAGCATAAAATCGGCTGTTGCTGGAAGACCAGCAGATTCTGCAATATCGCTCATGTTAAC
ATCGGAAGAGTCCCAAGCTTGTTTACCAACCTGCGCTGCAGTCCAAAGAACAGTTTCGGT
TTCAACAGCAAGAGCACGCAATTCCTCTGCAATAGCTTTAACAGTTGTGTAACTATTTTC
TGAATAAACTCTGATGCGACAAGATTTACAAATACCTAGATAGTCGACAATAATGATTGT
TGGAACAAAATTCTTTTTGAGCTTCAATTCATTCAAGAGAGACCTGAATGTGTTAGCATC
TGCCCCACCAGTAGGGTACTGTTTAACGATTAAACGACCGAGAGTAGATTTCTCACGCCA
TTTTTCCATTTTTCCTTTATACTCAGCGTAAGAAATATGCCCATCATCAATGTCATCAAG
AGAAACATCAAGCATATTAGCGTCAATACGCTTAGCACAGACTTCTTCTGCCATTTCCAT
GGAAATGTAAAGAACATTGTGTCCGAGCTGTAAATAATCTGCTGCTAATGAACACAATCC
TAATGACTTACCAACGTTAACGCCAGCCATTAAAACGTTCAGCGTTCCAGTCTCAGCTCC
GCCTTTAGTAATTTTGTTTAGAATTCTGAGTTTAAATGGAACCTTACGAGCTTTATTCAT
ATAAGATAGCCAACGTGCTTCGTAGTCATCCATCCAATCATGACCAACGTAACTATCAAA
TGAAATAGATAATGCCTGGCGCATGATGTCAGGAATAGCACCAACATCCGGCATTTTCTT
ATTTCGTTTTTCCGGAGGAAGCTCAGCATTAGTTTGAATTTCGATTATTTTAGACGTAGC
ATTAAACATCGCCCTTTGCTGAACATATTTTTCTGTTTCTTTTACTAACCAACTGTGGTC
TTCTGGAGAATCAGTTAGTTTTGAAATAAGTGTTTTTACACCAGAATATTCTGTTTCAGT
AAATGAACTATTTTCTAATGCAACATTTAACGCATTAATAGATGGAACGCTATGGTACTC
ATTAACATGAGATTTAATTAATTTGAATGTATTTTTAGCTGGACCACTTTCAAAATATTC
TGAATCCATATATGGCCAAACTTTTGAAAAATAAGCTTGATCAAATATGAGATGAGAAAG
AATAATTTCTACCACACTTACTCCTTAAAAGAATTTAAATTTTTTCTTTGACCTTTTATT
AAATGCATCTTGCAGTTGCATTGTAATACATTTTTCTACATGAGGAGCTAATTCAGCTTT
TCTTTCTTGGTCAAGAACAGCAAAGTCCATTACAACCTTTCCATCAACCCAATCCAGTTT
TGTTACATATACTATATGCGTAGAACCATCTTCTAGTTTAATGACAATCTCCTGGATAAC
ATTTTCCATAGCGGATTTAATTATCTTAAGAGACTCATTAAAAAGACGTTCTTTTCTTTC
TTCTTCCCCCTCCGAAGAGGGGGATTCATCGATAATTTCTAGATCTAAATCTAAATCATC
TTTATTCATTAAATTCTTCCATATCACTTAGCTGATCTAGGTCAGTTTCTAAATCAGCTG
CTGATTTACTTTTACTTTCTGGAGATTTAAATTTTTCAACCTTTGAGTTAATCAATTCAT
CAACTTCAGCTTCAACAATTTCATTACTATCAATAGCACCTAACTGATAAGCACGCTTAA
TAGCATCACGGAATGGTTGATGCTTAAATAAAGGACCCCAGAATGTAGTGCAGTTGGTAT
CTTTTGCACGCCAAGATTTTTCTTCGCGAATCATCTCGCCAGTTTCTTCGTCAAGAAATT
CACGAGCATACCAGCCATTTTTAGGTTTTACAACAAATCCTAATTCTAGAGCCATATCTA
ATAATCCAGAATAAGGATCGATACCACCGTCAAATTTAACATCAATAAAGAATTTACTTT
TTTCTTTAACGGTACGAGATTTTTCTACGTTTAGAACAAATTGATACCCCTGAAGATCAG
AACCATCTTTAATCTGGCGTTTACCGATAATGAATACGGTATCAGCCGAATACATTACGC
CTGTACCACCTGTCATCACGGTTTTACTAAACATTTCAATTGTTTCAATTGTATGGTTAA
CCGCAACACATGGAATATTTTTAATGCTAAAATAAGGAGTAACAATACGGAATAATGACT
TCAGTGATTTAGCACGAGTCATATCTGCCACAGATTTTTCATTCAAGGCATCTTCCGTTT
CTTTCTTAGAAGCCATATTACCGATTGAGTCGATGAATACTATAACCTTTTCACCACGCT
CAATAGCTTCAAGCTGATTCACCATATCAATTTTCAGCTGTTCAACTGACTGAATCGGCG
TATGAATTACTCGTTCCGGGTCAACTCCCATGGATCGCAAATAAGCTGGAGTAATACCAA
ATTCGCTATCATAGAATAGACAAACCGCGTCAGGATATTTGTTCAAATATGCCGCAACCA
TAGTCAAAGACATATTTGATTTAAAGTGTTTAGAAGGCCCTGCGAAAATAGTTAAACCAG
ACTGCATACCGCCATCAATCGCACCAGAAATAGCAATATTAAGCATTGGGATTTTTGTAC
GGATTACATCCTTTTCATTAAAGAATTTAGATGTAGTCAGTTCAGCAGTCATTTTAGAAG
TGGAAGCTTTAATCAAACGGGATTTTAAATCTGCAATAGACATTCATTTTTTCCATAGGC
ATCATTATATTTTCCTCACTGGTTAAAGATAGAGTAATTATAACACAATAAATTTAGGCA
TTAATCAACTGCTATCGGATGAATAGCATTAAACTTATGAAATGCTTCTGATTTTTCTTT
ACGCGAAACACACATGCGAAGAACCTTTAGTGGTTCATCTTCTTCACCCAACGATTTTCG
TTTTTCAATATTAGAAGTTTTCCAACGAGCTTGTTCTGGAAACTCTCTATTGATTTGCTC
AAGCGCTCTATTATGTTTAGAATTACTACGAATTGAACTGCACCCGCCAGGAGCTTGTGC
TTTTCCAGATACAACCAGATATTTGAACAAGGCCAAATGCGGATAACCTTGATTAATTAA
ATTGAGAAATGCATACATATCTTCGCATAAATCAATTTTTCCATACCCAATTTGTTCTGT
CGTAAGTTTTCCGAGGTCATACCATGTATTCGTGAATCCGTATGAATTTTCACGATAATT
ACCCCAAGATGAAGTAATTTTAAAAATTGGTAAACGAGCATGACCATGATAATACCCGCA
ATCCATGGCATCCTCAACATATTGAATCAATTCATAGAACTGTTCACGAGTCAATTGATT
AATTTTATCTACACAACGACGATCATCTCTTTTTCGCATTGAACTCATACGAATAGTAGT
ATCATCGTCAATCATCCAGATTCGTTGACCTGCATACATATCAGTAATTGCTTTACGAGT
TCCAGCAATTCCATTTACATCATCAGGAATAGTTATAATTTTAGCTCTAGACCCATAGGC
ATCATAATAAGCTTTTTCTTCGTGTTCACGTACTACAATATGTGGTTCATAATCAGTCGG
AAACATATCAAGGGCAGAAACTGCCCCTACACGTTGATAGCTTGGAATTACGAATTGAAT
CATTTCCACTCACCGTTATAATCTTTTTTCACAATATGAGTTTCGCCAGTATTCCACCAA
TGATCAACCAAGTAAAAATGACGAGAATATACATGAAGACTTCCAACATTCCATATAATA
GAACCTGCTTTATACTGACGAGTTGAATCGCCTGCATTCAAATCAGATACTAATTTATCT
AGTACGTATTTTTGCCATGCATAATCATTACGGAATCCGAAGACCACGTCATTTGAGCGC
ATGCTTACTACTGCATTGACTTTCTTATCACGAATCAGGTACTGTACTGTATTAGTACAC
ATAAAATCTGACATACCATCTTTATTGTAGTCAAATTGCATGGATGGACGAGTATAAATC
ATGATACCACGTCGAGAATCAGGATTTTGACCAAGTTCAGCTAAACACATATCATACTGG
GCATAGTTATCTTCTGACCAAATAGCCCAACCATAATTCGAGTTAATTTCGCCTTTAGAA
GATGCTACCTGCTGCCAAATCTTTGGTGTTTCACCTGGAATATCTTTAACAAACAAGCTC
TTAGATTTATACCATTCAAGTTCACGCTGAATGTATTCATCATTAAGAGCGCCAAAAATA
AACGGTTCATCTGCTACAAATGATGCGCCAATAATTTCAATAGTTTTAACACCAGTTTTA
TCAACTACGAAATCTTTTTCCTTTAATGCAGTTCCCAAATAAAAACGGATTTCTTCAACT
GTCATAGAGTCATTAATCATTTAAACCTCAATTGATGCATTCATATTTAAATTGTAACAG
TAATAAACCCCAACCTAAAATAATAGTTGGAATCATAAGAGGAACCGTTACACTATAGTA
TATACTTATTATAATCATCAAGATTAAAAGCAACACTGTTATAATTTTGCTTTTCATTCC
TTCTCTCTGATGATAATTACCTGATTTGGTTGTGCAGACTTTTTAGTTTCACCTGCAATT
GACCAAATAAATGTAATAAACCAACCAATAATTGACCAGTTAAACAGTAAAGATGTGAAA
AAGATTCCTACTGTCGATTTTGACCCACGCATCAAGGCGATAAACCATGGAAGCATGTAT
ATAATAATAGCCAACACGCCTGAAACTAAAACCATAAAAATTGAACCTGCTACTAAAGTT
TCCATGTTTTCCTCACTTAGTCAAATTTTTTACGCATGAATTATAAGAATTCACTACATA
CTCCATCGGAGCATTTTTACCAGTACGCCATTGGTAATTATTAGCCCAATTAGCCCAAAG
CTCGGCGCAGTAGTTTTCAATTTTTTCTTCGCGTGTAATTACATCAGAATTACGATATGC
TTGAGCAGATTCATCTGGACGAATAGCTTCGTCAAAATTCGCCTGCATTTGTTCTACTGT
CTGTTTTGGAGCTTCTTTATAACACTTGACATTAGGATTATAAAATTTGCTTGAACAGTT
TACAATTTTTCCTACATCAGACTGATTTACTACCGGTCCTTGAGCTACACAACCAGTAAG
ACCTAATGCAATAACCAAAATAGCGATTTTCATTTCATTCTCCAAATCCGTATCAGTTGA
TAGTTGTATAGTACCACGGAAGAACAGTCTTGTAAACAGTTTTGTGAAAAAATTTTTTAA
TGAATCCAAAAGGTCCAGAATCATCTGTTTTTCATAAGTATAGATTTATATTACTTGTGT
GAAAAAGGGACCCGGAGGTCCCTAGATTTATTCTATCAGCCAAACAGGAAGTCTAACGAA
GCTTTTTCTTCATAGTCCATACCAGCCGATTCACACATACCCGCAAGCGGTTTAACAAAC
GATTTTTGGAACAAAGTTGAGTAGTCAATCCAAGACAATACGTCAGAACGAATTTCTTTT
GGAAGTTCTGTTCCCGACGGCCAAGCAATGCACTTGTCACCAAATGGATTTCCTTCACGC
AATGGAAGAACCATTACCTTATTTCCATCCAAAATTGGAGCTACACCTAAACCGCTAACA
GCTCGACGATAAGTTAGCACACCACGAATATGGAACGGACATTTAAATCCTGGCCAACCT
TTATCATCATATTTCGCTATATCGTTCGCAGTTTTTACTTCAGCAATAACTTTATAGTCG
AGTTGACGATATTCTTTCTCGAAGTTCTTGTAGTATTCTTGGACAGACTCTTCGCCTTCC
TGAAGAATACGACGAATACTTTCTTCGAGAGCTTCTTGTACTGCTTTTGGTGTTGAACTC
TGCTGAGTTTCCATACCCATGATTTTTAGATGTGGTTCAGCAAATCGCTTATCTTCCATA
TCATAAACGTTCAGAGCATAACGTTTTTTCGCTTTCCAAAATCCACCAACACCCTTTGAA
CCAAGCGGAGGACAAGAAATAGCTTCACGGTCCATATGCATCAGATGCTCGCGGTTATTC
ATATAATCACATAACTCACGATATGCAACATCAATCATAGGTTCCATCTTTTTCTTACCG
AACTGATTCATGAATTCAACTAAATCATTTTGTTCTTTAAAGCGGTCAAGACCTACTTTT
TCAATAACTTTATCTACACAAACATATACCGAATCAGTATCACCTGCTGCGATGAAATCT
TCACCATCGGTTCCACATACTTTATTCAGATATTCATTAATTTTACGAGCAATCCACTGA
ATACCAACTTGACCAAAAATTGTGATAGCAGTAGCATTTCGCAAATCATAATAGCGGAAA
TGAATGTTACCAAGAGCACCATAAAGACTGTTAATAAGAATTTTACGGTTCAGCTGATTT
GTATTAGCAAGTGTAGCCGCTTTTTCACATTCTTCAATCAAACTATTGAGAACAGATTCA
GTATAATTCGATAGTTCATTTAAGAAATCATCACTGAACTTAACATATCGTTCAACTTCA
GGTTTAGTTGAACAAGACCCTGCGCCTTTCATAATAATCTTTTTAATAGCTTCGGCATTC
ATTTCTTCAGCGAACATTTTCTTTTTCCAATCTTTACGCTGGAAAAATACTTTAGCGATT
TCCTTTGGAATGATACCTTCTTGATGCTTATCATACATCCATCCATTCGGAGAACAAGAA
TATTCATCACTCGGTTTAGGAGCTGTTCCTGCGATATATTCATGAATTGGATGAACTTTA
AACTGACCACGAATAGTCTCAGGACTAATGTTAACCTGACGAATAATGCTCGGATACAGA
GACGTCAAGTCAAAACTCATAATATATCGACGAGCAATTGGTTTAGGTTCAAACACAAAT
GCACCTGGAAAACTCTGTTTAACGTGCGAACCTTGTTGAGGAATAACCTTGTGTTCACTT
TTCAGTGAGTTAAAAATAATAGCATCCCAAGTTTTAATAGGACTCATTACACCAGAAAAA
GGCATTTTAGCGTAATAAGACATACTTAAAACTAGATCGATAAACCCGCGAATTTTATCA
ATTGCTTGAACTGATTCTACGTCAATGATGTTATAACTGATGTATCGTTGATGATTAGTC
TCACGAAGTTTATTAATAGGACCGTCGTATGGTAATTTGCCCTTTTTGGTTTCATGTTGA
GCAACTGATTCCAAAGAGAATGACGGCAAATTAGTAAAAGCGAATTTCTTGTACAAATCT
AAATAATCAAGAATAGATACGCCATCAATAGAATAAATTTCTTTGCTACCGTACATATTT
TGAATTAGTTTAGATTTTACCCGACCGATTGGAGAGAAGCGTTTCATACTACGTTCGCCC
AGAATCATTTTAACACGATTCATGATATATGGAACGTCAAATCCCTCAATATTCCAACCA
GTAAAAATAGCAGGTCGTTTCTGTTCCCAGAGATTGATATATTCCATGAGCATATCACGC
TCATTATCGAATGGCATATAAATTACTCGGTCAAGAATTTCTTGAGGAACTTCATCGCCA
CCTTCACAGTCAAGTTTAGCAGCTAACTTTGCATCCCATTTTGATACTGAACCGTACATT
GAATTCAACAAATCAAAGACGTAAAAACGATCGTCAATTGAATCATAATGAGTGATAGCA
TCAATTTCATATTCAGCTTTCATTGGGTCAGGAAATTTATCACCAGTAACCTCAATGTCA
CAGTTAGCTACACGAACAAATTTTCGGTCATAAACAATTTCTGAACCGTATGTATCACTG
ATATAAGCGAGTTTAAAATCGTTCATACCGAGAGCTTCGAGACCGATGTCTTCCATTCGT
TTCATCCAATCTCGAGCATCTTTCATTGATGGAAATTTTTGAGGAGCGCAATTTTTACCA
TAAATGTCTTTGTATTTTGATTCTTCCTTACAGTGTCTAAACATAGTTGGAAGATATTCT
ACTTCACGAGTACGTTCCTTTCCGTTTTCATCAATATAACGTTCAACAATGTTATTTCCG
ACTGTTTCGATAGAGATATAAAATTCTTTCATAGATATTCCTTAGTTTATAGCCCGAGTT
ATTAGGCTCTTGATATATTATACTCCAAATAAGGGGCCGAAGCCCCTTGCTTAATTACCA
ATCGTATATTTAGGAACGAGTTTCCATTCATGTTTTTGTTTAAAAGAAATAACTCGGAAG
TTATTAGTTAAATCTTTCATAAAAGTTCTTTGACCAGGAACAATTTCAATCAGTCCCCAA
TCTTCTAACAGCCATGCAATCGAATCACGACGAACTTCATCTTCTTCTGTCATTTCAACT
TGGCGACCATCCATACGAAGCATTTCTTTAAAATGAACGATATAGTATAGTCCTTTTTTC
TGGAGAATATGACAGGATTGATACAGAACTTTATCTTTATTATTAGCAATTCCCATACGA
GTCAAAGTTTCTTTAACTTTCAGAAAATCTTCAGGTTTTTTAAGAGTAATTTCAATCATT
TTACCATTCCAATGCTAGTTTTTTGAGTTGTTTCTGTTCTTTTACATTCTTAGTCACTTC
TTTCAAAAAATCATCCGTGACTAAACCTTTTAGTTCTTTTAATACTAAAGGAAGTTTTCC
ATTTTTAGTAAGAATTGATTTATAGTTAATTGCATCATTTGTATTAACTTGATACCGCTT
AGCAAGTAACTTAATAATCAATACTTCGGTAGAATCTTCAACCAGTTTTGCCCATTTACC
ATATCTTTTACCCCGAGGAACAGCAGCCATCAGATAATTAAAATGGGCTTCATCACTTAA
TCCAGAACCGATTAAATTCATTGCATACACTGCCGGCATGCACTCTGGAAATTGTGATAA
TGCATTTTCAACCATGAATTTTGAATAATCTTTTTGAGCAATAGAGCATTTAGTTTTATT
ATTAATAGCTCCAATTATTTCAAAAAACTCATTTTCAGCTTTTTCTTTAAAAGAATCAGC
AGCGGATTGGACAGCTGTCCAATCTTTTGAATACCAAGCAACTTGATGCTCGTTTAATTG
AATATCATCTTCAAATAAGCTCATATCACTTCCACTGCATTTCGCATGCCAATTGAATGA
AAAGATATGCTAAATGTAACTCAGTATTAGCCGCAATTCCATGATACTGGTTATTTTCAC
CAACAATTTCATACATACGAATAATACTTTGCGGAGTTACACGTGAATAAATTTCTTCGG
CAAGTTTACCTACGAACCACGAATAATCAGCTGCATATTTTGGTGCTAAAGCTCTGAGTT
GTTTAACATCTTTATTTTTGAGAGACTCAAGAACATCATCAATAGCACCACGATCGTTAG
TAACCAGTGATAAAATACCAGCATCCAAAACACCTTTAGATGAATAACTATCGAGCTCAC
CAATAGTTTTACGAAAATCAGGAAAATTCTTTTTAACCAAAGCTGCTACAACTTTCATAT
CAGCTATAGCAATTCCTTCACGCTTGCAGATTTCAGTCAATCGACGAATCATCTGCTTCA
TCATTTCAATTTTATCTTCATCGGTTGGTTGACCGAACGTAATAACTCGGCAGCGTGACT
GAAGCGGTTTAATAATACCATCAATATTGTTAGCAGTAATAATAATACTACAGTTTGAAC
TATAAGCTTCCATAAAGGAACGAAGATGTCGCTGAGACTCTGCTAACCCTGAACGGTCAA
ATTCATCAATAACGATTACTTTTTGACGACCATCAAATGAAGCTGCGCTAGCAAAATTAG
TCAAAGGACCGCGAACGAAATCAATTTTACAATCTGACCCATTCACAAACATCATATCAG
CATTTACGTCATGACACAATGCTTTTGCTACGGTTGTTTTACCTGTTCCTGGAGAAGGAG
AATGAAGAATAATATGTGGAATCTTACCTTTACTTGTAATAGATTTAAAGGTTTCTTTAT
CAAAGGCGGGAAGAATACATTCATCGATAGTAGATGGACGATATTTCTGTTCAAGAATGT
GTTCTTTTTCATTTACAGTAATCATAATTTCCTCATTCAAGTTTTAGTGTAAATTATAAA
GGGCCGAAGCCCTTTATTAAAAGTCGTGGGTAGAATCAGCTTCAAGAGCTACTACATAAT
TCGCATGTTCACCTTCAAATTTAGCAGCGCCTTGTTTACCTTTTGCCCAGAGCAGCAGTT
TATAATTTCCTGGTTGCATTTTCATATTTGCCATATTGATAATGAAATTAAATGTATTTT
CACCATCATAATCGCCAAGAGTCAAAGAATATTTAACACGGGTCAAAGCAGAATCTTCTA
CTTTATTAAAACCGTTAATTACGATTTTACCTTCTTTTACCGTGATAGCAATTGTATCAA
TCTGCAGACCACGAGATACACGCAACAGTTGTTGAAGGTCTTCAGCTTTAATTTCAGTAA
CAACAGATGCTACCGGGAATGGAATTGGTTTATTAGGAGCAACTACTGTACTCGGATCGG
CTGCTGGCCAAAAAATTGTTGAGCGGGCATCAGCAATTTTAATATTTCCATCTTCTGACT
GTGAAATTTCTGCATCATCATTAACTAGAGACAGAATACCGAGAAAACCGTTCAAATCGT
AAATTGCTACATCAAAATCAATAACGTCAGAAATATTTGCTTCCGCATAAGTTGTACCAT
TAACTGCGCGAGTCATAATAAATTGACCGGATTTAAGCATAATACCGGAGTTAATAGTAG
CGAAATTTTTCAGCAGAGCAGTAGTATCTTTAGACAGTTTCATGTAATTTCCTTCAATTC
AAATGAGATTTAATTTTATAACTAATTTAATAAAGCAATTAACGATTAAAATCAGCTGCG
ATTGTTTCGGCAACAATTTGAGCAGCAACAATCAAACGTTCATCTGCATTGCCGCAATAT
TCATCTTCAAGGCGTTCACCACATGAAGTCATAATAAATTTAGCACCGGCGTTTAGGGAT
TCTGTAGTATGTTTGCGCATTAGTTCAATCCATTTATTACTTACTTCACGATCGATAGCT
TCATAATACGCATGACGAGCAGGTGCAGATTTAATTTTGTTCTGAATAACTTCCATTGCG
TTATCAGAAAGAGACAAAACCCATGCTCGACGAATTTTATTTTGGTTTTGTGGATTTGAT
TCAGAACGCACGTGTTTTGGCTGAATATCTTTTACATCAACAGTATAATTCACAGTAATT
TTAGTCATAATACACCTTTAGTCATAATAATCAGTAACAGTCCAAGCTTCATTTCTATTG
GACATTATTTTTGTATATTCTGCTTTAAATGCATTCCTAAGCATAGATTCAGTAACTATA
TGCTCTTCATTAGAAAAATTATTTCTCAGAATATATCGTTTTATTTCAGGAATAGTTAAT
AGATGTTGTCCAGTTGAATATTCCAATGTTTTTCCTCCATAGAGATTATACTCTAATAAA
TTAAAGCATAATCTCTTATAAATTAAATCATTACAGTAAATCGACCAACCTTCTTCATTT
GAAGATGCTGACCATATGCTTGCGGGTCATGGTCTCTATGTGAAATAACAAAAACATTAG
TATTTTTTAAACTATCTAAAATAGTTGAAATAGCTTTTACACCTTCAACGTCGGTCGCTG
AATCAAAAACTTCATCAAGAATTAGTGTGTTTATTTTAACACCTGAAACTTTTTCAGCAA
TATCACGCCAAGTAAATAAAAGAGCAATATCAATTCGTGCTTTTTCACCTTGACTGAATG
AAGCATAACTAAAATCTTCACGACCACGGGATTTAATTGTCTCATTAAATTCTTCATCTA
ATGTAAACACATAATCCGCTTCCATTATTTTAAGATAATGGTTAATCTGCTTATTAAATA
ATGGAATGTACTTTTTAATAATAGCACCTTTAATACCAGAATCTTTGAGCATATCAGTCA
AAATTCCTCGGTGGTATTTTTCCATTACTAAATTAGTTTTTGTCTTAACAATTTTATCAA
GTTCTTCTTGAAGCAGTGCTATTTCATCAGCATGGTCAATAAACTCAGAAGATGCTTTTT
CTATAGCTGCTTTAACTTTTTTAGCTTTATCTACCGTCGTGATTAGAGATTGCTTTTTAT
TGCGAATATCATTTGCCAACGACTGCTGGGTTTTAATATTATCTCGGTATTCATCAACAA
GAACTTTTAAATTATCACGATGTGTTGAAAGCTGTTCAAATGAATGCGTACATTCAGAAA
CTTTATCTTTAATTTTAGAAACAACTTTATCACCGGAACTTAATTGTGACAAACAGGTTG
GACATAATCCACCTTCGTGATACATATTAATGACTTTATTATACGAGTCAATTTTTGATT
TAATTAAAAATGCTTCTTGACCGATTTTATTAAATGCATCAGTCGGGTCTTCATCCAAAA
CAATATTAACTAATCTTTCATTAGCTTCTTCTATTTCCGATTTTAGCGTTCTAGCTTCTT
TTGCCAAATCATCATACATATTTTGCAGACGTGTAAGGTTGTCACCCGTTAATTTTTTCT
GGCGTTCAACGTTATCATTATATATTTTAATTTGTTGGATAATACTATCTTTTTTAACAT
CAAGCACTTGGTTTTGTGAATTTAATTCACGTATTAGTGCTTTATTAAGCTTATCCATTT
CAGCTAATGTTCCTACCTCGAGCAGGTCTTCCACAAGCTTTCTTCGCGCAGGGGTCGACA
AACCCATGAAAGGGGTATACCCTGCTGTACCAAGGACAACAATCTGCTTGAAACTGGCAT
ATGACATTCCGATAAGCTGTTCAAATTCTGCTTGGAAATCTTTACTGCTGGCAGATTCAT
TAAGACGTGTACCGTTAACGGTGATTTCGAAAACGTTTGGTTTTTGTCCTCTTTTGATAT
AGTACTTTTTCTCATCATATTCCATCCACAGTTCAACTAAAAGTTCTTTCTTATTTGTGC
TGTTTATTAATTGACCTTTCTTTACATCACGGAATGGCTTGCCAAAAAGCCCAAATGTGA
TGGCTTCTAACATAGTAGACTTACCACCGCCATTTCGTCCAGTAATAAGAGTTTTTTGAA
CCTTATCTAATTGAATGTCAATAGGATTTCCACCTACTGACATTATATTTTGATACCTAA
CTCGGTTTAGTTTAAAATTCTTCACAAAAGATTCCTTTTAATGTATCTTTTAGACCATTC
TATCATATCATCATAATCTAAAAAGTATTCATCAAATTCAGCCATGCAAACAACGCCTTG
TGCTGTTTTTGATGTAATATAAATTATTCCAACATATCTAGAATCTTCTTCGGTATAATC
AATGTTTGCTATGAATTCATCATTAATGTCAAATGTCGAAAACTTCACAGTATGCATCCT
TAATACAAGATACAGCCATATCTTGTAATGATTTAGGTGTGTCATTATCTAAAATGTTGA
AGTTAAAAGATACAGCCCAGTCAGTGCAGACCGTGACCTTTTTAATACAATTATCTTCAA
CCTCTAGCGGTTCAAACCAATATTCAATAATTTCTTTATGCCCAATATCATCTTTTACTT
CGCATTCAAAATGCTGACTCATCATAACATTTTTAAATTCATCAAAAGTCATTGTGTTGC
CTCTACATATAACTGATTTGCATATTGAATAAGTGCTTCGCGATCAGAATCAGTGATGTC
TGGAATTGCATTAATGTATTCTTCCATCAATGTCTGAAGAGATTGAACTTCAACTTCTTC
ACTATCATCTGACTCGACAGAGTTATCAATCTTTGACACAACTCGTAATGAATGCACAAC
TTTTTCTAGTTCAGATTCGAACTTCGTCAGATTTTTGTCTACTTCAGTTACTATAACACG
TACTGATAGATTTGTAAAATCTTTATAGTCAATTTTTCCTTTAAATGGATAATGAATTCT
ACGATGCCAGGTAGTATTGTTTGGAATAAATTCCATTCGTTCTGTTTCTGTATCAAACAC
CCAGAACCCACGAGGGTCATTCTCGTCACCTGCAGTTAGTGTCCATGGTGTCCCAATATA
TCTGACGTTAGCAGCCTCAGAAATAGTATGGAAGTGACCAGACCACACCTCTTTATAAGT
CTTAAGGAAATCAGGTTCAAGACCGTGAGATTTCATTCCTTTATAAAAATAAAATCCATT
CAGTTCCCAGTGACCAACACAAAAAGAAGCAGATGAAGTTTTGATATGCCCGAGAATTTC
GCCAGTATTTTCTTCACACATCCAAGGAATTAAATCAATTAAACATCCGTCAAAATCTAC
TGTAGTAGGCTTATCATATACTTTAACATTAGGATATTTAGCCAAAAGCTCAGTAGAAGC
ATTTGGATGCATTACATTTTTGTAGTGGAGATCGTGATTTCCTACAATAGTATGTAATGT
GATTCCAGCATCATCAAGCATTTGAACTATTTCACGGGCAAACTCCATAGTTTTATGCGT
GATCGCTTTTCGCACATCAAAAATATCACCGTATTGAATCCATACCGTAATTCCATTTTT
CTTAGAATATTCTATCGCTTGCTTAATTCCATCAATTTGAATACCGCGAATCCACTCATC
ATCAGCTTTAACGCCTAAATGCCAATCACCCAAGTTTAGTATTTTCATGGTGTCTTTTCC
ATCCTAATTTAGCTGCTTTTGAAACCAGTTCTTTAATTTTTCCTTTTGTCCATTCAGGAC
CAGGAGGTTCATGACATAACATTTGCTTAACTCCGTTATTATACCATTTTTTACCTTTAT
TATGTGATGAAGCTTTAAATTTATTTGACCTTCCTTTTACATAACCTTCTGGAATATAAG
GCAAAAAGGCAGATTTTCCTGTTAATGGATCATGTGAATGTATATTTCCTTTACAATTAT
GAGAACCATATAATGGATGATTTTGTCCTTTATTATCTCTTCCAAATGAACCTTCTGGAG
CAGCATATGACATATTAAAGAATAATGGATTTTTAACTGCATCATGCAATCGTTGATAAT
ATAACTCGCATTTAATAGCTTCTTCACGCGTATCAAATTCAGCTAAAATGCATGAATCAA
ATAAGTGAGGATTATCTGAAAGCTCTTTATTATAAATTTTCTTATACTTTTTAGATAAAA
CTGAACCATGATATCCAGCTAAATGTCTATCTAAAGACGTAGATCCAATATAAAAAGGAG
GAAGTTTATCTCCACTATATATTGTTAAATAAGTTATATATTTTTTCATATATCAAGAAC
CGTCATTGAAATGCAAAATAAAATTATTGAAATAAATCCATCTGGAGTACTAAAGAACCC
AATCCAACATGCTCTGGTGAATAGATAAAATGCAAGAAAAAGTATCACATATCCAAGAAA
TATCATTATATCAAACTCCGTATAAAGCTAAAGGGCCGAAGCCCTTTATTTTGTAATAAT
GTCAAACTGCTCTTTAAAGCAGAAGCTTGAATCTTGATGCTGATACAAAAATTCATAAGC
TTTTTCACGTTCGCGGTCATAAAGAGCTCGGTCAGATGACAGTTCTTTAATACGTTCAAA
TGTTGATTCCATATCATTTTCATCAAACCAAATGATACCGCTATCATGCGAGGTCAAAGG
AGTATTATCAACACGGAATTTTAAATTTTCGCCAGTAGATTTCCAAAATACTGGAATTGT
TCCACACGCGCCAAGCTCGAGATGAGTATATTCTAAAGAACGTTGTAAATATTTTTTGTC
CAACTTACTCAGCTGATAACCAAATCCGGATTTACTCATGCGTTCAAGCATTTCGCTATT
TACATAACGGTCAAGAATTTGCGTTGGCAAATTAGGAGCAATTTTAATTTGGTCTACTTG
ATGAAGACGATAATACTCGTATGGAATTCCTTTTTCTTTAATAGGAATGAACGCTGGAGA
ACGTTCCAGACCTTCCATAATAGTACTTAGTCCTGCAGGTTTAAGATGTTTTTCATGAAA
ATAAAACATCTGATAAAAACCTTTCCATGTAGTTGTACGACCAATCCAACGGTTGATATT
CATGTTAATTTCAGAAACATCTTTCCAGTATGTTGATCGAACCTTTGCAATATCCATCGG
AGGCTGAAAGTTATATACGGTCGGTGCTTCTTCAATATCATCAAACAGAGAAACTGTTTC
AGGATACCATTCTTTCATCAGAACTTTATTAAAATCGCCATTATCAGAATGACTAAAAAT
AACATCAGCTCGACGAACAGTTTCTTCTAATCCCAAATTTCGACGCAAAGAAAGAGAAGA
ATGGTCATGTTGATAAACTACAACACGAACAGAAGGTTTAATGTTATCAATAATTTTTTT
ATAGTTATTAATAGTGTCTTCTTCAACTGAAGTAGCAGGAACTGAATTGATAATTAGAAT
ATCACAATCATTTACCAGCTTAAGTGTTTTATCATATTCTTTTGCCAATAAAACCGGAAT
TGAAAATGATTTATAATCATGCGCGCAATTACGAGTAAATGATTTATCTTTAGCATAAAC
CAAAGTTACTTCATGACCATTTTTAATAAACCAATCACGTTGCTCAAGAGAAAATTTAGT
TACACCGCAACCTTCAAGACCTCGAGCCATAAAAATACATACTTTCATTTAATATCCTCA
TTGTTTTGGTTTATTTTACCAAAAATTTATAAAGCAATATAGGAGCCGAAGCTCCTATCC
GCATAATACGCCATACAAAGGCTCGTTAGAGCTTCTAAATTTTATACGCTTATATGTTAT
AGTTCCTTCTGCTTTAGCTTTATCATGAGACTCTTTAAATCGTCTCATCATTTCCTCTTT
AGAGGAACGAATTTTATTATCTATTTCACAAGTCTGGGCGTTCATCTTTCACAGCTGCCA
CCATTTTTTGACTTGATAGGAATCAACCCACACTTTCATATTAGGGTCTGCTCTTACAAT
AGGAGGATTAACTTCTTTAATTGAACTATCATGGTATTCCTTTTCAGAAATTTTCACGCA
AAGATGACCATTCAAAGATTCAGTAAATCCTGCATTAATTTTAAGACGCTTGAATTTTAC
GCGTGTAAGCATCAATCATATCCTCAATCTGCGATCTAGTAGTCTTCCAAAGAATACTAA
TGAGTTCATCGTTATATGGCTGTTTTAGAATATCCCGACTTTTCTTGATAGCATATTCGT
ATTGAGCAAAATTATTGTTTTCAGCTGCAATTTGAGCGTGTTTATAAAGACGGTTCAGTT
CGCGTTTGTTTTTAGACAATAACTTATTTGCTTTTCTTTCTGCTTCAAGACGGTTCTTTT
CTTCAATAGAAGAAATAAGCTTTTCCACTTCATCATTAATTTCGGGTTTATCAGTCATAT
TATTTCTCTAATATAAAATAAAAATCATCATCTGTTAAATGATACCGATAGTTTAATTCT
ACACCATTAGATTTAAAAGCGGTATCATACGGATTTTCTGGATCAATATCGATGTCAAGA
GCTAAAACTTCCCTGAGATACATTTTAAGTAAATAGGGAATAGCTTCAACTTCAGGTATT
TCTTCCAAGAATCCGGAGAGGTTAATCGTTAGCCTCATATAAAAAATCCAAACTAGGAGA
ATCGTCTACAACACTTTTCTTTTCAGCCCCTGGTGTTCTATAGGTTGATTCTTCGTAATG
CGTCATTTTATCGTAGATGTCTTGAATAAAAGTTTCATCTACTAACGCAACCATATCGTC
GTCACGACTGTCATAGACATTGTGAACGAAGTAACTATATTTCTTTGCAACTTCCTTACG
TTCTTTTTTAATACGTTGGACGAATGCATTAAAACAAGCTTGAGTTATATATGCATGTGG
GTTTTTATATTTCGTTTCATCAAAATTATGAAGTCCCTTAATAGAAGCTTCTATACCATC
TGCAATCATTTCTTGTTTCCAAGACTGGGTGTATCCTGAAAAGTTGAAACGTTTAGATAA
GCCTTCTGCAATAAGCATAATGGCTAATCCGATAGTATCATTCTGACGAACTACTTTATT
TGGGTCTTTATTATTTGCTAATTCTGTTTTCCAATCAATAATAGCTTGTAAAAGCTCTTT
ATTGTTTACGTAATTATATTTAGGCTTAGTTTCTGACATTTTCACCTCTTAGCTCAATTC
ATAGATCTATTATATCATAATATTTGAAGATCTATCTTAAAGCATAGAGGATATCAGTTA
TCTAAGTAAGCAGTATGCTTGGAATACTTTCTCCATCATCTTTTTAAATTCATGAATATC
TATATAATGACTAGTTAAATCAGCATGATATAAAAAGTCTAAAAACTTTTCATGTGTGCT
AATGTATTCACTTTCATTTAATTCAGAAACATGACTTTCCCAATATCCAACACCAGTCTT
ATTTGGGAAAAATGAAATTTTCATGTATTGGTCAACATAGAAAATTCCATAATTTTCAAT
AGTAATAGAAATATTAATAAATTTCATACATTCATCAACTTAGCCGCTTCAAGAGCTGCA
TCTAGTGAATCAAATTGGTCAACGTATTCAATCAATTCGCCGTAATTAGCGTATAACCAC
CATTGGCTAAATTCATACTCAAGGATGAATCCGTTTCCTTCAATTTGGGTTAAACCAATG
CCATTTGTATTTACTTCATATCCGGCAAGACGTAAATCGTTAATAAGAGCTTCGTTCATA
TTCATACCTTAGCAATTTTCAGATCAGCAAATTTTTTCTTGCGTTGATTTTTCATACGAC
GAATAGTTTTATCGGAAATTTCATGTTTTTGATAAGCTTTAGATTCTACACCAAAAGCTT
TAACATCAAATTCTGACAAGATATATTGAACCAACAATTCACGGACAGTATTGCGCCCAA
TTTTCTGATCATTCCGTTTCATCGTCTGATGAAGCTCTTTTTCCCATTTATCCAAAATTT
GAGGAGTTACAATATCGCCTTTTTCTAGCAGAGAAACTACTTTATCATATGCATAAGAAT
TGATGGCGTTTTTAATTTGAATAGTCATACATTATCCTCAATTACGTTAAAATTTTATTA
TCCAAAAAGGGCCGAAGCCCTTAGCTAAACTGTTTGGCGCCCTTCCAGCCTTCGTACATC
ATTGCAGCTGATATTAATATTGCTCCTGCGCATTTTGAATATTTGTGATTCCAAAACCAG
TTCAGAAAAACTTCGTCATCAATACCTTGGGCTATCATATTTTCAAAGAACTGACGACGA
GCTTCGGCAATTCGTTGCGATAATTTAGATTCAGGATTCATTTAAATTTTCCAGTTACCG
TTTTCATCAATAAATTTAATCCAGTCATTTACTGACCACTTGGTCGTATCGCCTTTTGGA
GCAACATTTAAAGTGTATAGTCCTTGCTTAAAAAGCATTCGTTTGATATTCATATTTTCC
TCAGCTATAACGATAACACTCGTTTGATTTACGTTTAGCAACTCGTTGAGAAATATTATA
ATCAAAATCATCGTCAATGTAAACTGATTTTTTCAACTTTCTTACTTCACCGCGTAATTG
ACGATTTAACTCATCTTTAACTTCTGAATCAATACCTTTCATTCTACGCCATTTATCTGA
GCGAAAAATGTTTTCAACCATATCTTTATGACTTACCCCATCAGGAGCTTTACGCTTTCC
GAAATAGTCATAATCACGCACTTTTAAGTCTTTACGACGATACGTTTTACCCATGGAGTT
TAATTTCCTTAGCAACTGAACTAAATACAGCACGGTCACAAATCATGTGTTTATGTAACT
TAAGTATAAGATAATAAACATCATAACCATTTACGTAAGTAACGCGAACAGCATTACCAT
TAATAAGATAATACTGTCCCTTTTTAATTTCTTTATCAATCATAACCATATCAATTCCTC
AAAGGCAATTCATGTGTTAATAATACCACGGTTTGAGCTCGTTGTAAACAACTTTGTGAA
AAATATTTTAGGGAATGACAAGAAGGGAACGATAGCTTAGAATGGTAATATACAGAATGT
GAGAAAGAAAGGCCCAGAGGGCCCGTCTTAGTCTTCTATGATATCTCTATCATATCCAAG
TGAAATGAGAGTTTCTTTGAAGTGTTTAATGTTCTTTTGTCTAGAATCATTGATGAAAAT
GACTGGATAACGAATGTTAAAAGATGTGAATCCAGCGCGTTTAGCAAGAGATACAATCAG
TGGACGATCATACTCAATCTTACCATTATTTGTAAGAACTTTATAGAAAGTAAAAGGAGC
ATTGAGCTCCTTTAGAAGTTTTGTAACTGATTGACATCCAGGACAACGACCTACTTCATC
TGGAATTCCATAGACTTCAATCTTGTTTTGTTTCACAACTATTCCTTACTGAGGGCAGCA
TTCAGCTTGTTAGTAATTTTATCCAGACGCTCATTAAACTCACTAGAAGATAAGCCCTTT
TCTGGAGAAATCAAACTAATTACGAAAAATATAGCAATAAAAGGAATAAGGAAAATAGCT
CCAACTGCCATAAACAGAAAGAATGTTACAGTTGTAAGAAAATCAGCTAAACCTTTACGA
AATTTATACATATTTTACCCTTAATTGATTAACCAAGCATTGATAAGCACTAAACTATAT
TGTGAATAAAATTCTGGACCAAAATGAAAAATCATATCATTTATAGTGTCCATAATATAA
TTCAATTTAATCATGTTTCCACACCCCATCGGTATTTGACCAAAGTCGCTGATTATCTGA
TCCTCGCCACAGCTTTTTGGTCGGAAGATTTTTCTCATACTTCCCATCAATAATAACATC
AACATATTTAAGCATTTCTAGTTGTTTAATATCTTCAAACTTATATCCTGTCCACAACCA
AATGCTTTTATTGGGATAAAGATTTTTAATAGTTTGAACCACAGAGTGAATAACATCTCG
GTTATCGGGATAGAGAGGGTCTCCCCCAGTTATAGTTAATCCTTCTATATAATCATTATT
CAAACATTCAATTAATTGTTCTAGTGTTTCACCAGTGAATGGAACGCCATTTCTAGCATT
CCATGTTGATTTATTATAACACCCTTCGCATTTATGCAAACAACCTGTAACGAAAAGAAC
GACCCTGCAACCAGGGCCATTCACAAAATCGCAAGGATAAAATCTATCATAATTCATTGG
TGTTTAACCCTATGCATGATTTCTTTATTTTTACCGAGATTAAATCCGCGTTCGTTCGGA
TTTCCCAAATAACCACATGTTCTTCTTATTGTGTTCATCTTTTTAGGATCAGTTTCTCCA
CAAATAGAACAAACAAATCCGTTTTCAGTAGGAGTCATTTCATGGGTACTTCCGCATGTA
AAACACTTATCTACTGGCATATTAACACCAAAATAATCTAAATGTTGTGCAGCATAATCC
CAGACAGCCTCAAGACCTTTTAGGTTATTTTTCATATCAGGAAGTTCAACATAAGAAATG
TGACCACCTGTCGCAATGAAATGATATGGGGCTTCGCGAGAAATCTTTTCAAACGGAGTA
ATATTTTCTTCTACTGAAACATGGAAACTGTTAGTGTACCATCCTTTATCGGTAACATCT
TTTACACTTCCATATTTTTCTGTATCAAGTTTACAGAAGCGATAACAAAGGTTTTCAGCA
GGAGTCGAATACAAACTAAAAGCAAACCCAGTTCTTTCAGCCCACTGTTTAAGACGAGCA
TTCATTTTAGTTAAAATTTCTTGTCCAATATCACGACCGACAAGAATATTCAATTCATGA
ATACCAATGTATCCTAAAGACACTGAACTTCTACCGTTTTTAAATAACTCAATTATGTCG
TCATCAGGTTTAAGACGAACCCCGAATGCACCTTCTTGGTAAAGAATAGGAGCAACAGTC
GCTTTAACTCCTTTTAAGGAACTAATTCTACACATCAAAGCTTCAAAACATAAATCCATT
CGCTCATTGAACAATTCAGTAAATTTCTGTTCATTGAACTGTGTTCCAATATAAGAATCC
AACGCAATACGAGGAAGATTCAGTGTTACAACACCAAGATTATTACGTCCATCAAGAATT
TCATTACCAGTCGAATCTTTCCATACACTCAAGAAACTACGGCATCCCATCGGAGAAACT
GGAACTGAAGAACCAGTAATAGCTTTATTATTCTTAACCGAAATAATGTCAGGATACATT
CTTTTGCTTGCACATTCTAACGCAAGTTGTTTAATATCATAGTTCGGATCATCTTTATAA
AGATTAACACCTTCTTCAACGAACATAACAAGTTTAGGGAAAATAGGAGTTATCCCGTCA
CGACCAAGACCTTTAATACGATTTTTCAGAATTGCTTTCTGAATCATTCGTTCAGTCCAG
TCAGTTCCCGTACCAAATGTAATTGTTACAAAAGGTGTTTGTCCGTTTGAACTAAAGAGA
GTGTTTACTTCATATTCATAAGCTTGAAATGCATCGTATACGTCTTTTTCTGTTTTAGAT
TGAGCATAATTCAACGCATCGGCGATTTGCCATTTTTCTGCATCCTCAATATGTTTTGCA
TAGGTGCGTTTAACATAAGGAGAAAGTACTTTATCTACATTAGCAAAAGTCGTTCCGCCG
TATTGATGGGAAGCAACCTGTGCAGTAATTTGTGCCATAATTGCAGTAGCAACGCCAATT
GATTTAGGAGTTTCAATCTGCGCATTACCAAGCTTAAATCCGTTCTCAAGCATTCCTTTT
AAATCTACTAAACAACAATTAGTAAATGGAAGAGCAGGGGAATAATCAATATCATGGAAA
TGAATAATTCCGCTTTCATGCGCTTTCATAATAAAAGACGGGACCATATTTTTGGCAATG
TGTTTAGACACAATACCAGCCATAAGGTCCCGTTGAGTTGGAAAAACACGAGAATCTTTA
TTAGCATTCTCGTTTAAAAGGTCTTTATTAGTTTTATGAATCAATCCTTCAATTTCTTTT
TCAATTGTCATTTTAAACTCTTTCTAAGCTGCTTCTTAAATGAAGCTATTAACTGTGTTT
TGGTGTCAGATTCATTATATTCAAATCCTCTTTGAAGCATCTCGGCCATCATTTCCTCTT
TTCCTAAACGAGAAAATTCCTTTGATTTATCTCCAACAAAGTTAGGGTGAATATTATTTT
GGGTGTAATCGGATTTTAAATAAGTAAGTAAATTTTCTAACCATTCAAGATAATCAACAC
CTTGTCCCTTTAAGCCAGAACGATTAAATTTATGTTTCATTTGACCTTCTGCGGCATTGC
AGAGATTACAAAGCAATCCACGTACCTTTCCTGCTTTTGGTCCATTTAATTCATGGTCAT
GGTCGAGGTGATTAGCTTGAACATCAGGATTTAGTTCTCGTTGGCAAATTAAGCATTTAC
CGTTTTGTGCATTATAAAATTTTTGTTTTTCTTCTTTATATAATTTGCCAGTCAATAACA
TAATAAACCCTTACCTTAAATAGATAAGGGTATTTATTATTTTCAAGTATTGTAAAACAT
TTGATTCAATCGCTTATATTGCCGAATCTTTTGGTCAGAAAAAGAAATTTGGGTTTCAAG
CCATTCAATATATTCTGCCGCAGCTTGCATCAAATTTCCTTCATAGCCATCGTTATTTTC
TTGTGCAGCTAATTTAGCTAATGCGTATGAAATACGTTCACCTTGAAAATCAGCTTTAGG
CTTCTGAACAACTTGATTAGTTCTCTCTACAACTTCTTCAATTTCGCCATTTTCTACTGA
TTCAGTATTCCACAAGCACCAATACGTAATTGGCTTATCGTAGATGTTAATAATCTTTCC
ATCAGAAAGTTCAATTTCAATAATTCCAGTATCAGGCTCTATATCATCTTCACATTCTTT
TGCAAGTTCACGAACTTTAAAGACAGTACCTGCACTAAGTTCCGGCCAGTAATTACACAG
CCCTGTATCAGCACGATTAATTCTAAACCACTTATCTACTGTAATCATGCCCCATCTCCA
TATCAATTAAGTCATTTATCGTTGGTTCATTATATACTGTTTCTTCATCAGTGTAAACCG
GTTCTTCCGGCTCTGGCTCTACAGTTTCCCATCTAGCCGCCCACCAAGGTTTTATAGCGT
AATCCATTCTCGTACTGTCTGAGTTACTACACGTTCATGGGGCTCGACTAGTTCAACAGT
CGGAACTGCATAATACCAGTCAGAATGATAAGAACCTGACCGAGATTCATTTACCGCTAC
ATGTACATTATGTTTTGGACTAAAGTAAACACACTGACGATATTGGCATTTACCATCTTG
CACCCAGTCTTCTATTTCGACAGGTTTAAGATAATCCGAAAAATCGAAATCATAATTTTC
TGAAAATGCATCATGGTCTTCGATGATTTCACTCAGAACTGCATCAACATCTAATTTATT
TTCAATAGTCATTTTTTCACCAATTAATTTCGCAATTTATTAAGTTCTTCATAATCAATC
CAGGATTCTAATCCTGATGGCAAATCAGATTCAATTTCCCAAAGAAGTTCTTCAATTTTA
TGAAGACGATCTAGTTCTTCGGCTGGAATAGTAACCATTGACGGAGCTCGTGATACATTA
ATATCGTAAATCATATTTACCCCAATTTAACCATACAATCGCCGTATTTCCACTTAGAAA
TAGACTTTTCACCATTAGAATAATAAACTTCAAGTTTAGCACGATTATTTTTAATTTGAA
TAACCTTTGCTGTCATCAAAGTTCCATACCCATAATAAACTGCAACTTCATCACCTACAT
ATACCGCGCTTCCGCGGTAATCATGAATATAATCAGTTCCTTCGAGAATCATTTAAAGTA
TTCCCGCAATTGGTCAAATCCACCAATATGAATTCCATCAGGAGCAAATACCTGAGGCAT
CGTCAATCCGATTTGAGTATCACGACCTAGTTTAGTCAGAAGCTCAGCGATTTTCTCATC
ATCAAAAACACCTTTTTCCGGCATAATGTTGATAAATTCAAACGGCTGTTTCTTCACAGT
CAAAAGACGTTTTGCATTATCGCAATACACACATTTGTGGATGTTGCTATCATAACCATA
TACTTTAAACATATTATTCCTTAATTCCTAGTACTTGTTTAAAAGTCTCGTCGTAATCAA
GACTTTGACCCGTTTGTTCTTTATGTTTGTATATAATATCACTTACTTCTGATAGCATAT
TTTTATATGAACGAGTTAAAGCAGATTTAAGCACGCTGTATCTATCAGGAAATTTACCGT
GTTCATTATAATAAGCTATTGCTAATTCACGGACTGCCTTTTCAGCAGTCTCCATATATT
CTTTACGCTTGGTCATTTTTAATCCAAAATATTATTAGGCATTGGTTGAACACTCACAAG
TTCTTTAAAGAACTCAGTAGAGTCAGGCAATTTAACCATTTCCGGAGCATGCTTACTGAA
TTTATGTTTACATTGACGGCATTTATATTCAAGCTCTGGTTTACGCCAGTTAATCAATTG
AACTTGTTCAGTACCGCATTCAGGGCAATTAGGAACGTTTTTAGAAGCTCTTTCACGTCG
TTCAACCATAGCCATAATAGCGTCCCAGGCCGGCGGTTTAAAATCTAAATCGTCGCAGCC
GTGAATCTTTCCACGCATTTCCATATCATCTTCCTCACCAGCCATAATAATTTTAATTAA
ACTGGAATTACTTGAAGCTGCAATGTCTTCTAATAAACGCTTTTTCATTTCAGTACCTCA
ATAGCATCACGTAAACCATTTGCTTTTGCATTAAGAGCTTTTAACAATTTGGTGTGTTCG
GCAATCTGGGCTTCAACTTCAATCAAACGAGCATTGAGATATTCGCGTTCTTCACTCAGA
TTATCAACCTTTTCTACTTTAGGTTCTTTTACAACTGGCTTATATGTATTAGGGTTCTTC
AGTTTAATTAGAATGCGTGAACTGTACAGCATTGAACCATTATCTTCGGTTTCGTCATAC
ATTTCTACTACGTCCATCATCTCCACCATCGTGCAGAGTTTATAAGACAACGAACGAATA
ATTTTGTTGTGCTTAGTAATTTCTCTAGCTGTCATGGTGCCGAGATTACGTGAGTAATAA
TAAGGAACCTGGATATTAATTAATACTGATGAACCACCTGGCTTGTGTGTTACTTCATCA
GCAATAACCCAATCCTTAACATGAACTGTATTTGTACGGTCATCGCCCGCGGTAAATAGT
TTACGAGCATGCTTAAAAAGCATATTCACTTGGTCATTGAATTGACAAGCGAATTTATCA
GCAAATTTAGTTTCGGGAATTGTAGATAACCAATCAGCCAAATGGGTCTTTTTAACATCG
TTAACAATAGTAAATTCAACCAAATCGGTTATAGATGTCTCAGATTTAATGAAGCTCGGC
TTCATAAAGTTTTTAATGTTATCACTAGCTACAGTAGAAGATAACAGACGAGAACGTTTA
AACCATTGAAGCAAATTGCCTAACGAATGAGAATAAGCGTTTTGAGTATCTTTACAGATA
TGATTTTCCTGGCCAACATATTGAAGGAAATCACGAAGAATATTATTGATTACTGCTCTG
TGTCCTATCTGATAATTACGGTGTTTAGTAATAAGACTGTCAAAATAATCAATATAATGT
TTACGGGTTTTCATGTTCTTCTCACTTGGTTAATGATTTGTACTCCGAGCCATCCTTGGC
TTTAAATTACTTAATTAACTGTAAAGCTTGTTCAAGACGATCCAAGCGATTAACAGATTC
TTCCCAAATCCTTTTAGCCTGCTCATATTCTTTCTGCGCTTTATTAGAAATTTCTAGAAC
TTCTTTATAAGCTTTTTCTAATGCAATAACTTCTGGACGAATTTCTGCCGGTTCAGGTGA
ATCGTCAAGATTATCCATTAGTTCCTCAAGGGTAATTTCTTCTTTAGGAGTATTCACAAT
TTCATCACATTTTTGCTGGTAAATTTCTTTATCAGTCGGTGAGCACGCACACTTTACTTC
ACGAAGACTAATTACAATTTTATATCCTTCCCATCCGCATATATTCTTAAAAGGATATGT
ATGAATATTTTCTACTGTTTCCATACAAAGTAATGCAGTCTCTAACTGATGAGTTATAGT
GCTAGCAATTGAGAAAAATTTATTAATATTCTTTTGGTTAGCGTTTGGTGTAAAAAATCC
ATAATTCACAAAAATAGCTACTTTATTTTCATCAAGCTCATATTCTTTTACGATAATCAT
ATCAGAAGCCAAAGGATGAATTTGACGATAATCGCCATAACATAATTTAGAAGCTGATTT
TAGAATTTGTCCTTTGAAAAGTCTGAAATTACTAATCCAACGACGAGTAAAAATATTCTC
AGGGTCTTCTTTATTATTAAGATGATAAGAATTAACATCACCGAACCAATTATATCCTAC
TACATCTTTGGTTCGTTTAATTTCTTTCCCAAAATTACCAAGAATATCCCGATTAACCAA
ATATGAAAGAAGACGAGACTCTTTAAAAGTTTTTTTGATAACATCTTTATCTACACGGCT
AGAAATTTTACGAATTTCATGAATAAATTTAGTAGAAGAAACAATACTTGCATCAACACT
ATTGAGCCATTGATTGATAATAGAAAGAACGATATTTTGACCAAACATCGGTATAGCTTT
ATCATCAATAACTCTATTGAATGATTTGATATATTCGTTACGAGTCATATTAATCTCCTC
AGTAGAAAGTAAGAACATTATACCACATCCTTGTGGCAAAGTAAACTAGTTCAGTGCATT
TAGTGCATTGTTCAGTTTAGAACGTTGCTTTGTCAGATTTTGAACCCTTGACTGAGCTTG
TTCTAACGCCTTTTCAGCTTCTAGCACTTCATTGGTCGCTTTAACGAGTTCATCATCTAC
TGCCTTAAGAGACTTCTCAATCGCGTCAGCGTGCCATTTTTCTACAGGTTTAAAATTTGA
ATTTTCAGTAGGAAGAAAACTCACTTTATTAAGTTTACATGCATCTATATTGCTTGAGCT
ATACATCCAAAATTTAGGATCGTTTGATAAGTAATTGGATAAATTTAAATTTAAGTTATC
TTGTACTTCCTGCTTTTTCTCTTGCGTGACTTCGTCCTTTCTCAAAAAATCGTATTTAAA
TGAAACGATCATATCAAGTTCATACGTTGTTGTGTCTAACTTAAATCGTTCAAAACGAGG
TAAAATCTTAGATTGAACAGCAGCAACAACATCCATATACTTAAATGCTTCTGTCAACTG
TGATTTAAGGCATTCACAAATTGAAAGAGAATTTTTTGTATTAGGTTTAAAGCTAATTCG
TGCAGTTCTATTATTTTCTTTTAATGGTCTTACTTCCATTTGAAGAGTATAACCATCAAA
TTTCAGATTCTTTAAGTTAATATCAGAACCTTTTAATCGACTAGCAGTAGACAAAATTTG
CTTTAATTGTCTACGGAACAGAGCAATAAATCTCCATTCAATACGATAATGATTTGGATT
GAAAAATCCAGATGATAAATCGACCTTACTTTGACCAACGCCTTGAACAAATAGAGGATT
TTTATAATCAATAGTTTTACAGAAATCGGTGAGCTGCTCACGAGCAGTCATTTGTGTAAT
ATATCCCGCTTTACTAAAATGACGTAACCATTCACTGCTATTCATATACTTAAAGTGAAT
ATCACGATTAACTTTATCAGGGTCTAAATTATTTTGGCACAAAAATGTCATAACATCACG
AGTATAGCTGGCATTACGAACCATATCTTCAATTTGAGAACGAGTTTTCATGGTGTTCCT
TAAGATTTAAGTAAATCAACAATTTTAATTAATTTTTCACGCTCAGATTTAGCTTTACTA
CTCAATCCAGATAGTCTGAAAATTTCATCGTCATACTGTTGAATAGAAATATTCAGCTCT
TCAATCTGCTTATTAAAATAATCAATTTGTTCAGAATGTTTTTCGTTACTACGAACTGGT
ACAGGTTTTGTAGGCAATTTAGTTGAACTGGATTCATCCGGGCGATAAATTAAAATACAA
CTTGAACCAATAGGGCATTTTGCACCAGATGAATATTCTAATGTTCCAGCTTCTTTTAAA
ACTTCAAAAGCTAAACAGAGATGATGCCCCATATTAACATAATCTGTAGAGCGAGCTCTG
ATGTAATAATCATCTCCGCGAATACTAAATTTAAAGCATTTAAGGTCTTCTGTATTATTA
GTTTTAAAAATCATTTGTTTATCTAGACCTTTAGCTAATCGAGCGCCTAATGCTAATAAT
CGTCGTTGATTTTCCCACAAATCCGCAATCATTTGATCAAATGATAATTTCGGCATTAGT
CGACCATAAAGGTCGTATCCTTTATTATAATTACGAAGAATTTCACTCGCATTAATACGA
GACAACGCTCCAATTTTATTAAGGGCTTTCATAATGCGATTAGATAAACTCATTCCAGAT
CCGTTTGTTCGCTGCAAATGTTTTTCTAATCCAAATCCAATATCAACTTTAAATTTATCT
AAAATTTCAGCATGAACATCTCTGTCAATAACATTCAAATCCAAAGTTGTGTTAAATCTA
TGAAAAAATTTATCTGGCTCTCCACGACGAAATACAGTCCATTCATTCATCATTTTTTTA
TTAACTAAAGATTTAATTACTGCATTGACATTATTAATTACGACTGACATATTTTCCTCA
CTCAATTTCAATTTTACTAAATACGCAGAATATGATGGAAAAGACTATATAAGCACCACA
CACAGATTGAACTAATACCATTCCAAAGAACCAAACAATATTATCAAACAATGTCTGTTT
TACGTCGAAAGGACGTAAACTTACAGTAATATTATCGCCTTTTTCTATTGATGAATACAT
CTCTGGTGAAATATATTCGCTAAATCTATAACCGTCATTGAGTTCATATACAGCAATAAA
CGATAAACTAGACCCCTTTCCTTGAGTTCCTGTAAGGGTATTAACTACAGTAACATCATA
ATCTTTATAATGCATATAATCATTAATTGCGTAATAACCATATGCAATTACTATACATAA
ACAACATATCAATAAATTCATTCTTTTAATTATCAACTGTTTCATAATAATCTCAGTTAA
AAGGGCTTAGAACCATTATACCATCCTTGGTATAAAGCGGTTATGCGAGTACCGTCTTTA
ACCGTTCTTCAAACTTCCGAAGAGTATTCTGGCGTTCAGCTCTTTGCTTTTTGTAAGTTT
CAATACGCTCTGAAATGAGAGTGTATCGTTCATTTACTGATTCTTTCATAAAATCAGGAA
TTTCACGAGAAGCTTTAATCTCATCAAATTTATCAATAACAGCTTGCTCTTCAGCAATTA
AGTTATCATACATCAAAATATCTTTCTTGATGAACTCAATATCTTCTTGAGTTACACGAG
ATAATTTAGATGCTTTATCCTTTTTGTACTGTTCGTTAGTATCACGAGACCAGTGTAATG
TACGATTTTTATTCGTATTCTTGTAAATTTCTACAATACCGATCTCATCAATAATAACGA
TCCAATTCCAACGGGATTTGTAAATTTGTCCTCCATCAACAGTGATTTCACCTCCGATTG
AGATGTCATTAAAAAACTTGCTTTGTGCTTCAGATTTAAATTTACCATCGTTGTAATTTA
CCAGGTTGAAAATATCTTTAGCGTTCATTTTGTGTTCCTCCGTAGTTGATAGTTGTATAG
TACCACAGAGGAACGGTCTTGTAAACAACTAAAAGAAACTTCTTTCACAATTTTTTCCAC
TGAACCATGCGCTCACTGCTTTCTTAGTCTCAGGAGCAGTGTTATCCATAAACCATTCAA
AGGCAGCCTTTTTATGATTCTGGAGGGCTTCTCGGGCTTTAATCTGCTCACGGTCTATTA
ACACTAACATATGAGCCTTTCTTGTCACCAGGGGCTTCTTATGATTCTTGGAGTATTCCC
AGTCATTTGTCCAACGCATTGTCGTTGCGAACTGAAATACTGCTTCTTTAATTTTAGTTT
CGTAAATTTCACGAGCCTTTGAGTATAACATCATTACCTCCATTTACCAGTTTAATTCTA
GTCATCTTTTTGATGGCAGTCCATATAATCTATTTCTGAACTGCCTTTTTGTCTTACGAT
TCTTCTAAATGTCTTTTCTGAAAAGTTGATACCATACTACGATAAGGTTCATTTGGATAC
CCGTGTTTTATAGCTTCCTTTGTAAATTTTCTCCATCCGTATTTAGTTTCTTTCCAAAGC
TCGAATAATTCATCTTCATACTGCCATATAGTTAAATGAGAACGCTTTGCAGCTTTAATT
CCATTAATGTGCTTTTCTTTTACTGTAGGATTGCTTAGTGTCTTTTTAATAATATTACTA
ACTTTTCTAACAAAAGCTGGGTCCTTATATCGTTGTGAAGTTTTTATTGAAGTGTTTAAT
TTAGCTTCCGGCGTGGATGTGACCTCTTTCATCTTTTTCTTCATATGCTCTATATGATTA
GGATTTTTCCATAAATTTATAGAATGCTTTTTACATTTTATCCTAGTTTCATCTGCAACC
TTTCCTCCTTCACCCCCATATGACAGGTTAACACAGTTTTTTCCATATTTCAATTTACCT
GCCATGATATATAATATTTCGGCTTGTACCATTTTATCATAATTATCAAAAACTTCTAAA
ACCGTTTTTGATAATATATGGTCATTTGACACTTTTACACGTTCTATATAATTTCCACTA
CCAACATACGAATCATTGATGTTATTAGTTATATGTCGACCATAATAGTATTTCTTAATA
CTTGTCTTTAAATTTAATATTTCAGTTTTATAGATAGTAAAATATTTTTCATTTTAATAA
TACCGTTTCAGCAATTTCTTCCCAATGGTTTTTGTCGGTCATAATAAAGTCAGCAAGATA
AAGAGCAGTACGCAGTGAAACATTGCGTAAACGATTAACATTGACTTTCATCCATGATAA
TGCTTTATAAGTTTCTTCATCAGAAAGACCGCGCTTTTGCATCATGTCAGTTGAAAGAAT
AACATCTTCAACCCTGACCATAATTTCTTCATTAGTGTGAACACCCAAATCCAAATAAAC
TGAGCGGGACACTAATGCTTGTAAATGTGGGGCAAGTTTAGTACCACGGTCTAATTCGCG
GTCAATATCAACGTTTGTGATAAAAACAATCGTTCCTTTAAATTCAAACTCACGGTCAAT
GCCTTTTTCTTCTAAGTAAGAAGACGCAGTGCTCCAGCAGACTTTACGGGTTTCTCCAGT
GTCCAGAGCAGCTTTCAGAAGATTAAGAATGTCCATATCAGAGAAAACATCCACATCATC
AATCAAAAGGACAGAATTCTCTTCACGATTATTCCAAAGCTGCTCATAAAGACCGATACC
GGAGATTTTACCGTTAATGCTTTTATATTCAATGTATCCATTATCATTTGCTTTATTTAA
AGCTTTATCTAAAGAATACGTTTTACCAATACCCGCCGCACCAGAGATAATTAATGAACG
AATGTTTCCGTTAATAATACCATTCGTCATCATTCCCATAACATTAAATCTTTTATTAAT
GCGGGTTTTCATATCTTCATATGATTCTTTAACTTCTTCAACTTTTACACCATCATATGA
AATATCTGATTTGTAAACCCAAACACCGCGACGTTTACCGTCAATTTCAACAAAAACTTT
ACCATCTCCTTGTGCATCTACCGGAGCATTATCTGGGAACCATTCGCCTAAGAGCTCAAA
AGTTCCAGAGATTTCTTTACCGAAGTAGATACCCTTATTGATAGTTACAGTTTTCATTTT
ATTCTCCAAATCCGTATCAGTTGATAGTTGTATAGTACCATAAAGCTTTATGCTTGTAAA
CAGTTTTGTGAAAAAATTTTTGAAAATAAAAAAGGGGACCTCTAGGGCCCCCTTTGTGTT
GATTTATTCCATTTCTACTATATGCATGTTCTTTTTGCTATCAAAATATATGTTTTTAAC
TATTAACTCAGAATTAATTGGCAGTAAAAACTCTCTTTCATAATCTACCATACAAAGATT
ATCATAAAGCTTGTTAAGCTTATCATCGTCAGTTTGGCCAGATTCTTCAATTGCGATTAA
ATTTTCTAAAATGTCAATCATAGCAGTCGAATAGTCAAAAACGTTTGCATTTTTTAACAC
TACTAAAACATTAGTCATATAGCGTTCTGCAGCAAACGTTTCAGCTATATGAGACTCACT
GCTAAAGGAAGTTATTCTTTTAAATTTGATTCTCCTATTAACTTCAAACTTATAAGATAG
CACTTCCTCTATTGTAAGTCCTCTAAAAAGTATGTCTTTAATCTCAAGTTTGTCTTTAAT
GTAATCATTAACACGCTTATGATTAAAATCATTAATTTTGTTGCCAAGGCATTGCATTAA
AATATGCATTGTATTCTCCTCAATTTTTAAAGAGCAATTAATTAACTACACATATATTAT
AATATGCTTTGCGACAGAAGTAAACAACTTTGTGAAATTATTTTAAACAAAAAAAAGGGA
GCCCGAAGGCTCCCTATCATTTATAATAACTTCGGTGGTTTTCAAGATAAACCCTCTCAA
GGAAGTCATCCCAGAAACCCATGTCTACTTTTTGCTGCATACCGTTCTTAGAAGCTTCAA
TGGATGCTGCTTCTACTTGATCGACCACATCTTCCAAAAACTCTTGAACAGTTTTAAATG
GATGCTTACCCAACTTCACGTCGAGAATAAACGGAGCATCTTGGAGTGGATAGACTAAGT
CGCCAGTTTTGTAAATTTCCAATAGTTGAAGTCCACCACGACAAGCATGACTCAGAGCTT
TCCAGTCAATACCTTCATTGGCTTCGGCCTTACGAGCACGTTCACCATATTCAGCATCTA
ATTTGTTCAGTGACTGCTTAAGCTCAATAAGAGAAAGCGTTGTCTGATATTTACGACCCA
ACACAGTGTAGAACGTTTGTGGACCGGTTTTCTCATGATTATGGAATACCCATTCGCAGA
ATTCGTTCTCTGGAAGACGATGCTTAATATCTTCAACTTTAGTGCGACGCTGCTTAATAG
AACCATCTTCTTGGTAATCAACCCATTGCTCAGGGATTTGATTAACTACTTTCAATACAT
CGCGTAATGCAGCCAAACGAGAACCCTTGACACCGTATTTAGAAGCTTGCTTGCGGACAT
ATCCTAAATATGATTTCATGTTAGTCGTATAAAAACGAGAACGGTTGTCTTGAATAAACT
TCCACACATCAGGCAAATCAGATTTAACCACTAGTTCAGGTGGAGTGTGAAGCATATCCA
ATGCTACAGTTTCACCATCTGCTGCTAATTTAAAGAAATACTTAAGACTGTATAATTCAT
GGTCAATATCATCTTTAGTGTTTTTAGATGATGTATTGTTAGTGTTTTTACTCATATGCT
CTTTAACATTTCCGATAAGAATATCACGAGCAGGAGGAACAAAGATTTCTTTAAAATCTA
CATCAGATTCTGGGGTAGAAGTTCCATAAAGATGACTACCAAAATAGCTTTTCATTACTG
TTTTCATCATTCAGCCTTATATTCAATAACAGGACATACTTTAGCTTTACGAGCTTTTAA
AAATTCAACGATAATCGATTTCTTGGGTTGAATAGGAGGTAAACCTTTATACGCTCTATC
AATATTTTCTACGTGTAAAGCATAATCCTTTTTCCATTTATAATCTTTATATTTTTCACG
CAAATGTGCAGGAATAACAAATGAACCGATAATAAGTAAAACAACCAAAAGCGCAAGTAT
AAATGCTGATGGAAGAAGAGTCCATAAACTACCGAAAATAAGCCAACGTTGTAAACTTTC
TGTACAAATAATTGTTAACCCTACGAGTATAGCACACCCAAAAATAGAAACGAAAAATGT
AGGAATGGCAATAGACCAAAAATATGCGCATAGTGTCTTAGGTCGTTGCCATTCATCGTT
AAACAATTTGAATAATTTATAGTGCCAAGAGTTTTCATTAATAATCATAATTATCCTTTC
ATTGAAGGCGTAACGGTTGTTAAATACTTAATCATAGCTTCAGCTTCTGATTTTGATAAT
GAAATTTCTCCATTGTTTTGACGAATAGAAATAAAATCCGGATGACGGTCACCACCAGCT
TTTAAAACACACATATAAGTATCAGTTTCATCTTCAATATTTGAAATGATTGAAGCAGTT
CCACATGAATGTGGTTTTTGATAAATTAATGCAGCTTTTCTTCCGCCATTTGACTGTTCA
TAAACTTTTAATACATCAAGCAAATCAGTTCTTTTATCAATAGCTAAAATGTTGTTTTCA
TCTTCAATGTTAAATCCTTCGGATACTTCATAAAGCGTTACCCATAAATCACCTATATCG
ATAGTAGCATTTTCCTTTCCATGACTTTCAAGAGCATGACAAATTTTCTTGATTTCATCA
TAACTCATTTTAATAATATCATCTCCTTGAATAAGGAAGATGTCATTTTTAAATTCAACA
CGAATTAAACCACTTCCACTTGAAATAAACATATTTCCTCACTTTGAAATCATAGTTGGA
ATGACAGAATCAAGATAAGTCTTTAGCGCAATAGCTTCGTCTTTTGTAAATGTGACAATA
TGTGATCGAAAATCGTCAATTTGGCGAATAGTTAAGACATCTCCATCTTCATAGCATTTT
GATACGTTTAAAACAGTTTCATCATTCTGATTGCAAGCGTTAGTAATAATAGCATTGCAA
TTTTTAAGCCATTTTAAACTGTGTTTTCTTTCATTAGAATCATAAAAATATTTAATGTAA
GTTATAAAATTATCCCAATTATTAATTGATAAGCACATTGACTCACTTTTAATATTAAAT
CCTGGGCATGAAGAATAAAAATGAATTTTGTGCTCATCATTGATGCTTACTATTTTATCA
GTATAAGGATATTCAATTTGGGTTAAATGAATGATTTCACTAGGCGTAAAATATAGCATA
TCGTCTTCTTGCGTCAAACGATACATGTTATTTACTTTTTCTATAGCCAATTCACCAAAA
AGCGGACTAACTTCTAATACTAATCGTTTCATATTAATCCTTTTTATTTGCGCTGATTTG
TTCTAAAATTTTAGAGTATTCCTTTGTATCAGATTTACGTACAATCGATACACTATACGG
CATACTATCGGTGTCTTTTATAAAGCGTTCCAAATGACACTCTAATAAAATTTCTGGATT
ATAAATCGTGTACATCAAATTACCTGTTGCTCCACGATATTGACAGATTTCTACTGATTG
AACATCATTCCATAATTTTGTTAAGATCAAATCACCTACTTCTAATTTAGGAAAGCCCAT
GTTATTCACCAATTAAAGTTTCAATATAAGAATCAAGATTTACTTTAGCTTCTTCCATAA
GAGTTTTGTATTTAATCTTGTTGGCATGTCCGGAGAAAGCTGATTCATCAATAATTGTTG
ATGTATGAACAGCTTTACTATACGTCTCAATTAATTCTCTTAATTTAAAAGCCTGCTCAC
TTGTCATTACATACTCCTTTGAATAATATCAATAATGTTGTTCACCAGATTATAAGTAAA
CATTGGGTAATTATATTGAATCATCACATACACAACAAACAAAACTTTCATTCTCTTCTC
CTTGACAGTTGACAAGATTACTATACCATAACCTTGCCAACTTGTAAACTGTTAAATGAC
GTTTTCAATAAAATTCTGGAGTTTTGTGTGAGCATCAACCATGATTTTCATTTCTTCCTT
TGCGAAAGCTATGCCTCTTTCCCGAGAAGAACACTCATAGTCAGAAACTGCATTAGCATA
TTCTTCAATTAATTTCATTAAAAACATCTGCTTTTCAGTTTTCATTATTCCACCTAATCA
TTTCAAGATATTGAACTAACTTAGCTTTAGATTTATCCAAATCCTTTTTAGCTGCTTCTA
TACCGTCGTATGAATATCCTTCACAATGCTCAACTGCTAATTGATATGAATCTATTTCAA
TATCACGTGCTAATTTAATGATTTTTTCAAACTGTTCGCGTGTTAGCATAATTAAACTCT
CGTATTATGATCGATAATTTCATCAAGAAACATATCTAACGCTTCTAAAGCATTATCCAC
TTTAGTTTCAAAGTCTTTAATGCCTTTATTCGAAATACCCGATGAATACCAAGCAAAGTC
AATCAGCTCTTCATCTGCTTTACGAATTAAAGCTACTAATTCCTTAATTTTATCCGCTTG
TTCGATACTAATCATTATTCCACCACATATGAAAGAGAGAATATTGCACACGCCAAGTGA
GTTGCAACTTCATCACACATATTATAACGTTTCTTAAGAAGTTCTACAAGTTCTTCACTA
GTAACTTCATCCATGTCGACGAAAAAATCACCATTAATGATGACGTAGATATTTCCTTCT
TGATTAAGTGCTTCAATTTTCATGATGTTCTCCTCTTTATCCGATGGTTGTATAGTACCA
CGGCTCAAACGAAAAGTAAACCGGTAAAATGAAAAAAGTCTCCCGAAGGAGACTATTGTT
ATTCGAGGGAAAGAAGATACTTACTCTGGTAAAACATTCCAGTAATATCATCTATCGTGC
TTTGAATGGCTGGAGGCATTTCTTTATAAATGCTGTTAGATTGGTCTAGTATGCGATCAA
TCATTTTAACTGTATCAGTAGGAAGTTTACTAGCATCTGGAATTGAAGGTGTGTATTTTC
TACCAGAATACCCCAAATATTGCTCACCAAATTTATCAATCAAATCTGGCAACTCAGAGA
AAATAAAATCGTATGCTTTGTGTCTAGCATAACTTTTAGTTTCAAAATGTGCAGAATGAA
AATAAGCTTGTGCAGCCATTAATAAACCTAAGTATTCATCTGCCTTTGAAGGTTTTCCAC
TTTGTGAAAAGTCGCTGAATTTCATTCAGTCTCCAATTTAATGTTCATAATTCTAGCGTA
TGATTGTGCCATCTCCGCGCCTCGTTCTATACATTCAAAATCAGAAGAGCACGGGTCATT
TTTATAGGTCGTTCTCATAAAACTATAGAATTGTTCAGACGATTCTACGCTTTTATTTTC
AAAAAGTGTATAAACGTGCCTAATACCAGATTCCATAAATTTATCAAAATGAGGATCGAC
ATTCGCTTCAATCGATGGAGATAAAGCAAATGACAATCCTAGCATGGCAAATAGTGCCGT
TGCTTTTAAGGCCATAAAGGCCTCCTATCATTTTTGTCCTGTATTTACTTTATGCCGATG
CACGGCCTTAACTTTATCAAGGTATTTTTCAAAATTTCGCAATCTAGTATAGTCTGCCGG
AGATTGGTTGAGTGATACTTCTCGACGCAAAGCTGAAATGATATTTCCAACTTCCCTACG
AATTTCATCTAATTGAAGCACAGTAAGATTGCGAAGTTGCTTTTCAGTTAATTGTAGCAT
ATATACCCCTTTAGTTAGATAAACCTATTTATAACTTTTGCACTAACCGAGTTTTTTAGT
TAATTCATTCCAATGTTTTCTACACAAAGAAACATAAATTTCATCACCAATACAGATTTG
ATTACCTTCTTTAACTGGTGTTCCATCTTCCATTAATCGAGCTGTCATAATAGCTTTTTT
ACCACAATGACAAACTGCCTTCAGTTCAATAAGTTTATCTGCAATCGCTAAAAGTTCTTT
AGAACCTTCAAATAATTTTCCAGCGAAATCAGTCCTTAGTCCATAAGCCATAACAGGAAC
ATTATATGTATCGACAATTCGGCTTAATTGATGTACCTGTTCAGTTTTTAAAAACTGAGC
TTCATCTACAAATACGCAATGAATATCTTTTTGTGCTTCAGCCCATTTATAGAACTCAAA
AATATCCATATCATCCGTAATAATATTCGCTTCCTGTTTAATTCCAATGCGAGAAACGAC
TTCACAGACAGAATCGCGAGTATCAATAGCAGGCTTAAGAACTAATACACTCATTCCGCG
TTCTTTATAATTATGCGCAGCAGTCAAAAGAGAAGCAGATTTTCCAGCATTCATTGCTGC
ATAAGTAAAAATTAAACTCGCCATATCACCTTCTTAAAGCGTATTCACATAAGCTATTAA
TTCGTTTTCTTTCTTATCAAACCGATCAGCAAATTCTTCCTGCTGTTCGGGAGATAGCGG
GCCGTATTCATCATAAAAGGTGTTTGCTTCTATATGCTCATCTAGAAGTTCATGAATAAG
CTCAAATAATCTACTTTTCTGACTAATGCTTAGACTCATAACCATTGCACCTTTAAACAA
TATTCTTCTACATGCTGTTTACGTTTATTTTTATCTATAAAAGTATATTCAACATATTCG
CCGATATACCATTTATCGGTGTTGTGTTGACTTTTTATAGGGCATTTAGTTACTCGTGTT
TCGGTCCAGTGTCGAATAATTTCTGCTTTGTTTTTAGGATCAAACGGATGCGGGTAATGT
GCTTTCATAATCCACCACTATTAAATCAATATCAGGAGTAAACATGTCGATTAATTTAGA
AACCTTATCCCAATCACCGCCAGCAATACCACAACCTATGCGTGGAATGTAAATTACTGG
TTTAAACAAAAGGGTTTCTGCCTGTAGATTTAATTCTATCATGCAGTTTACTAAAGCACC
ATAATCAAGATTAGGACCCGGTTCGTATTGCGTATACAGGTTATAGCATATACCAAATCC
CGTAGGACTATGTTTAAAAACAATAGACATATCGCCTAATTTATCACGAGAACCGTACTC
AGTAGTGGTTTTATCTATTTCTAAAATTTTAGGATAGGCTCTTGCTAATTGACCCGCTAC
GCCAGAGCCCATTGTGTGGAAGCAATTGCACCCGTGCGCAATAATATTACCTTGAAGAAA
TAGGGCGACAATATCGCCCTTGATATATTTTACAATCATCTAGTACTCAATCCTCGATTA
TAAGAATCTACCAAACGGTCAACCATTGAATGACAAGCGGCTTTATCTTTCTCCTCCGCA
ACTGAACATTCTAAGGTATTCCACTTTTTAGCATATCGTTTTAATAAAGTATCGTTCTTG
TATCTACTTGTTTTATCTCTTTCTCCGTCTTTATATGCATATATTAATTTCTGCGCAAAT
TCAGCTTGGCATGCTTTATTTTTCCCACAATAATCCGCGGCAGTACGGTTTACATACTCT
CTAATTTCAGTATATGATGTATCTGCTAACGCAGAAAATGAAATTAATCCTATACATAAA
ACCAAAATTTTAGTCATTTACTATTTCCAAAAGTTTATTATTTTTAAGGTAATTAGCCTT
TTCTAGGACTTCAGAAGCATATTTAGAACCAGCTTTAACATTCCATCCCGAATTATAAGA
GGATATTGCTTTTCTTATATCGCCCTTATGTATATTTAACCAATAAGAAAGTTCAATGTA
CGCCCAGGAAGCTGAATTGGATCGTTTATTCAACATTCTTTTTATTTCAGCATCGGTCAT
GTTATAACCAAGTTCCTTAACTCTTGCTCGCATAGTAGGCAAATAATTTTGGAACATTCC
ATAAGCGTGATGCTTTGGTTTAGATTTTAAATTAACTCCGCCAGAGCTTTCTTGCCATAA
AATAGCAGCCATTATATGACCTAATCCGCTCTTGTGGATATTTTTGTGTGTTTTATATTT
TCCATCCTTAGAAAACTGTTCCCCGAATTGATACGCGTAACGCATGTTATCGAGTTGGAC
ATTACTGAAAGTATGCTCGGAGCTATGTGCCATCATTGAAATGGCCAATAGACCAGCGAG
TAGTGCTTTTCTCATGCTTACCTCATTGAGTTTTAATTACTGCTTTAGAAGCCTTTCCTG
GTAAACGACGACTGTTAATAATTGCCATCCTGCATTGAAGCGACGGGTCTTTGAACTTCG
CATTAGGTTTACAAACTGTAAATCCAAGCCAAAGATTTCCATCTGTGATTTCTAAACGTC
CAGGACGATATTCAACTCCATCAATAAAATCCTCGTCAATGTCAGGACGCGGAGGCATAC
TCAGGAATTCATTAACTTCTAAAACATGGTCTTTTATTTTGTGGAATAATTCAAAAACAT
ATGTCTCATCAATCTCCCGTTGAATTGCACGATCAAGAAGATGCTGAGAATATTTTAGAT
GAAACGATGAGACTCCTGCTGCTTTTGATGCCTCACGAATCTCATTGTTAATTTGACGAA
ACTCCGACTCAAAATGACGACGAAGCTTATTTCGACGGATAAAAACTTCTGTGTTGATAG
TCATGTTATTCTCCTCTTAACTGATAGAAAAATTATACCACAGTCAAGAGGAAAAGTAAA
CAGTTATTCTTTAAATCTAATCAATTTATTCATAGACTTTGAAACTTCTGCACGAACCTC
ATGTAGATTTTTGAGCTGTTCAAGGCGCTGCGTATAGTAAGCAATTTCATCTTCTTCGAG
ACAGTCCTGTGAATCTTCTTTAAGATAACGTGCATAGTCCTGAAAAGCGTTACGGACTAC
TTCCTGGAAGTCATCAAGACTTTGAATTTTCTTAGGAGCAACAGATACACGACGAGGGGC
AGTATAATACTCATAACCAAACCCTGCGCTTAATTGAGCCATTAGTATTTTTCCTCTGGT
TGGAACACAGCACGGCAAGCCCACATACTTGCTTCTTTGAGTTTCGTTTTAGCAATAGTT
AACTGATCGAGGCTTTCGGCGTAATTCTTCGCGAGTTCATCATCTTCACAGCTATCAAAT
GCTTCCCAAAATTCATCGTATAAAGCATCAAAGATAAGTCCTAAACGAACTTCAGCGTCT
TTAATAGCATTTACTTTACCGATTTTTTCGTCGGTATGTGGCTTATAACCTTTAATATCT
TCAATCATATTTGACTTCCTCACCAGTACATAAATCATATTCAACTAAACGAATAGGTTC
ATGAATGCCATATCCCTGAACAGAAATTTCTGTCGTAGGATAAATTCCATCAATATCACC
CATATTCCAGGCTTCATTAAATTGTTGTTCGCCTGAATTACTAAACCATTCGGCGAAAGC
ATTTAGCACATCTTCAGAACCTTCAATAATTATCTTTGCCATTACAAACTCTCGGTAAAG
GTACGAGCGATAACGTCGCGCTGCTGTTCCGGAGTCAGAGAGTTAAAGCGAACTGCATAA
CCGGATACACGGATGGTCAGCTGCGGATATTTTTCCGGATGCTTAACTGCATCTTCCAGA
GTTTCACGACGCAGAACGTTAACGTTCAGGTGTTGACCACCTTCAATTTTAACTGTAGGT
TGTGTTTCAATTTCAATTTCACGGGCATGCAAACCGTAGAAAATTTCCGGGTCTACAAAA
GAGTCCTCTTTAAAGGTTTTAGAGACAATAATTCGTGCTTGAATACCATCTTCAAAATAA
ATAGTACCTTTATGTGTGCCTTCAAGAATTTGATATGCTTTCATATAAACCTCAATTAGA
AAATAAATTTATCCAAGATTGTTCTTTAATTAAAAATGGCTCAGAATCATATGCCATTAA
ACTTTGGGTGATTAGTCCTTTAAAAGGTCCATCAATAAATTCCATGGTAAAATATGGAAT
TTTATTCATTAGCCGTGCATTAGGAGCAGTGCACAAAACTCTGCATCCTTTGAATACGCC
TTTTTGTAATTTGTATTGCTTGGGATAAAATTCGCTCAAAATGTTATTATTTGCCAAAAT
TTCAAAATGATTCACCAATTTATTTTTAATAGTTTTTGGCGAAAAATAAAGATATTCGAA
AAGCTGTGTGTCTGTCATCATTGCATTCCAATCACAAAAAATTGAGGACGAACTGTTTCA
CCTGTTTCAGCATTATAGCTTCGACAACAGTGTTGTACCGTTTTAATATGGATATTGTAA
ATCTTATCCATATCAGGAGCTTTAATAGGTTCGTCAATTATGTACAAGATACGAGAAAGC
GATAACCCACGGAATTTATGACCTTCATTACCGATAAAACTACGGACAGAATCAGTAAAT
AAACGAAAACGTATATCATCATTAGAATAACGCGAAAATTCCTTTTTAATGTTATTTGCA
GAAATTTTAGCGTAAGCTGAAGTATTAGAAAGAACAATAACTGTTCCGCCATCATACAGC
CAATTAGCAGCAAAGTTAGTCACAGCAATTGATTTACCGGATTGACGTCCACCATCTATA
CGAAGTGTGCAGTACTGTTTGAGCACATCTTCCATTGGTGGAAGATAATCATTCTTACAA
ATTTCTTCTACTCTAGCATCAGAATGGTGTGTAAAAGCATTCATCAGGGATAGATAAGGA
CCAGTTAAAAATGTTCTCATTTTGTTCTCTCTAGGTTTGGGCCATTCCATGGCGCATGAA
TTGTCCATTTCTGTATTTACCCATTACCGCGCTTGGGCTCGACCTTATTACAGGTTGGCG
GGAATCCCTCAAAGAATCATGAGGTCCAGCTTGTTCCCATATTTCTTATTTGCTTATTTG
AACGATTTAACGTACTGAATAGAACCCTTACTATTCACAAAGGCAATTTTACCATTTTTA
TTATACATTGTAGCAGTACGCTGATAACCATAGGTTTGTTTACCAGATTGATAACCAACT
AATGCAAAATTATCTTCACCCATTTTATTCTGTTTAGCGCGAATGCGTTCATGACCATGT
GCCATAAGAACCTTAGCATCACCAGTTGCAATGGATCGACGAGTTTTTTCATCTTCAACT
GTATTAACAAAGTCGTCAAATGAATCAAATTTAGCGTGAGATTTATTATACAGTTTTCCA
TCTACTGCATAATTGTATCCTTGTACATCCATCTCAACTTCTGTACCATCATCTAATACA
GCAGTAATTTTTTGACCTTTTTTAAATTTCAAAAGATCAGTAAAAGATTCAGCAATAATT
TGAGAATTAATAGCTGCTTCAGTGATAAATTCTTGATATGTTTTCATGGGTTTCCTTTAA
ATGTAAATATTTTTACCGTAATACTTATACCATTGTGGTTTCATTAAAATTTTTTCATCA
AGTCGTTGTTGACTCAATTTAATAGCTGATTTGCATGGATTATAATCATTTTTCCATTCT
ACTGGAATATCGCTAATGTCAGAAACTTCAGTATCTTTTATACTGAATCCGCGTTTTAAG
CATTCCGTTATAATGTCTGATTGACGCTTTCGCAAAAATTCTAACTTATCGTAAAAGAAA
GTAACATGACCAGAACCTAAAATAAATTTAGAAGATATTTTAAAATCTTTAACGCGCTTA
CCGTTTGCCACATGCTTACGAACTATACCAAAAACACGTGGCAATTCACGATATTCTGCA
ATTAAATGCTGATCAGTAAGTTCAGATACTAAAGTCAAATTAATACGAGTCATTTTATCC
CTCCAAGTAGATGTGAATATACTATCACAATTCTAGGAGAAAGTAAACAACTTTATAGAT
TTTTATACGCGTCCCAAGTGCCAGTTCTAAACGTTGCAATGACTCGTTTTGCGCGATTAG
GTGTTTGATTATACCATCTACTTTTAGCTAAGTTAACTGCTGCTTCATCCCAGCGTTTTT
GTTGAAGCATACGTAAAGAATTAGTAAATCCTGCCACACCGGTTTCTCCCATTTGGAAAA
CCATATTAATCAATGCACAGCGACGAACAGCATCAAGAGAATCATAAACTGGTTTTAATT
TAGCATTTCTCAAAATTCCACGAACAGCAGCATCAACATCCTGATTAAAGAGTTTTTCAG
CCTCATCTTTTGTAATTACACCATTGCAATTACGCCCAATAGCTTTATCTAATTCAGATT
TAGCAACATTAAGTGATGGACTTTTTGTAAGCAAATGACCGATGCCAATAGTGTAATAGC
CTTCTGTGTCTTTATAGATTTTAAGTCTAAGACCTTCATCTATACGTAACATTTCAAATA
TATTCATAATACCTCCTAAGTATTTATAGAAGGTATTTATAAAATTAAAAGAGGTTGTTC
ATTATTCGGTAAAGTGAAGGACCCATCACATATTGCCACTGAGTGCGAGGAATAAGAGCA
AAAGCATCCATCTCTGGAATCATAACGCCATCTTTATTTTCAAAATAAGACTCACAATGG
CAATTTCTAAACATCTCATGCTCTACTGGAATCGTATAATAAAATAACTGTAGGTCTTTA
TTACTAGAATATTTAAATACACCTAGGTCTTCTAGAAGGTCTGGATTATAATTGCTAAAG
CCAGTCTCTTCTAAACATTCTCTTCGTGCTGCATCTAGCGCGCTTAAATCAGAATTTTCT
ACACGGCCCTTTGGAATATCCCAGCGATGGGCCATCATTCCAGGCTTACGAGAACCGGTA
ACCCGACCCATAAATAAATCTTTATCTTCTGTCATGAAGATAATACCAGCTGATAATGTT
TTCATTTTAATTTCCTGCAATCACTCACAAACTCTTTCATTGATTCATTTTCAATATAAG
ACATGTAGCTATTATATTCTTTTAATTGTATTTTGTAATCCTTTTTTCTTTGCCAATTTA
TTTTAAAATTATCATAATGAAAATATAACATGGTACCAAAGAATGAAAATAATGAAATAA
TTTTAGTATAGTGAAGTTCACTCCAAACTTCTGTTATATTTACTGTGCCGTCGATGTTTA
AAATAAGACAGTCAATTAACAATCCAAAAAGACTACCCGCAAGAGCTGCAGCCAACGCCA
CAGCAAAAATTAAAAATGACTCAGGAAGCGAATATTTGACTTTATTTAGTTTTGGCTTTT
GCATCGTGATTCCTTAACAAATTTCATAATTTCATCAAATTCATGCGCAGCAAGTTTAAG
CTGGTGTTCCTTTTTAATCTTTTTGCACTGTGCTTTCCAATCACGTACGCGTTTACGATA
ATGTCTTCCTTGATACCAGTATCCTACCCAATTTACAGGTACTAATAAAAATGGAACTAT
CATTGGAAGAATTAATGTTGACGCAAATATTATATTAGATTCAATATCAGTCATAACATC
TATAACTATTCCAACCCCCAGTAGAATTACAAATGATACAGCTATTACAGGACCTATTAA
TACATCGGTAGAAATTATCTGGCGCTTTAATTCATACTTTAAGGGTTTACTTGGAAGATG
CATTGATGGCTTTGACATATTCTCTACATTCCTTAACAAATTTTTCTAATAATAAATCGC
TTTCAAAATTGGGATTTTCTACGAATTTATCAAAAAGATCATCAACAATAGTTAAGATAT
TCTTTTTACTAAGAATACGTTTATTTTCATGCTTCGTTTCAGAATCAACTATAAGAGTAA
AGAAATATTTCTTGCCCTGAAATTTTACAGTAGTATCAATATAGAATAAATTTGACTTTT
GTAAATTACGTTTAAACCATGCGTCACTTAAACTATAAACGCCGAGATAATCATAATCGT
CGTTTAAATAACAGACCGTCCATTCAGGAGAAACAAAATCAGTAAATTCAGCATCAAAAT
CGCATGTTAATAAATGAATTGATTCAATACTGTTAATAAGTATTCCAGGACGTATTAAAG
ACTTTTTACCTCTAGAAAATCTTCCAGAAAGACTTTCATCAGTTTCATATGAAGAACCCC
AATAATAATTACGTCCTTCTGCCATACGTTTAAGAGCATTCAATAATTGGTCTGGAACAT
CAACTTGTCTTTGGAACTCTTCAAACATTGAATTGAAATCACTTTGCATTTTCATTCCTA
TTTACTCCAAGTAATAGGGGCCGAAGCCCCTTATCATTATTTCAGAGAATTAATATATTC
CTGAACATCGGCAGAGGTAGTTTCAACCCCAGAAATATTGCCATTAAAGGTTTCAACTCG
AGCAAGAGTATCTTCAATATCAACCTTAGTCAGCGCTGCAATTTCAACTACATCATCAGC
AGTACTAATTCCAAGGGCATTTGCTGCACGAGTTTCACGGATATATTCCAATTTAACCGC
AAGTTCTTGACGAGCATCATCTAACTCAACTACTTTCTTAGCGATTTCAATTCGCATTTC
AGCATAACCATCAGCTTTAGTAGTCAACTGCTCAGCTGTTCGACGATATAGTAAACCAAG
TTTAGCATGCATTGTTACATCTTGACCTTCGGAAAGAAGCTTGCGAATTTCACGCTCTTT
TGATTCGGCTTGTCGATTCTTTTCAATAACAAGTTCACGAATACGTTTTTCTTCATTAAT
AGATTTAACAGAAGCAGTTTTTAGGTCTTTAATTTTATCAAGTAATTTTGCTGCTGCAGC
AGTATACTGTTCTTCAACAGATAGATTTTTAGCCATAGCAGAACCAAGTTTAGTGCGAAT
AAACTCAACAATTTTCTTCAGTGTGTTCATAGTATTTCCTTTAGTTAATTAAGTGTTTTA
TAATCCGTGGGAGTATTATACTCTACTCCCAAGAGTTTGTAAACTTATTCTTCGTCCAAT
TCATCAATAAATTTATCGATACTACTATTAATAGACTCATCGATGATTAACAAAGCATCA
TCATCCATAATATTAATATTTTCTAAAGCATCAATATAAGCTTGATTGACTATAGACCAT
GCCCTTTGAAAATATGGGGCTTCATCATCAGGACTGAACCAACGTACACCTTCAAAGATA
CGTTTGGCGTAATCTAACACCCATTGTACAGGCATGTTTTGAGAACGTTCGTTAAACTCT
TTAAAATCCTTAGATTCAAAAAGCTCTTCAGGATAATTATTTCTATTACAAAAAGCTTTG
CTAAAGTTGCGTTTCATAATGTTCTCCTCAAAGTTATAGGCTCATAATATCTCAATCATG
AGCCTGTGTAAACTTATTTCATATTATTGAAATATTCTTCTGCGATTTCGTCGTTATCAT
GGTAAACTTTAGAAGACAGTTTAACATAACCTTCTGCCGTGAACATATTAATCACAACCT
TTACAGTATACCACTGACCGTCTTCATTACCCATTACTGCATAGGTTTCAAACATCGGAT
GATCAGGACCGATAACTTTAATATCATTCACTGTACGACCGAAATCTTCTGAAACACATT
TCATAAAAAAGTTGAACAGTTCGCCGTAATTATCCATTTCGTTCTCCAAGTTGTTTTCTG
TATCAGTAGTTGATATTGATATAGTACCACGGAAGAACAGGGATGTAAACAGTTTTGTGA
AAAAATTTTTAAAAAGTTTTGGGGAATTCTAGGGCAGGGAGAGGAAATTAAAAGGTAGGA
TAATATATTATAAAGGGTAGAAACTAAATGATGTCTAGAGAGGCCTGGAAAGGCCTAGAT
ACCAAAAAGCCCCAACCTTTCGGCTAGGGCTAAGAATGTTATTTGATTTGTTTAGCAGAC
CAAATGCGGTCTTTAATAATTTTTTGGATGTCTTCAACATACTCAAGAGAGTGAACATGC
GGGTTATCTTTGAAACTATAAGCACGAGCTAGCTTTTGGCCTTCAGTTTTGATTACTAAA
AGCTCTTTAAGGATAGCTTCATATTTGGAGATAATTCCTTTAACAATATTTTTCTCTTGT
GCGACTTTAGGATCTGCTTTAGGAGCAGGTTTACCTGAAGCCTTTGCAAAAGCAGCTCCA
GTAGCAACTAAACTTTTCCAAGCCATACTAACTGCATTCCCTGTAAATCCTTCGGCTTTC
ATATCACGAGCAAATTGGAATCGTGATTCATCGGAAGCATCTTTATAGGAATATTTACCC
GCGGCAATGGCAGCTTTTGCAACAGCTTGAATTTCGGTGCTAGATGCTTCATTTAACACC
GCTTCATTTAAAAATTGAGCATATGATTTCATCTTATTTCCTGTTTTAATTCGTGGTTTT
AATATACTTATTTATACTAAAAAGCCCCAACCTTTCGGTCGGGGCTAAGCCTTGCGGCAA
CCTTGTCGGGGTTCCACCTGCTAAGGCAAGTGTTTGTACGAAACGCCGGGATTCGAACCC
GGTTATTAAGCAGTTGACGCTACTCAATATTTTTAAAAGGCCATATCTCGACCATATCCG
AACGTTCCGTCAAAAACGCTACTCGGCTTACGGCAAAGATATTTCCTCGAATCGATAATT
CTGTGCGCCGTTTCTGCTGTGATGTAAGGGGATATTAACGAATCATAAAGATTTATTAAG
ACCAGTCCTTACTCAGGGAACATCAGTCCGACGACTTGCCGGTAGCGACCCGGCTTCTTG
TCTGGTCGAGGCAGTAGGGATCGAACCTACGACCCAGGACTTAGAAGGTCCTTGCTCTTC
CTTCTGAGCTATGCCTCGGATTTGGCGGACGTGATAGGATTCGAACCTATAACCAATCGC
TTAACAGGCGATCGCTCTGCCATTGAGCTACACATCCAAATTGGTGGGGAGTGATGGAGT
CGAACCACCCGAGTCGCAATGACAATGGATTTACAGTCCACACCGCTACCTCTACGGGAT
AACTCCCCTAATTAATTTGGTGGCCCTGGGTGGAATTGAACCACCATCTGGCGATTATGA
GTCGCTTGCTTGAACCTTCCAGCTACAGGGCCTTGGTGCTGATTGACGGAATCGAACCGC
CGACCTTCTCATTACAAGTGAGTTGCTCTACCTACTGAGCTAAATCAGCAAAACTGGCGG
AGGCGATAGGATTTGAACCTATGAGTCGCCGGAGCGACTGCCGGTTTTCAAGACCGGTGC
ATTCAACCACTCTGCCACGCCTCCAGTCTCCATACAAGGATTTGAACCTTGGACCTCCTG
ATCCCAAATCAGGCGCTCTACCAAACTGAGCTACACGGAGTAAATTAAATTGGAGCGGAT
AATGAGAATCGAACTCACATCATCAGATTGGAAGTCTGAGGTAATGCCATTATACGATAT
CCGCAAATTTGGTGCGAGAAGTGGGACTCGAACCCACAAGGAAATCATTCCGCAGCATTT
TAAGTGCTGTGCCTTTACCAATTTGACCATTCTCGCGCTGGGAATAAAGGACTCGAACCT
TTGCATCCTGGAATCAAAATCCAGTGCCTTACCAACTTGGCTAATTCCCAATTATTAACA
AAGGCTCTCAAACAAGAACCCTTGATGATAGAGGGTATTAATCAGTTCGGTATGAGTTAA
TAATAACAAATATTTCTTAAAGCAAATCAATCATTTTAACAGTTGGCAAAACGATTTCTT
CTTCAATATAAGCGAATTCAACACGTTCAACTACACGCAAGAAATAGTAATCATAGTATT
CAGAAGCATAACCAAGAATATTAATGAGACCTTCTGATACCAAATATCCATTCTCATGGA
ACAAGTCGAATACGCGGGCTTCGTCTTCTTCAGATTTATCACCAAGGTCAACTTCAATAT
CAAAGACCTTTTTAATGAATTCCGGGGTGAGCTGATCAGAGAACAGTCCTTCAACCAAGT
ATTCATAGATAATAGATGAGCAATCGCTGAATAGTGTATTACCACAATAATGTTCAGCTT
TGGTACTAGAATGACGACTCTTAAACTTCTTTAAGAGATATTTAAACTGTTGGAGCTCAT
GCTCTTCTACGCCAAACAGTGTTTTGGTTTTATAGTTATCACCATCATTTTCCCAGGTAG
TGACATCAATTACGTAACCCTTAGGAATTGTGCTACCTAAACGAATATACATTTGCTCAC
CATATTAATGTAAGTATATTTAATACATTCAAGACCCAAAGGATTCTTGAAAATATCATA
TTCAAGAGGACCTTTTTCCGTTTCAATAAAGAAATCAAAGTTAACTGTGTTAAATTTACG
GTCTTCCTTCACTAATTTAACTTGAGAAGATGAACGGTCAATGTAAACCTTTTCAACTTC
AAAACATGTTAAAATGCCATAATCATCGATCAAGGCTTTAGCTGCTTCTTGATCATATTT
ATATCCATTTTCAATGGACGATACTTTCGCATAAAGAATCATTATCAGCCTTCATCAACA
ATAGTATGAGTATGGGCATTTACAATTTGCCACCAATCAAAGCGATTGAAACCATACATC
GGTTTGTTTTCATTTTCTTTGATAATATCACGAAGTTCATCTTCAGTAGCGGCTTTCGCG
ATTAAATCAGCATATCCACCACGAGGATAATAATTATCACCTGCAAAAAGTAAAAAGTTT
GGTTTAATGTTATTGAACTCTTCAAGAGTAATAACTGTTCCTGATGGTAGTTGAACAATC
TCTACATATTTATATCCTAATTTTTGAGCAGCATCTACTGCTTCAAGCAAAGTATCATGA
GCCCATCCAATTTGACAATTTGGCTTTTTAGATGGATTAGCCTGATAATCCGCATACACT
TTATACATTCTATTCACCTTTAGAAATTTTATCCATAACGATAGCAATTAAACCAATTAA
AAATGCTACTACAAGTGAAAACACATTTTCTGCTGTAGTCAATAATCCGCATATAAATCC
AACAAACATTGAAAAACTAAAAGCGGAAGCAGAAATTGCAATAGCAACATTTCGAATTAA
TTCACAACGTTTCATTTTATTCTCCTCAGTAGTTGATAGGGTAATAGTATCACTACCCCA
TCTAAAAGTAAACGGTTTTATAAACTATTTTATTCCGCGTGATGCAATTGTGTTCTGCCG
TTTAACACCAGTTTGTTTAAAGTCATGATTGTCGATTTGATCGGTACGAGCAACTCCGAA
TGATGATTTGATTTTAGCTTTAGATCCTTTAGTTATAGAAATAAACATCTCGGAAGCCCC
TTTCTTAAAGTCCGAGGCGATTACTTCAACGCCGTTCTTAGCAAGTGACTTCAGAATTGC
CTCTGCATACTCATCGTCAAGACTCGTCTGAGTATTAATAACGAATGTCTTTGGCGCAGC
CGCTTCATTGATAAATTCTTTAAATGTTTTCATTTTATTTTCCTAATTAATTTTGATAGG
ATAATAGTATCACTACTAAAACCCCATGTAAACAACTTTGTGAAATTATTTTAAATCTTC
TAATCGTTTCTTCATCTTAGAACCGTTCTTAGCGATTTCGCCTGCATCAGAGCATAATGC
TAAAAGCGCTTTAACTTTAGTTTGGTCTCCTTTAAAAGATGAAGGATCGACTGCAGCAGC
AAGTTCTTTAATACGGGAGAAAAGACGCTCAGCTTCAGCTAAAGCCATTCCAAGCTTTAC
TTCCATACCATGAGAAGATTCAGTAATAGTAGTTTTTGTAGCAAACTCTTTGAAAGTTTT
CATTTTATTTTCCTAATTAATTTTGATGAGGTAATAGTATCACTACCTCATCAGTATGTA
AACAACTTTATGAAATTATTTTAAATCATCTGCCCAATCGAGTTTAAGAGGCTCTTTGTA
TTCACGGTCAAGTACAACCGGAATTTGTACATCACCGCTAAATGATAAGGGCCCAACATT
ATAAGACAATGTTATATGCGGTGTGTAATCATCAAAATCATGTGTAGCACCTAGTGCCCG
CGCATACATGTGTCGACAGCGCAGATATTCAGAATCTAACACAAGTACAAGAGTCGATCC
ATCTTGTGTTTTCCATACTTCTAAATGTCCAGAAGAAGCTACTTCAAAACTTCCACTCGA
TGGAACATATGGAACATTTACTCTCGAATAACATATAGTCGAATGAATTTTTTCTCTAGG
AACTGGATTAGGAACACGTAAAGAGCGCTGGAGTTCTTCCAGCGCGTCAAGTGTTAATTC
TGAAAACTTAGCTGCTACATAAAGACCCGTTGAAAAGTCTTTAAATTCCATCATTCTTCA
TCTTTTGCTTCATCTGCAGATTCAGCAGTAAGATTCTTAACAGCTTCAACGATTTCTTCA
ACTTTAATGGTATCGCCAGTGATACCTACTGCACGAGCAATTTCAGCCAAAGTTCCTTGC
AGAAATTTGGATTCTTCCATCAGACGAGCCGCTTGGTCCTGCGTATCAAGAATGCGAGAT
TTCAGAGTTACGATTTCAGCAGACAGTTTTTGTTCAATAGTTTGTTCAGACATTATAGTA
CCTTTAGTGTATTTTTAATTTTAGAAAAAAGTTCTTCAAGAGAACCATCGTTTGTAATTA
CTAAATCGCCACCACGAATTGGCAATCCAGCTTCTGTAATGTGTGTATCATTGGATTTTT
GACCAGGACGAACTACATGAATTACTGTAGCACCCATCGCCCTAGCCGCATCCATTTCAT
GATCTTGACGAGTATCAGGAACGATATAATAATCATAACCCGAGTTAAATTTATCAAGAT
AATCTAAAGCAAATAATTTTACCCAGTACATGCGGTCGAAGTTATTAACAATCAAATCCG
TACCTAGGGCTTGCATCAGACGACGGACTGACCATTGATCTTCAATATTATTTATAACGT
CAGTAATTTTGTTAAATGCTACGAAATTAACTGATTCTTTTCCTTCGTCATCAAAAACAA
ACACACCTTTAATTGGGCTTTTACCATTAAGATAGCAAAATGCTTGTTCCATAATCGCGA
TTACTTCTGATTTAGTCAGATTTAAATTAGTCTCACGATCATAGTCAATTCCTTCAAACT
CTTTACGAGTTAAGCAAGGATAGTCAGTGTTTGCTGCAAATACTCCCCATGCATAAGCCA
ATGCATCCTTAATAGGACCAGCAAGTTGGTATTTAACTGCAGAATAATTGCTCATGATAA
AATCAGCAGTAGTATCTTTTCCACTACGCTTTACACCGCTTAAAAAGATTAGTTTCATGT
GTTTCTCCTCAAATTTAATTAAGATTATAACACACAAAACTGAAGCATTAAACTTCTGCT
ATAATTTTTCCATCTTTTTCTACTTGAAAATAGGTGTAAGGAATCGTTGCAGTACATACT
AAAGCCGGGTCTGAATCTTCCGTATAGCTAAATTCTACTTCAGACAGGTCAGAAACCCAA
GGCTTATAAAAATTTATTGACATCACGATTTCAGTTTTGCTATTATCTAAGATGTAAAGC
GTAATGTACTCAGGACCTGTTTTTTGGGCAGTATTTTCACCTGTAAGATAGTTGCTAGTT
CCTAGCATCCATTCATACATTCCTATCCACGACTTAAGTTCTTCATCAACTATAAATCTC
ACAATGAGTGGGTCATACTCGAATGTAACACCTGGACGTTGTGCTCGGCCCAGTCCAAAC
GGCCCAGTCACGGTATCAGTAACAGGTATTCTAATTCCTGGAATAGGAACTGACTGAGCA
TTTAAAGTAAAAGCAGATGTAGTATTACTATGCGGTATTGATACTACAAAGTTAGTTGTA
TTTGCTTGGTTAAAAATTTGTTGCAGAGCTTGCGACATATATTCCTCATAATGCTTTATA
ACTGTTGGTGGTATAATGGGTCTAAGTCCCTTCCATTCAATTCCATTTAGAACAAACAAC
AGAAAAGAATGGAAGATAATAGAATTAGATATTTGACCAGACTTTGTTTGCAGAGAAACG
TTTTCCTTTTGAAACGAACTGCTGAAGTGGCATCAACACAACGTTCGCCCAGTCTTTCGG
GGCGATTTCAACAAGGCTACCCATAATATTACCAGGTATATACGCCTTAATCATTTGGTC
TGCACCCCTAAATCCTTTCACTTGACTCCAATCAATTTTTAATTTCGTTTTATTAGTAAT
AGTAGGTGTATTTGCATATTGCTTTAAAAGCTCTTCTAGAAATTGCTGACGAGCTTTAGG
TGGAATATAGTGCAAGTTTAATCCGTACATTAAATTATGCTTACCTAAACCAAGATAAAT
TATCAAAGGAAATTTATCCCAGTAAGGAAGAGTTTCCTTGTGTTTAGCATCGTAAGCAAA
AGCATATATTCGTCCCGGCTGTGGGCGAACAACTTTATGTCCTTTTACTTGCTTAATAGT
TTCAGCAAACCACTTTCTGGTTTTATTATTAATTGCTGCACCTTCATTACGAATTTTATC
GCGTAATGTTTGTCTGAATGAATTTATCATAAGCAGTTGTCTTTCTTGCTTATTGAGTTT
ATTCATTGGTTTTGATTCAAGCTTTTGAATCTTTTCAGCCGTTTTAATTCCTGAAGCATA
TTTTGACATTGCTGAAGTAAACGTAGAGTATTTGATTCCTCTTTCTTCAGCAAATTGCTT
TCCTGTCATTCCTTTTGCTTTGGCCTTTTTATATTCAAGACCTATCTGAATCCATTTCTT
TTCGTTTAATGATTGCTTAACCTTTGGAACTTGGGGAGTGCTTTCATTAATTATTTGAAA
AATAGCCATTATGCCCCCTTAAAGCCAAGAGCTCGTAATCCATCTTCTGTTAGAATTCTA
AATTTTATTCCACGCTTTTCAGCTAAAGATTGTGCTGCTTTCCATTTGTCAGTATTAACA
GAATATGTATAAATTTCATTCATAAATCTTTTCTTCGCTGCGGTTGTTAGATGTGCTGGT
TTAACTGGTGGTTGTGTTTCTTTTTTAGGTTTTATTTCAATAAAAAATTCTTGTCCAGAA
GAATCTTTCATCCAAATATCCATGAAGTATCTACGTTTTTTCCCTTCTGCATTACAAAAA
TAAGGAATTACTGCTGTTTCACTACCCCATGCAATAATTTCTGGATTTTTATCTAACCAT
TCAAAAAAGAATTTTTCCCAATTTGATCTATACGTAATTTTTTTAGGGTCACCTCTATAT
TTTGATATATTTTTAGGAACCCATTTTCCAGAATATGCCATTGGATTCTCCTTATAAATA
GATAATATATTTATAAACAGGAGGGCCCATGCTCTTTACATTTTTTGATCCGATTGAATA
TGCGGCCAAAACGGTGAATAAAAACGCGCCGACTATTCCTATGACAGATATTTTTAGAAA
CTATAAAGACTATTTTAAACGCGCTCTTGCGGGATACCGCTTACGTACTTATTATATCAA
AGGTTCACCACGCCCGGAAGAATTAGCAAATACTATATATGGAAATCCACAGTTGTATTG
GGTTTTATTGATGTGTAATGATAATTATGATCCGTATTATGGATGGATTACTTCGCAAGA
AGCTGCTTATCAAGCATCTATACAAAAATATAAAAATGTAGGTGGAGACCAAATAGTATA
TCACGTGAATGAGAATGGTGAAAAATTTTATAATTTAGTATCATACGATGATAATCCATA
TGTTTGGTATGACAAAGGCGATAAAGCTAGAAAATATCCTCAATATGAAGGAGCACTTGC
TGCTGTTAATACGTATGAAGATGCTGTTCTTGAAAATGAAAAACTTCGTCAAATAAAAAT
AATAGCAAAATCGGACATCAATTCATTTATGAACGACCTTATACGTATAATGGAGAAATC
TTATGGAAATGATAAGTAATAACCTTAATTGGTTTGTCGGTGTTGTTGAAGATAGAATGG
ACCCATTAAAATTAGGTCGTGTTCGTGTTCGTGTGGTTGGTCTGCATCCACCACAAAGAG
CACAAGGTGATGTAATGGGTATTCCAACTGAAAAATTACCATGGATGTCAGTTATTCAAC
CTATAACTTCTGCAGCTATGTCTGGAATTGGAGGTTCTGTTACTGGACCGGTAGAAGGAA
CTAGAGTTTATGGTCATTTTTTAGACAAATGGAAAACTAACGGAATTGTCCTTGGCACGT
ATGGTGGAATAGTTCGCGAAAAACCGAATAGACTTGAAGGATTTTCTGACCCAACTGGGC
AGTATCCTAGACGTTTAGGAAATGATACTAACGTATTAAACCAAGGCGGAGAAGTAGGAT
ATGATTCCTCTTCTAATATTATCCAAGATAGCAATCTAGACACCGCAATAAATCCTGATG
ATAGACCACTATCAGAGATTCCAACCGATGATAATCCAAATATGTCAATGGCTGAAATGC
TTCGCCGTGATGAAGGATTAAGACTAAAAGTTTATTGGGATACCGAAGGATATCCGACAA
TTGGTATTGGTCATCTTATCATGAAGCAGCCAGTTCGTGATATGGCTCAAATTAATAAAG
TTTTATCGAAACAAGTTGGTCGTGAAATTACTGGAAACCCCGGTTCTATTACAATGGAAG
AAGCGGTAACTTTATTTGAACGTGATTTAGCTGATATGCAACGTGACATTAAATCACATT
CTAAAGTTGGCCCAGTTTGGAAAGCAGTTAATCGTTCTCGTCAAATGGCGTTAGAAAATA
TGGCATTTCAGATGGGTGTTGGTGGTGTAGCTAAATTTAACACAATGTTAACTGCTATGT
TAGCAGGAGATTGGGAAAAAGCATATAAAGCCGGTCGTGATTCATTGTGGTATCAACAAA
CAAAAGGCCGTGCATCCCGTGTTACCATGATTATTCTTACGGGAAATTTGGAATCATACG
GTGTTGAAGTGAAAACCCCAGCTAGGTCTCTATCAGCAATGGCTGCTACTGTAGCTAAAT
CTTCTGACCCTGCTGACCCTCCTATTCCAAATGACTCGAGAATTTTATTCAAAGAACCAG
TTTCTTCATATAAAGGCGAATATCCTTATGTGCATACAATGGAAACTGAAAGTGGACATA
TTCAGGAATTTGATGATACCCCTGGGCAAGAACGATACAGATTAGTTCATCCAACTGGAA
CTTATGAAGAAGTATCACCGTCAGGAAGAAGAACAAGAAAAACTGTTGATAATTTGTATG
ATATAACCAACGCTGATGGTAATTTTTTGGTAGCCGGTGATAAAAAGACTAACGTCGGTG
GATCAGAAATTTATTACAACATGGATAATCGTCTTCACCAAATAGATGGAAGCAATACAA
TATTTGTTCGAGGCGATGAAACTAAGACGGTTGAAGGTAATGGAACTATCCTAGTTAAAG
GTAATGTTACTATTGTAGTTGAAGGTAATGCTGACATTACAGTTAAAGGAGATGCTACCA
CTTTAGTTGAAGGTAATCAAACTAATACAGTAAATGGAAATCTTTCTTGGAAAGTTGCTG
GAACAGTTGATTGGGACGTTGGTGGTGATTGGACAGAAAAAATGGCATCTATGAGTTCTA
TTTCATCTGGTCAATACACAATTGATGGATCGAGGATTGACATTGGCTAATATACTTCCA
ATGAGCGCTGATTTAGGGGAATCCATGGAAGGTTCTTCTATCGACGTCACCTTTACCGCT
CAATTAGAAACAGGTGAAACGTTAGTATCTATAAATATAACTAGTTACGAAGAAACTCCT
GGGGTTTTAGTAGAAGAAAATCGCTTATATGGAACATATGAATCTGTATTTGGTTTCGGA
AATGACGCGTTGAAATATCGTTTAGATGATGAATTTAAAACTGCTGCTTCATGGGAAGAC
CTTCCAACTGATTCTGACACTCAGTTGTATTTGTGGAAAGCTCCTCAGAATCTCCAGAAG
ACATTCACTTACGAAGTAACATTAATATATGACTACCAAGAACAAAGTGAATCTGGGGGT
TCTGGCAGTAATTCTAGGTCATCTTCTGATACTACTGAACCAACGAATCCTCCAGCTCCA
GTAAGAAAAACTTTAGTTAAAAATTATACTAAAACTATAGTTGGAAATTGGAGTCGTTGG
GCTAATAAATTGAGAAGCTATGTGTATGAGAGGTCATAGATGTCAGGATTAAGTTATGAT
AAGTGTGTTACTGCTGGCCATGAAGCGTGGCCTCCAACAGTTGTGAATGCTACACAAAGT
AAAGTATTCACTGGAGGAATTGCTGTTCTCGTAGCAGGTGATCCAATTACAGAACATACA
GAAATTAAAAAGCCATATGAAACACATGGCGGAGTGACACAACCTAGAACTTCTAAGGTA
TATGTCACGGGAAAGAAAGCTGTTCAAATGGCTGATCCAATATCATGCGGTGATACTGTG
GCTCAGGCATCATCTAAAGTATTCATTAAATAGGATTTAAAATGGCAAATACCCCTGTAA
ATTATCAATTAACAAGAACAGCAAATGCTATTCCCGAGATATTCGTCGGGGGTACATTTG
CTGAAATAAAACAAAACCTCATTGAATGGCTTAATGGCCAAAATGAATTTTTGGATTATG
ATTTTGAAGGCTCAAGATTAAACGTTCTGTGTGACCTTTTGGCTTATAATACATTGTACA
TTCAGCAGTTTGGTAATGCTGCTGTGTATGAAAGCTTTATGCGTACTGCTAACTTACGAA
GTTCAGTTGTTCAAGCTGCACAAGACAACGGATATTTACCTACTTCAAAATCCGCTGCGC
AGACCGAAATTATGTTAACATGCACCGACGCATTGAATAGGAATTACATTACTATTCCTC
GCGGAACTCGCTTTTTAGCATATGCAAAAGATACTTCTGTTAATCCATATAACTTCGTTT
CTACCGAAGACGTTATTGCTATTCGTGATAAAAATAACCAATATTTTCCACGTTTAAAAC
TTGCTCAAGGACGTATAGTAAGAACTGAAATCATTTATGATAAATTAACACCTATTATCA
TTTATGATAAAAATATTGATAGAAACCAAGTTAAATTATATGTTGATGGAGCTGAATGGA
TTAACTGGACGAGAAAATCGATGGTTCATGCTGGTTCTACATCAACAATTTACTACATGC
GCGAAACGATTGATGGAAATACTGAATTTTATTTTGGTGAAGGTGAGATTTCCGTTAATG
CGGCAGAAGGAGCTCTAACTGCTAACTATATTGGAGGTCTTAAGCCTACTCAGAACTCAA
CTATCGTTATTGAATATATCAGTACTAATGGCGCAGATGCGAACGGAGCAGTCGGATTTT
CATACGCAGATACATTAACAAATATAACTGTCATCAATATTAATGAAAATCCAAACGATG
ACCCAGATTTTGTTGGGGCAGATGGCGGCGGCGATCCAGAAGATATTGAACGTATTCGCG
AATTGGGTACTATTAAACGCGAAACCCAGCAACGCTGCGTAACTGCGACTGACTATGATA
CATTCGTTTCAGAGAGATTTGGTTCTATTATTCAAGCCGTTCAGACTTTCACTGATTCTA
CTAAACCTGGGTATGCATTTATTGCTGCTAAACCTAAATCAGGATTGTATTTAACTACTG
TGCAGCGTGAAGATATTAAAAATTATCTCAAAGACTATAATTTAGCTCCTATTACGCCAT
CAATTATTTCTCCTAATTATCTTTTTATTAAGACTAATTTAAAAGTCACATATGCTTTAA
ATAAGCTGCAAGAATCTGAACAGTGGCTTGAAGGTCAAATAATTGATAAAATTGACCGCT
ATTATACTGAAGATGTAGAAATTTTTAACTCGTCTTTTGCCAAGTCTAAGATGTTAACTT
ATGTAGATGATGCAGATCATTCTATCATTGGTTCATCAGCGACTATTCAAATGGTTCGTG
AAGTACAAAATTTCTATAAAACTCCTGAAGCGGGTATTAAATACAATAATCAAATAAAAG
ACCGTTCTATGGAATCTAATACGTTTTCATTTAATTCTGGACGAAAAGTTGTAAATCCTG
ATACTGGTTTAGAAGAAGATGTATTATATGACGTTCGCATAGTATCAACAGACCGAGATT
CTAAAGGAATTGGTAAAGTTATTATTGGTCCATTTGCTTCTGGCGATGTTACAGAAAATG
AAAACATTCAGCCATATACAGGCAATGATTTTAATAAATTAGCAAATTCTGATGGACGCG
ACAAATACTATGTTATCGGTGAAATAAATTATCCAGCTGATGTGATTTATTGGAATATCG
CTAAAATTAATTTAACATCTGAAAAATTTGAAGTTCAGACTATTGAATTATATTCTGACC
CAACCGATGATGTTATCTTTACTCGCGATGGTTCACTGATTGTATTTGAAAATGACTTAC
GTCCACAATACTTAACTATCGATTTGGAGCCTATATCACAATGACAGTAAAAGCACCTTC
AGTCACTAGTCTCAGAATTTCCAAGTTATCCGCAAATCAGGTGCAAGTACGCTGGGATGA
CGTTGGTGCTAATTTCTACTATTTTGTAGAAATCGCTGAGACAAAAACAGACTCGGGGGA
AAAACTCCCGAGTAATCAATATCGTTGGATTAATTTAGGATATACAGCAAATAATAGTTT
CTTTTTTGATGATGCTGATCCATTGACATCGTACATTATTAGAGTAGCTACAGCTGCGCA
GGATTTTGAGCAGTCTGATTGGATTTATACCGAAGAGTTTGAAACTTTTGCTACGAATGC
TTACACATTTCAAAACATGATTGAAATGCAATTAGCTAATAAATTCATTCAGGAAAAGTT
CACTCTTAATAATTCTGATTATGTTAATTTTAATAATGACACCATAATGGCTGCATTGAT
GAATGAATCGTTTCAATTCAGCCCATCATATGTTGATGTTTCATCAATCAGTAATTTTAT
TATTGGTGAAAATGAGTATCATGAAATACAAGGTTCCATTCAGCAAGTATGTAAGGATAT
TAACCGAGTTTATTTGATGGAATCAGAAGGGATTCTATATCTTTTTGAGCGCTATCAACC
CGTAGTTAAAGTATCTAATGATAAAGGACAAACCTGGAAAGCTGTAAAGCTCTTCAATGA
CCGTGTAGGATATCCTTTATCTAAGACAGTATATTACCAATCTGCGAACACTACATACGT
TCTAGGATACGACAAGATTTTCTACGGCCGTAAATCTACTGATGTTAGATGGTCAGCTGA
TGATGTCAGATTTAGTTCACAGGATATAACATTTGCTAAACTTGGTGACCAATTGCATCT
AGGATTTGATGTAGAAATTTTTGCCACTTACGCGACTTTACCTGCGAATGTATATCGTAT
AGCTGAGGCTATTACTTGCACGGATGATTATATCTATGTTGTTGCCAGAGATAAAGTTAG
ATACATAAAAACGAGTAATGCACCCATAGATTCTGATCCATTATCCCCAACATATTCGGA
AAGACTTTTTGAACCCGATACAATGACTATAACCGGAAATCCTAAAGCAGTATGCTATAA
AATGGATTCTATTGGTGATAAAGTTTTTGCTCTTATTATTGGTGAAGTTGAAACATTAAA
TGCCAATCCGAGAACTTCAAAAATAATTGATTCTACTGATAAAGGAATATATGTTTTAAA
TCATGACACGAAAACATGGAAAAGAGTTTTTGGTAATACCGAAGAAGAAAGAAGACGTAT
TCAACCTGGATATGCGAATATGTCAACTGACGGTAAATTAGTTTCTCTATCTTCGAGTAA
TTTTAAATTTTTAAGTGATAACATTGTTAATGACCCTGAAACTGTGGTGAAATATCAGTT
AATCGGTGCTGTTAAATATGAATTTCCTCGTGAATGGTTAGCTGATAAGCATTATCATAT
GATGGCATTTATAGCGGATGAAAAATCTGATTGGGAAACTTTTACGCCTCAGCCGATGAA
ATACTATGCAGAACCATTCTTTAACTGGTCTAAAAAATCTAACACGCGCTGTTGGATAAA
CAACTCTGATAGAGCTGTAGTAGTTTATGCTGATTTAAAATACACCAAAGTTATAGAAAA
TATTCCGGAAACATCACCAGATAGATTAGTTCATGAATACTGGGATGATGGTGATTGCAC
TATAGTAATGCCAAATGTTAAATTCACTGGATTTAAAAAATACGCATCAGGAATGCTTTT
CTACAAAGCCTCCGGTGAAATAATTTCTTACTATGATTTTAATTATCGTGTGAGAGATAC
AGTCGAAATTATTTGGAAACCTACTGAAGTATTTTTAAAAGCATTTTTACAAAACCAAGA
GCATGAAACTCCTTGGTCGCCTGAAGAAGAGCGTGGATTAGCTGACCCCGATTTAACACC
ATTAATTGGCACAATGATGCCTGATTCTTATTTGTTACAGGATTCGAATTTTGAGGCATT
TTGCGAAGCATATATTCAATACCTTTCTGATGGATATGGAACTCAGTATAACAATTTACG
AAATTTAATTCGTAACAAATATCCACGAGAAGAGCATGCATGGGAATATTTGTGGTCAGA
GATATATAAAAGAAACATTTATTTAAATGCTGACAAACGTGATGCTGTTGCAAGATTTTT
CGAATCACGTAGCTATGATTTTTATTCTACTAAAGGAATTGAAGCATCATACAAATTTCT
TTTTAAAGTTCTTTATAATGAAGAAGTTGAAATTGAAATTGAATCTGGGGCTGGTACTGA
ATATGATATAATCGTTCAATCTGATTCTTTGACTGAAGACTTAGTAGGACAAACGATTTA
TACGGCAACAGGAAGATGTAATGTTACTTATATAGAAAGAAGCTATTCTAATGGTAAATT
GCAATGGACCGTAACTATTCATAATCTTTTAGGAAGATTAATTGCTGGTCAAGAAGTTAA
AGCAGAAAGACTCCCTAGTTTTGAAGGCGAAATTATTCGTGGGGTTAAAGGAAAGGATTT
GCTTCAAAATAATATAGACTATATTAATAGAAGTCGATCATATTATGTAATGAAAATTAA
ATCCAATTTACCTTCTTCTCGTTGGAAATCTGACGTTATTCGTTTTGTTCATCCAGTAGG
ATTTGGATTTATAGCAATTACCCTTTTAACAATGTTTATTAATGTTGGTTTAACTCTTAA
ACATACAGAGACTATAATTAATAAATACAAAAACTATAAATGGGATTCTGGATTGCCTAC
TGAATATGCTGATAGAGTAGCTAAATTGACTCCAACCGGTGAAATTGAACATGATCCAGT
AACAGGCGAAGCAATTTATGAACCTGGTCCAAAGGCTGGTGTAAAATATCCTCTTCCTGA
TGACTATAATGCTGAAAATAATAATTCAATATTTCAAGGTCAATTGCCGTCTGAACGACG
TAAATTAATGAGTCCTTTATTTGATGCATCTGGAACAACATTTGCGCAATTTAGAGATTT
AGTTAATAAACGTCTAAAAGATAATATAGGAAATCCAAGAGACCCTGAAAATCCAACACA
GGTTAAAATAGATGAATGATTCAAGTGTTATCTATCGTGCGATAGTTACTTCAAAATTTA
GAACAGAAAAAATGTTGAATTTTTATAATTCAATTGGAAGTGGTCCGGATAAAAACACTA
TCTTTATCACATTTGGAAGATCAGAACCATGGTCATCAAATGAAAATGAGGCGGGCTTTG
CCCCGCCTTATCCAACCGATTCTGTATTAGGTGTAACTGACATGTGGACTCATATGATGG
GAACAGTAAAAGTTCTTCCATCAATGCTTGATGCTGTTATTCCTCGCAGAGATTGGGGAG
ATACTAGATATCCGGATCCATACACATTTAGAATTAACGATATTGTAGTGTGTAACTCAG
CTCCTTACAATGCTACTGAATCAGGCGCAGGCTGGCTAGTATATCGTTGTTTAGATGTTC
CTGATACTGGAATGTGTTCAATAACATCTTTAACTGATAAGGATGAATGCCTCAAATTAG
GTGGAAAATGGACTCCTTCTGCTAGGTCAATGACTCCTCCTGAAGGTCGAGGAGATGCTG
AAGGAACAATTGAACCTGGGGACGGATATGTTTGGGAATATCTATTTGAGATTCCACCTG
ATGTATCTATAAATAGATGCACAAATGAATATATCGTGGTTCCTTGGCCTGAGGAATTAA
AAGAAGACCCGACTAGATGGGGATATGAAGATAATCTCACTTGGCAACAAGATGATTTTG
GATTAATTTACCGTGTTAAGGCAAATACTATCCGTTTTAAAGCATATTTAGATTCAGTTT
ATTTTCCTGAAGCTGCATTGCCGGGAAATAAAGGATTTAGACAAATATCGATAATCACGA
ATCCTCTTGAAGCTAAAGTTCATCCAAATGACCCAAACGTTAAAGCTGAAAAGGATTACT
ATGATCCGGAAGATTTAATGAGGCATTCGGGCGAAATGATTTATATGGAAAATAGGCCAC
CTATTATTATGGCAATGGATCAAACAGAAGAAATCAATATTCTGTTTACATTTTAAATTA
AGGGAGCCCATGGGCTCCCTTTTTCTTTATAAATACTATAAACTCATAAGGAAACCGCTA
TGTTCATTCAAGAACCAAAGAAATTGATTGATACCGGCGAAATTGGTAACGCTTCTACTG
GTGATATCTTATTCGACGGTGGTAATAAAATTAATAGTGATTTTAATGCAATTTATAACG
CGTTTGGCGATCAGCGTAAAATGGCAGTAGCAAATGGTACTGGCGCTGACGGCCAAATTA
TCCATGCTACTGGATATTATCAAAAGCATTCTATCACAGAGTACGCAACTCCGGTGAAAG
TTGGTACTAGGCATGATATTGATACCTCTACTGTTGGTGTTAAAGTTATCATTGAAAGAG
GAGAACTCGGTGACTGTGTTGAATTCATTAATTCTAACGGATCGATATCAGTTACTAATC
CTTTAACAATTCAAGCCATTGATTCAATTAAAGGTGTTTCGGGTAATTTGGTAGTAACTA
GCCCATATAGTAAAGTAACTTTGCGCTGTATTTCATCTGATAATTCTACGTCAGTTTGGA
ATTATTCTATTGAAAGTATGTTTGGCCAAAAGGAATCACCGGCCGAAGGTACATGGAATA
TTTCTACATCTGGATCAGTTGACATTCCATTATTTCATCGTACTGAATACAATATGGCTA
AATTGCTAGTTACTTGTCAATCGGTAGATGGAAGAAAAATTAAAACGGCAGAAATAAATA
TTCTTGTAGATACTGTTAATTCAACGGTCATTTCTTCTGAATATGCTGTCATGCGGGTTG
GGAATGAAACTGAAGAAGACGAAATCGCTAATATTGCATTTAGTATTAAAGAAAATTATG
TAACGGCGACTATAAGTTCTTCAACTGTCGGTATGAGAGCAGCAGTTAAAGTTATCGCTA
CGCAGAAAATCGGGGTGGCTCAATAATGAAACAAAATATTAATATCGGTAATGTTGTTGA
TGATGGTACCGGTGACTACCTGCGTAAAGGTGGTATAAAAATAAATGAAAACTTTGATGA
ACTTTATTATGAACTTGGTGATGGAGATGTTCCATATTCAGCCGGTGCCTGGAAAACTTA
TGATGCTTCATCTGGACAAACACTAACGGCAGAATGGGGAAAATCATACGCTATTAATAC
CTCTTCTGGAAGAGTAACTCTACAACTTCCTAAAGGAACTGTTAATGATTACAACAAGGT
AATTAGAGCTAGAGACGTATTCGCTACATGGAACATCAATCCAGTTACTTTAGTAGCTGC
TTCCGGAGATACAATTAAAGGGTCGTCATCGTCAGTTGAAATTAATATTCAATTTAGTGA
TTTAGAACTCGTTTATTGCGCTCCAGGACGCTGGGAGTATGTCAAAAATAAGCAAATTGA
TAAAATTATCAGTTCAGACATTAGTAATGTAGCTCGTAAAGAATTTTTAGTCGAAGTTCA
AGGGCAAACAGACTTTTTAGATGTTTTTAATGGAACTAGTTATAATGTCAATAACATCAG
AGTAAAACATCGTGGTAACGAATTGTATTACGGCGATGTATTTAGCGAAAACAGTGACTT
TGGCTCTCCTGGAGAAAATGAAGGCGAATTAGTTCCTCTTGATGGATTTAACATTCGATT
AAGACAGCCTTGTAATATTGGTGACACTGTTCAAATTGAAACATTTATGGATGGTGTATC
ACAATGGAGAAGTTCATATACAAGACGCCAAATAAAAGTACTGGATTCAAAACTAACATC
AAAGACTTCTTTAGAAGGAAGCATTTATGTTACTGATTTATCAGCGATGAAATCAATTCC
ATTTTCTGCATTTGGATTAATTCCTGGTGAACCCATTAATCCTAACTCTCTTGAGGTTCG
TTTTAATGGAATTTTACAGCAGCAGGCTGGAACAGCTGGATATCCTCTGTTTTTGTGTGA
AGGTGCTAATTCAGATACGCAAGAAGGATGTATATCTCTTGGTGGCGAATGGAAAGAATC
AAACACCGATTATTCTATAGAATATGAAGACGGAAAACCTATCAGTCTTTTATTTGATAG
AAAATTTGAATCCGGTGACATTATCGTTATAACATGGTTCAATAATGATTTAGGAACTCT
TTTAGAAAAAGATGACATCATTGAATTGACTGATGACCGTTATGTTAGTAAAGGATCATC
TACTGAAGTTACTGGTGATGTGGCCTTAACAGATTTTGATAAAATCGGTTGGCCAAATGT
TGAAAAAGTTGATTCTTATACTAGAACGTATAATTCAATATCATCTATTTTCGACAGCAT
TTATCCTGTTGGTTCAATTTATGAAAATGCTATAAACCCAAATAATCCGGTGACTTATAT
GGGATTTGGTTCATGGAAATTATTTGGTAAAGGACAAGTTTTAGTAGGATGGAATGATGA
TGTTACGGATCCAAACTTTGCTTTAAACAATAATGATTTAGATTCTAGCGGAAATCCTTC
ACATACTGCAGGTGGAACAGTTGGAACAACATCAGTAACGCTTGAAAACGCAAATCTTCC
TGCAACTAAAACCGACGAAAGAGTTTTAATTGAAGACGAAAATGGATCGGTTATTATTGG
AGGTTGCCAATATGACCCAGATGAAACTGGTCCTATATATACAAAATATCGTGAAGACTA
CGCAACAACAAACTCTTCACATACTCCTCCTGCTAATATTAGTAATATTCAACCGTCTAT
TACTGTATACCGTTGGATAAGGATTGCATAATGAGTTTACTTAATAATAAAGCGGGAGTT
ATTTCCCGCTTAGCAGATTTTCTTGGTTTTAGAACTAAGAAAAATGATATTTCGGTTATG
AATAATCAGCCAGTAGGTGCTGTAACAATTTCACAAATAGCAAAAGGTTTTTATGACCCA
AATGTAGAATCTGCTATCAATGATGTTAGAAATATGGCAGAGCAACAGGTTGGAGCTGTA
TTAGTTAATATAAGTGGCGTATCTCCTACTGGCGTGCAGCAAACAGACTATTGGTCATTT
GAAGGAACTGTCAATGATACTTCAGCCAAACCAGGTGACACAGTTATTGTTAACATGTTT
GGTATTCCAGTTAAAGCTACTAATGGAATGACTTCAATCGAATTTACCAGTGCCGTTAGA
ACAGCTCTACAGGAAATGGTTGCAAAATTTATTGCAATTGATTCATTTGAAGACCATCCT
ACCATAGGAAATAAAATACAAGTTAAGTATTTAGATAACCAAGAACATATCTTAGAACAA
TACTCTGATAAAGGAATTACTTTCAAACAAGAAATAATTTCTCCTTCTAAACCCGGATAC
GGAACTTGGCAATTATTAGGTGCGCAAACTGTTACGCTAGATAGTCACACACAACCTACG
GTATTTTATTATTTTGAGAGAATAGCATGAGTAACAATACATATCAGCACGTATCAAATG
AATCAAAATATGTTAAATTCGATCCAGTAGGATCGAATTTTCCTGACACTGTCACGACAG
TGCAGTCTGCATTATCAAAAATAAGTAATATCGGCGTAAATGGTATTCCTGATGCAACTA
TGGAAGTTAAAGGAATAGCAATGATTGCGTCAGAGCAAGAGGTTTTAGATGGAACTAATA
ATTCTAAAATCGTTACACCAGCTACATTAGCAACAAGATTATTGTATCCAAATGCTACTG
AAACTAAGTATGGTTTAACGCGCTATTCAACAAATGAAGAAACATTAGAAGGCTCAGATA
ATAATTCATCAATAACGCCGCAAAAACTGAAATACCATACTGACGATGTGTTCCAAAATA
GATATTCGTCTGAGTCATCAAACGGGGTTATTAAAATATCATCTACACCTGCAGCTTTAG
CTGGAGTTGATGATACTACGGCAATGACTCCACTGAAAACACAAAAACTTGCAATAAAAT
TAATTTCACAAATAGCTCCTTCCGAAGATACTGCATCAGAATCTGTGAGAGGTGTAGTTC
AATTATCTACTGTTGCGCAAACACGTCAAGGAACTCTCCGCGAAGGATATGCAATTTCTC
CGTATACATTTATGAATTCTGTTGCAACACAAGAATATAAGGGCGTTATACGTTTAGGAA
CACAATCGGAAATTAACAGTAATTTAGGAGATGTTGCAGTAACAGGTGAAACACTAAATG
GTCGAGGAGCTACCGGTTCTATGCGTGGGGTAGTAAAATTAACGACGCAAGCTGGTATTG
CTCCTGAAGGTGATAGCTCTGGGGCATTAGCATGGAACGCAGATGTAATTAATACTCGCG
GTGGACAAACTATTAATGGTTCTTTAAATTTAGACCATCTTACAGCAAACGGAATTTGGT
CGCGCGGCGGGATGTGGAAAAATGGCGATCAACCTGTTGCCACTGAAAGATATGCGTCAG
AAAGGGTTCCGGTTGGAACTATTATGATGTTTGCTGGAGATTCAGCTCCTCCTGGTTGGA
TTATGTGCCATGGCGGAACTGTGTCAGGAGATCAATATCCTGATTATAGAAACACAGTTG
GAACGAGATTTGGTGGCGATTGGAATAATCCTGGCATTCCTGATATGCGAGGTCTTTTCG
TCAGAGGAGCTGGTACTGGTGGTCATATTTTAAATCAACGAGGGCAAGATGGTTACGGGA
AGGATAGACTTGGTGTAGGATGTGACGGAATGCATGTTGGCGGTGTTCAAGCACAACAGA
TGTCATACCATAAACATGCTGGCGGTTGGGGAGAATACCAAAGACATGAAGCTCCATTTG
GCGCGTCCGTTTATCAAGGATATCTTGGAACTAGAAAATATGCCGACTGGGATAATGCTT
CATACTTCACTAATGATGGATTTGAATTAGGTGGACCGAGAGATGCCCTTGGTACACTTA
ATCGTGAAGGATTAATTGGTTATGAAACCAGACCATGGAATATATCATTAAACTATATTA
TTAAAATTCATTACTAAGGATTACAAATGATTGAATTAAAAGATTTACCTTTTGTTGATA
GCGTTCCTGGCGAAGGTCAGGAACGTATTTCATGGATTAAAAATGGTGAAGAAATACTAG
GAGCTAGTACTAAGTATGGAAACGATGGATCAATGAATAGACCAACTGTTTCCGTGTTTA
AAAATGTTGAGGTTCTTGACGAAAATATAGGAATTCTTAAAACAGCATTAGAAACATCCC
AGGAAGATATTAAAACCATTCAGGGTATCTTAGATGTATCTGGTGATATAGAAGCTTTAT
CGCAAATAAGTATCAATAAAAAGGATATCACTGATCTTAAAACGCTTACGAGTGAACATA
CCGAAATATTAAATGGAACTAATAATACTGTCGATAGCATTCTTGCTGACATTGGTCCAT
TTAATTCGCAAGCAAATTCAGTTTATAGAACGATTAGAAATGATTTGTTATGGATTAAAA
GGGAATTAGGACAATATGCTGGGCAAGACATTAACGGTCTTCCTGTTGTAGGAAATAGCA
GCACGGGTATGAAGCACCGTATCATTAATAATACAGATGCTATAACTTCCCAAGGAATAC
GTCTAAGTGATTTGGAAGAAAAATTTATTGAATCTGATGTAGGTTCACTGACAATTGAAG
TCGGAAATCTTAGACAAGAACTTGGACAAAGACCATCTTCATTTAGTGAAAGCATATATT
CACGTGTGCATAATTTAGATCAATCACAGATTAATCTTAGTTCCGAAATTAAATCTATCA
AAACTTCTATTGGATATCCAGGAAATACTTCAATAATCACAGATGTTAACACTAATACAC
GAGAAATTTCAGCTTTAAATGATGAACTAAATAAAAGCGGAGGTATTAAACAACGATTGA
CTGTCATTGAAACATCAATTGGCTCAGATGATATTCCTTCTAGTATTAAAGGTCAAATTA
AAGATAATACCACATCAATTGAGTTTTTAAATGGAATTGTTGGTGAAAACACTTCATCTG
GACTACGAGCAAATGTTTCATGGCTAAACCAAATCGTTGGAACTGATTCTAGTGGAGGTC
AGCCTTCTCCTCCTGGGTCTCTTTTAAATAGGGTTTCAACTATTGAAACCTCTGTTAATA
GACTTAACAATGATGTTCAAAACCTGCAAGTTGAAATTGGTAATAACACTACTGGAATTA
AAGGACAGGTTGTTGCACTAAATAAACTAGTAAGCGGCACAAATCCAAATGGTTCAACGG
TAGAAGAGCGTGGATTAACTAATTCAATAAAAGCTAATGAAACTAACATTTCTTCTATTA
ATCAAGAAATGCGTAGTATTAAAAGTAATGTATCTTCATTACAGGGGGATGTTCAGACTT
TACAGGAAGCAGGTTATATCCCTGAAGCTCCAAAAGATGGCCAAGCTTACGTTCGTAAAG
ACGGCGAATGGGTACTACTTTCTACCTTTTTATCACCAGCATAACATGGGGCCGCAAGGC
CCCAAAGGATTTTAAATGTCAGGATATAATTCTCAGAATCCAAAAGAACTCAAAGATGTC
ATTCTAAGACGTTTAGGGGCTCCAATTATCAATGTTGAGTTAACACCCGATCAAATTTAT
GATTGCATCCAGCGTGCCCTAGAATTATACGGTGAATACCATTTTGATGGACTTAACAAA
GGTTTTCATGTATTTTATGTAGGAGATGACGAAGAAAAATATAAAACCGGAGTCTTCGAT
TTAAGAGGTTCAAATGTATTCGCAGTAACTCGCATTCTCCGCACGAATGTTGGATCAATA
ACGTCAATGGACGGAAATGCTACATATCCATGGTTTACTGACTTTCTTTTGGGAATGGCT
GGTATTAATGGTGGCATGGGGACTTCTTGTAATAGATTTTATGGACCAAATGCCTTTGGA
GCTGATTTAGGATATTTTACCCAGCTTACCAGTTACATGGGAATGATGCAAGATATGCTT
TCGCCTATTCCAGATTTTTGGTTTAATTCAGCAAATGAACAGCTAAAAGTCATGGGAAAC
TTCCAAAAATATGATTTAATTATCGTAGAAAGCTGGACTAAATCATATATTGATACTAAT
AAAATGGTTGGAAATACAGTAGGATATGGAACAGTCGGTCCACAAGATAGCTGGTCATTA
TCTGAACGATATAATAATCCAGACCATAATTTAGTAGGTCGTGTTGTCGGTCAAGACCCA
GATGTTAAGCAAGGTGCTTATAATAACCGTTGGGTGAAAGACTATGCTACAGCTTTAGCT
AAAGAACTGAATGGCCAAATTTTAGCACGTCACCAAGGTATGATGCTTCCTGGCGGTGTT
ACAATTGATGGACAGCGCTTAATAGAAGAAGCTCGATTGGAAAAAGAAGCACTACGCGAA
GAATTATACTTGCTTGACCCTCCGTTTGGAATTTTGGTAGGTTAATATGGCTACTTACGA
TAAAAATCTTTTTGCTAAATTAGAAAACCGCACAGGTTATTCTCAGACTAATGAAACTGA
AATACTAAATCCTTATGTAAATTTCAATCATTATAAAAACAGTCAAATATTAGCTGATGT
ATTAGTAGCTGAAAGCATTCAAATGCGAGGCGTAGAATGCTATTACGTTCCAAGAGAGTA
TGTATCTCCTGATTTGGTATTCGGTGAAGACCTAAAAAATAAATTTACTAAAGCTTGGAA
ATTTGCTGCATATTTAAATTCGTTTGAAGGATATGAAGGAGCTAAATCGTTCTTTAGTAA
TTTTGGTATGCAAGTACAGGATGAAGTAACTTTGTCCATTAATCCAAACCTGTTTAAACA
TCAAGTAAATGGAAAAGAACCCAAGGAAGGTGATTTGATATATTTTCCTATGGATAACAG
CTTATTTGAAATTAACTGGGTTGAACCATATGATCCATTTTATCAATTAGGCCAAAATGC
TATTCGTAAAATTACAGCAGGTAAATTCATTTACTCTGGAGAAGAAATTAATCCAGTTCT
GCAGAAAAATGAAGGAATTAACATTCCAGAATTTAGTGAATTAGAATTAAATCCTGTTCG
CAATCTTAACGGTATTCATGATATTAATATTGATCAGTATTCTGAAGTAGATCAAATTAA
TTCTGAAGCTAAAGAATATGTTGAACCTTATGTTGTTGTCAATAACAGAGGAAAATCTTT
CGAATCTAGCCCATTTGATAATGATTTCATGGATTAATAAATATTATAAACTAATTAAAG
CCCAGATTAGGAGAAATCATGTTTGGTTATTTTTATAATTCGTCTTTTAGACGATATGCT
ACCTTGATGGGCGATTTGTTTTCAAATATCCAAATCAAACGTCAGTTAGAATCTGGTGAT
AAGTTTATACGTGTTCCTATTACGTATGCATCAAAGGAACACTTTATGATGAAATTAAAT
AAATGGACATCAATAAATTCACAAGAAGATGTAGCTAAAGTTGAAACTATTCTACCTCGT
ATAAATTTACATTTAGTTGATTTTAGCTATAATGCTCCATTTAAAACAAACATTTTGAAT
CAAAATTTACTGCAAAAAGGCGCAACTTCTGTAGTATCACAGTATAATCCATCTCCTATT
AAAATGATTTATGAATTGAGTATATTTACTCGCTACGAAGACGATATGTTTCAAATAGTT
GAACAGATTCTTCCATATTTTCAACCTCATTTTAATACAACCATGTATGAGCAGTTTGGA
AATGATATTCCATTTAAAAGGGATATTAAAATTGTACTGATGTCTGCTGCTATAGACGAA
TCTATAGATGGAGATAATTTATCTCGTCGTAGAATTGAATGGTCACTAACATTTGAAGTA
AATGGATGGATGTATCCTCCAGTAGATGATGCAGAAGGATTAATTCGTACTACTTATACA
GATTTTCACGCCAATACAAGAGATTTGCCTGACGGTGAAGGCGTTTTTGAATCTGTCGAT
AGCGAAGTTGTTCCTCGAGATATTAACCCAGAAGACTGGGATGGAACAGTAAAACAAACT
TTCACTAGCAATGTAAATAGACCAACACCGCCAGAACCTCCTGGCCCAAGAACATAGAGG
TTATTATGGAAGGTCTTGATATAAACAAACTTTTAGATATTTCTGACCTCCCCGGAATCG
ACGGGGAGGAAATTAAAGTATATGAACCTCTGCAATTAGTAGAAGTTAAAAGCAATCCTC
AAAACCGTACTCCTGACTTAGAAGATGATTATGGAGTAGTTCGTCGAAATATGCATTTTC
AACAACAAATGCTAATGGACGCAGCCAAGATTTTTCTTGAGACGGCAAAGAATGCTGATT
CTCCTCGTCACATGGAAGTATTTGCAACTCTTATGGGGCAAATGACTACGACGAACAGAG
AAATACTGAAGCTTCATAAAGATATGAAAGATATTACATCTGAGCAGGTTGGCACTAAAG
GTGCTGTTCCTACAGGTCAAATGAATATTCAAAATGCGACAGTATTCATGGGTTCACCAA
CAGAATTAATGGACGAAATTGGTGATGCTTACGAGGCTCAAGAAGCTCGTGAGAAGGTGA
TAAATGGAACAACCGATTAATGCATTAAATGATTTCCATCCGTTAAATGAAGCTGGAAAA
ATTTTAATAAAACACCCAAGCTTAGCTGAAAGAAAAGATGAAGATGGAATTCATTGGATA
AAATCTCAGTGGGATGGAAAATGGTATCCTGAAAAATTCAGTGATTACCTTCGTCTGCAT
AAAATAGTAAAAATTCCAAATAATTCTGACAAGCCTGAATTATTTCAAACTTATAAAGAT
AAGAATAATAAAAGATCTCGGTATATGGGTCTTCCTAACTTGAAACGAGCTAATATTAAA
ACACAATGGACTCGTGAAATGGTAGAGGAGTGGAAAAAATGCCGAGACGATATTGTTTAT
TTTGCAGAAACATACTGTGCCATTACTCATATTGACTATGGTGTCATAAAGGTTCAATTA
CGTGACTATCAGCGTGATATGCTCAAAATAATGTCATCTAAACGTATGACTGTTTGTAAT
TTATCACGCCAGCTCGGTAAAACAACTGTAGTAGCTATTTTCCTTGCACACTTTGTGTGT
TTTAACAAGGATAAAGCTGTAGGTATTCTTGCTCACAAAGGCTCAATGTCTGCGGAAGTT
TTAGATCGTACTAAGCAAGCAATTGAACTGCTTCCTGACTTTTTACAGCCTGGTATAGTT
GAATGGAATAAAGGGTCTATTGAACTAGATAATGGTTCTTCAATTGGCGCTTATGCTTCC
TCTCCTGACGCAGTTCGTGGTAACTCGTTCGCAATGATTTACATTGACGAATGTGCATTT
ATTCCAAACTTCCATGATTCCTGGCTTGCTATTCAACCAGTAATTTCATCTGGTCGTCGT
TCGAAAATTATTATTACTACGACTCCTAATGGATTAAACCATTTTTACGATATTTGGACT
GCAGCTGTTGAAGGTAAATCAGGGTTTGAACCATATACTGCTATTTGGAATTCAGTTAAA
GAACGTCTTTATAATGATGAAGATATTTTTGACGATGGATGGCAATGGAGCATACAAACC
ATTAATGGTTCTTCATTAGCTCAATTCCGTCAAGAACATACTGCAGCGTTTGAAGGGACT
TCTGGTACATTAATTTCAGGAATGAAATTAGCTATTATGGATTTTATTGAAGTAACACCA
GATGATCATGGTTTTCATCGATTTAAAAACCCTGAACCAGATAGAAAATATATTGCAACT
CTAGACTGCTCAGAAGGTCGTGGGCAAGATTATCACGCTTTACATATTATTGATGTTACC
GATGATGTGTGGGAACAGGTTGGTGTTTTGCACTCAAACACTATTTCTCATTTAATTCTA
CCTGACATCGTTATGCGTTATTTAGTAGAATACAATGAATGCCCAGTTTATATTGAATTA
AATAGTACTGGTATGTCAGTTGCGAAATCACTTTATATGGATTTAGAATACGAAGGTGTT
ATCTGCGATTCATATACTGATTTAGGAATGAAACAAACTAAACGCACGAAAGCGGTAGGA
TGCTCTACATTAAAAGACCTTATTGAAAAAGATAAGCTTATTATTCATCACCGAGCGACT
ATTCAAGAATTTAGAACGTTTAGTGAAAAAGGCGTGTCTTGGGCGGCTGAAGAAGGTTAT
CATGATGATTTAGTAATGTCTTTAGTGATTTTTGGATGGTTATCAACGCAGTCAAAATTT
ATTGATTATGCGGATAAAGATGACATGCGATTAGCATCTGAAGTATTTTCAAAAGAGCTT
CAGGATATGAGCGACGACTACGCGCCAGTTATATTTGTGGATTCGGTTCATTCTGCTGAG
TATGTTCCAGTATCTCATGGTATGTCAATGGTATAAATATATTAAAGCATATTAAAGAGG
ATTAAAAATGACTTTATTATCTCCGGGCATTGAGCTCAAAGAAACTACGGTTCAAAGCAC
CGTGGTTAATAACTCTACTGGTACAGCAGCTTTGGCCGGTAAATTCCAGTGGGGTCCTGC
TTTTCAGATTAAACAGGTTACAAATGAAGTAGATTTAGTTAATACTTTTGGTCAACCAAC
CGCTGAAACTGCTGACTATTTTATGTCTGCGATGAATTTCTTGCAGTACGGAAATGACTT
ACGAGTAGTTCGTGCTGTTGATAGAGATACCGCTAAAAACTCATCGCCAATTGCTGGTAA
TATTGAATACACAATTTCTACCCCAGGTAGTAACTACGCGGTTGGAGATAAAATCACGGT
CAAATATGTTTCAGATGATATTGAAACTGAAGGTAAAATTACTGAAGTAGACGCAGATGG
AAAAATTAAGAAAATTAATATTCCTACTGCAAAAATTATCGCTAAAGCGAAAGAAGTAGG
CGAATATCCAACACTAGGTTCTAACTGGACTGCGGAAATTTCTTCGTCTTCCTCTGGTTT
AGCTGCAGTAATAACTCTTGGAAAAATTATTACTGATTCTGGTATTTTATTAGCTGAAAT
TGAAAATGCTGAAGCTGCTATGACAGCGGTTGACTTTCAAGCAAATCTCGAAAAATACGG
AATTCCAGGAGTAGTAGCTCTTTATCCAGGCGAATTAGGCGATAAAATTGAAATTGAAAT
CGTATCTAAAGCTGACTATGCAAAAGGAGCTTCTGCATTACTCCCAATTTATCCGGGCGG
TGGTACTCGTGCATCTACTGCTAAAGCAGTGTTTGGATATGGACCACAAACTGATTCACA
ATACGCTATTATAGTTCGTCGTAATGATGCTATTGTTCAAAGCGTTGTTCTTTCAACTAA
GCGTGGTGAAAAAGATATTTACGATAGTAACATCTATATCGATGACTTTTTCGCAAAAGG
TGGCTCAGAATATATTTTTGCAACTGCACAAAACTGGCCAGAAGGCTTCTCTGGAATTTT
AACTCTGTCTGGTGGATTATCATCAAATGCTGAAGTAACAGCAGGAGATTTGATGGAAGC
TTGGGACTTCTTTGCTGACCGTGAATCTGTTGATGTTCAGTTGTTTATTGCGGGTTCTTG
TGCCGGTGAATCTTTAGAAACAGCATCTACTGTCCAAAAACACGTCGTTTCAATTGGGGA
TGCTCGCCAAGATTGCTTAGTATTGTGCTCTCCTCCGCGTGAAACTGTAGTTGGAATTCC
TGTAACTCGTGCTGTTGATAACTTAGTCAATTGGAGAACTGCAACAGGTTCATACACTGA
TAATAACTTTAATATCAGTTCAACCTATGCGGCAATTGATGGTAACTATAAGTATCAGTA
TGACAAATATAATGATGTGAATCGTTGGGTTCCATTAGCAGCTGATATTGCTGGTTTATG
CGCAAGAACTGATAACGTTTCTCATACTTGGATGTCTCCAGCTGGTTATAATCGTGGCCA
AATTTTGAACGTTATTAAACTGGCTATTGAAACTCGCCAAGCTCAGCGCGACCGTTTATA
CCAAGAAGCTATCAACCCGGTAACTGGTACAGGTGGTGATGGTTACGTATTGTATGGTGA
TAAAACAGCTACTTCTGTTCCTTCTCCATTTGATCGTATTAACGTTCGTCGTCTGTTTAA
TATGTTGAAAACGAATATCGGACGTAGTTCAAAATATCGTTTGTTCGAATTAAACAACGC
GTTTACTCGTTCATCATTCCGCACAGAAACTGCCCAGTACTTACAGGGAATTAAAGCTCT
CGGTGGAATTTATGAATATCGCGTAGTTTGCGATACAACAAATAACACTCCGTCAGTAAT
TGATAGAAATGAGTTTGTTGCAACATTCTACATCCAACCGGCGCGCAGTATAAATTATAT
TACTTTGAATTTCGTCGCAACTGCTACCGGCGCAGATTTCGATGAGTTAACTGGTCTTGC
AGGTTAATACGGTGCATTCTAAAGGCCTGTTTCGGCAGGCCATATAAATACACTATATCC
TTAATTCTTTAATTCTATATGCCCTAGGTTAAACATAGGGATATAAATACTACAGAGGCT
AATATGTTTGTAGATGATGTAACACGAGCGTTTGAATCTGGTGATTTTGCTCGACCTAAC
TTATTCCAAGTAGAAATTTCTTATCTTGGACAAAATTTTACGTTTCAATGTAAAGCCACT
GCTTTACCAGCTGGTATTGTAGAAAAAATTCCAGTCGGATTTATGAACCGTAAAATTAAC
GTAGCAGGCGATCGTACATTCGATGATTGGACTATTACAGTAATGAATGATGAGGCGCAT
GATGCACGCCAGAAGTTTGTTGACTGGCAAAGCATTGCTGCTGGGCAAGGAAACGAAATT
ACTGGTGGAAAACCGGCAGAGTATAAAAAGAGTGCTATTGTACGCCAATACGCTCGTGAC
GCTAAAACTGTAACAAAAGAAGTCGAAATTAAAGGCCTGTGGCCTACTAACGTGGGTGAA
CTTCAATTAGATTGGGATTCAAACAATGAAATCCAAACCTTTGAAGTAACTCTCGCTCTC
GATTATTGGGAATAAAATGAATGGGGAGAAATCCCCATCCTGCTTAAAGCAGAGAAGTCC
ATTATAAATATAACTATAATTCCCATTTGGAGAATACAATGAAATTTAATGTATTAAGTT
TGTTTGCTCCATGGGCTAAAATGGACGAACGAAATTTTAAAGACCAAGAAAAAGAAGATC
TTGTTTCCATTACAGCCCCAAAGCTTGATGATGGAGCAAGAGAATTTGAAGTAAGCTCGA
ATGAAGCTGCTTCTCCTTATAATGCTGCATTCCAAACAATTTTTGGTTCATATGAACCAG
GAATGAAAACCACTCGTGAGCTTATTGATACATATCGTAATCTCATGAATAACTATGAAG
TAGATAATGCAGTTTCAGAAATTGTTTCAGACGCTATCGTCTATGAAGATGATACTGAAG
TCGTTGCGTTAAATTTGGATAAATCTAAATTTAGCCCAAAAATTAAAAATATGATGTTAG
ATGAATTTAATGATGTATTAAATCATTTATCATTTCAACGAAAAGGTTCTGATCATTTTA
GACGTTGGTATGTCGATTCAAGAATTTTCTTTCATAAAATTATTGATCCAAAACGTCCAA
AAGAAGGCATAAAGGAATTACGTAGATTAGACCCTCGCCAAGTTCAGTATGTTCGTGAAA
TTATAACAGAAACTGAAGCTGGCACAAAAATAGTTAAAGGTTACAAAGAGTATTTTATAT
ATGATACTGCGCACGAATCATATGCGTGTGATGGTAGAATGTATGAGGCTGGCACAAAAA
TAAAAATTCCTAAAGCTGCCATCGTTTATGCCCATTCTGGATTAGTCGATTGTTGCGGTA
AAAATATCATCGGGTATTTGCATCGTGCTGTTAAACCTGCTAACCAATTAAAATTATTAG
AAGATGCTGTAGTCATTTATCGCATTACTCGTGCTCCTGACCGTCGTGTATGGTACGTAG
ACACAGGTAATATGCCTGCTCGTAAAGCTGCCGAGCACATGCAACATGTCATGAACACGA
TGAAAAACCGTGTAGTATATGATGCATCAACAGGTAAAATAAAAAATCAACAGCATAATA
TGTCTATGACCGAAGACTATTGGTTGCAGCGCCGTGATGGTAAAGCTGTGACAGAAGTTG
ATACTCTTCCTGGCGCTGATAATACTGGTAATATGGAAGATGTTCGTTGGTTTAGACAAG
CTCTTTATATGGCATTACGTGTTCCTCTTTCACGCATTCCGCAAGACCAACAAGGCGGTG
TGATGTTTGATTCTGGAACTAGCATTACACGCGATGAATTGACGTTTGCTAAATTTATTC
GTGAGTTACAGCACAAGTTTGAAGAAGTTTTCCTAGATCCGCTTAAAACAAATCTTTTGC
TTAAAGGTATAATCACAGAAGATGAGTGGAATGATGAAATAAATAATATTAAGATAGAAT
TTCATCGGGATAGCTACTTTACTGAACTCAAAGAAGCAGAAATTTTGGAACGAAGAATTA
ATATGCTAACCATGGCAGAACCATTTATTGGTAAATATATTTCTCACAGAACTGCTATGA
AAGATATTTTGCAGATGACTGATGAAGAAATAGAACAAGAAGCCAAGCAAATTGAAGAAG
AGTCTAAAGAGGCTCGTTTCCAAGACCCCGACCAAGAACAAGAGGATTTTTAATGGAAGG
TTTAATTGAAGCTATTAAATCAAACGACCTCGTAGCCGCTCGTAAATTATTTGCTGAAGC
CATGGCTGCAAGAACGATTGATTTAATTAAAGAAGAAAAAATCGCTATCGCTCGTAATTT
CTTAATTGAAGGTGAAGAACCTGAAGACGAGGATGAAGATGAAGATGATGACGAAGATAG
CGATGATAAAGACGACAAAAAAGACAAAGACTCTGACGAAGACGAGGATGATGAATAATG
CTTCTGATCCCTGAAACTCATGAATTAGTTCTCGAGAATGTCGAAGCACTTATTCCTGAA
GCACAGGGTCGCTTTGACGAATTGTCTTCTGCTTTAAATAAAGACGATATAAATACAATT
GTCGAGAATATGCTTGATGATGAAACTGATTTAGCGGTTGCATTAGCTTCTATTAATGAA
AATATGCCGTTAAATGAATTCATCGTTAAACATGTTTCTGCCCGTGGTGAAATTACTCGC
ACTAAAGATCGCAAAACCCGCGAACGAAATGCATTTCAAACCACTGGGCTGTCTAAAGCA
AAACGTAGACAAATTGCTCGTAAAGCTACCAAAACGAAGATTGCCAATCCAGCAGGTCAA
TCTCGTGCTCAGCGTAAGCGTAAAAAAGCTCTTAAACGCCGTAAAGCATTAGGATTAAGC
TAATGAATGAACCCCAATTACTAATTGAAACTTGGGGTCAACCTGGCGAAATTATTGATG
GCGTGCCAATGCTTGAATCTCACGATGGAAAAGACTTAGGTTTAAAACCGGGTTTATACA
TCGAAGGAATATTCATGCAAGCGGAAGTCGTCAATAGAAATAAACGTCTTTATCCAAAAC
GTATATTAGAAAAAGCGGTAAAAGACTATATTAATGAGCAAGTTTTAACTAAACAAGCTC
TAGGAGAATTAAATCATCCTCCACGCGCTAATGTTGACCCGATGCAAGCCGCTATCATTA
TAGAAGATATGTGGTGGAAAGGAAATGACGTATACGGACGAGCTCGTGTTATTGAAGGTG
ACCACGGTCCTGGAGATAAATTAGCAGCTAATATTCGTGCCGGATGGATTCCAGGAGTTT
CTTCTCGTGGATTAGGTTCATTGACTGACACAAATAAAGGTTATCGTATCGTAAACGAAG
GATTCAAATTAACTGTAGGTGTTGATGCAGTATGGGGTCCAAGTGCTCCAGATGCATGGG
TAACTCCTAAGGAAATTACCGAATCACAGACGGCGGAAGCCGATACAAGTGCCGATGACG
CCTATATGGCTCTCGCAGAGGCCATGAAAAAAGCGTTATAAATATTATTATCTAAACAAC
AGGACTACAAAATGCTTAAAGAACAACTGATTGCTGAAGCGCAAAAAATTGATGCTTCCG
TTGCTCTTGATAGTATTTTCGAATCAGTTAATATTTCTCCGGAAGCAAAAGAAACTTTCG
GCACTGTATTCGAAGCTACCGTCAAGCAGCACGCCGTTAAATTAGCTGAATCTCATATCG
CTAAAATTGCTGAAAAAGCAGAAGAAGAAGTAGAAAAAAATAAAGAAGAAGCTGAAGAAA
AAGCTGAGAAGAAAATCGCTGAGCAAGCTTCTAAATTCATCGACCATCTTGCGAAAGAAT
GGCTCGCTGAAAATAAATTAGCAGTTGATAAAGGCATCAAAGCCGAACTGTTTGAATCCA
TGCTTGGTGGATTAAAAGAGCTCTTTGTTGAACACAACGTTGTTGTTCCAGAAGAATCAG
TTGATGTTGTAGCTGAAATGGAAGAAGAGCTGCAAGAACATAAAGAAGAATCAGCTCGTC
TGTTCGAAGAACTCAATATGCGCGACGCATATATCAATTATGTGCAGCGTGAAGTGGCAT
TGAGCGAAAGTACTAAAGATCTGACTGAGTCTCAAAAAGAAAAAGTCTCTGCTCTGGTCG
AAGGTATGGATTATTCAGATGAATTCTCAAGTAAATTGAGTGCCATCGTAGAAATGGTGA
AGAAGTCTAATAAAGATGAAAGCACTATTACTGAGGGTATAAATACTCCTGATACTGAAG
CAGCCGGACTGAATTTCGTCACTGAAGCTGTAGAAGATAAATCTGCATCTGGTGCAGAAG
ATATTGTAAGTGTATATGCGAAAGTCGCATCTCGTTTCTAATTTTAAAGGTTAACACAAA
TGACTATCAAAACTAAAGCTGAACTTTTGAACAAATGGAAGCCATTACTGGAAGGTGAAG
GTTTACCGGAAATTGCTAATAGCAAACAAGCGATTATCGCTAAAATCTTTGAAAACCAGG
AAAAAGATTTCCAGACAGCTCCGGAATATAAAGACGAAAAAATTGCCCAGGCATTCGGTT
CTTTCTTAACAGAAGCTGAAATCGGTGGTGACCACGGTTACAATGCTACCAACATCGCTG
CAGGTCAGACTTCTGGCGCAGTAACTCAGATTGGCCCAGCTGTTATGGGTATGGTACGTC
GTGCTATTCCTAACCTGATTGCTTTCGATATTTGCGGTGTTCAACCGATGAGCAGCCCAA
CCGGTCAGGTATTCGCACTCCGCGCGGTATATGGTAAAGATCCGATCGCTGCCGGTGCTA
AAGAAGCATTCCACCCAATGTATGGTCCAGATGCAATGTTCTCTGGTCAGGGTGCTGCTA
AGAAATTCCCAGCTCTGGCTGCTAGCACAGAAACCACAGTAGGTGATATCTATACTCACT
TCTTCCAGGACACTGGTACTGTGTATCTGCAAGCTTCTGCTCAAGTAACAATTAGTGCAA
GTGCAACTGATGCAGATAAATTAGATGCTGAAATTAAGAAACAAATGGAAGCTGGTGCAC
TGGTAGAAATCGCTGAAGGTATGGCTACTTCTATCGCTGAACTCCAGGAAGGTTTCAACG
GTTCTACCGATAACCCATGGAATGAAATGGGCTTCCGTATCGATAAACAAGTTATCGAAG
CTAAATCTCGCCAGCTGAAAGCTGCTTACTCTATCGAATTAGCACAAGACCTCCGTGCTG
TTCACGGTATGGATGCTGATGCTGAACTGTCTGGTATTCTGGCTACAGAAATCATGCTGG
AAATCAACCGCGAAGTTGTTGATTGGATTAACTACTCAGCTCAGGTTGGTAAATCTGGTA
TGACCCTGACTCCGGGTTCTAAAGCTGGTGTATTTGACTTCCAGGACCCAATCGATATTC
GTGGTGCTCGCTGGGCAGGTGAATCCTTTAAAGCTCTGTTGTTCCAGATTGACAAAGAAG
CAGTTGAAATTGCTCGTCAGACTGGTCGTGGTGAAGGTAACTTCATTATCGCTTCCCGTA
ACGTAGTTAACGTTCTGGCTTCAGTTGATACCGGCATTTCTTATGCTGCACAGGGTCTGG
CTACCGGCTTTAACACTGATACTACCAAGTCAGTATTTGCTGGTGTTCTGGGTGGTAAAT
ACCGTGTATATATCGACCAGTATGCTAAACAGGATTATTTCACTGTAGGTTATAAAGGTC
CGAACGAAATGGATGCTGGTATTTACTACGCTCCATATGTAGCTCTGACTCCATTGCGTG
GTTCTGATCCGAAGAACTTCCAACCAGTAATGGGATTCAAAACTCGTTACGGTATCGGTA
TCAACCCATTTGCAGAATCCGCTGCTCAGGCTCCGGCTTCTCGCATTCAGAGTGGTATGC
CTTCTATCCTGAACAGCCTTGGTAAAAACGCTTACTTTAGACGTGTATATGTTAAAGGTA
TCTAAGATATAACCTTATTATGGGAGACTTCGGTCTCCCATTCTTGTTTCTATACTACGC
AATCTTAACTCGACGGTTGATGATGTCACGGAAGTCAATACGATTTTCTTGGATTTTCAG
CCAGTTACCAGATTTGTCTTTGGTATGGGTAGAATATTCACCGTTCCACCAGAAGTCAGT
AGCATAAGCCATGGTTTCATATTTCTTAACTAGGGCATTCACTGCATTACCGTTAGGATT
GGAACCATATTTTTCTACCAGGGCTTTGATGTCTTTATCAAGAGCGGACAGAGTAGTACG
AATAAAGTTTAACTTGTTCATTTTTAATCTCCTCATGTTTTTGATAGGTCTATAGTAACA
TGTGATAACCTTGCTGTAAACAACTTTTATAAATAAACATATACTCTCAACAAGGAAAGC
GCAATGGCTAAAATCAACGAACTTCTGCGCGAATCAACCACAACGAATAGCAACTCAATC
GGTCGCCCAAATCTCGTTGCTTTGACTCGCGCTACCACTAAATTAATATATTCTGACATT
GTAGCAACGCAAAGAACTAATCAACCTGTTGCTGCTTTTTATGGTATCAAATACCTTAAT
CCAGATAACGAATTTACTTTTAAAACTGGTGCTACTTACGCTGGCGAAGCTGGATATGTA
GACCGAGAACAAATCACAGAATTAACAGAAGAGTCTAAATTAACTCTCAATAAAGGCGAT
TTATTCAAATATAATAATATCGTTTATAAAGTATTAGAAGATACACCATTTGCTACCATT
GAAGAAAGCGATTTAGAATTAGCTCTTCAGATTGCAATTGTTCTTTTAAAGGTTCGTCTA
TTTTCTGACGCAGCGTCAACGAGCAAATTTGAAAGCTCTGATAGCGAAATTGCGGATGCT
AGATTCCAGATTAATAAATGGCAAACCGCAGTTAAATCTCGTAAACTTAAAACTGGCATC
ACAGTTGAATTAGCACAAGATTTAGAAGCAAATGGATTCGATGCTCCTAATTTCTTGGAA
GATTTGCTTGCAACTGAAATGGCGGATGAAATCAATAAAGATATTCTACAGTCTTTAATT
ACTGTATCGAAACGTTATAAAGTTACTGGAATTACTGACACCGGATTTATTGACTTGAGC
TATGCATCCGCTCCAGAAGCAGGTCGTTCATTATATCGAATGGTGTGTGAAATGGTTTCG
CATATCCAAAAAGAATCAACTTATACAGCAACGTTCTGTGTTGCTTCAGCTCGTGCTGCT
GCGATTCTTGCTGCATCAGGTTGGTTAAAACATAAACCAGAAGATGATAAATATCTTTCA
CAAAATGCCTACGGGTTCTTAGCTAATGGTTTACCGCTTTATTGCGATACTAACAGCCCA
TTAGATTATGTAATCGTTGGCGTGGTAGAAAATATTGGCGAAAAAGAAATTGTTGGATCA
ATTTTCTATGCTCCATACACAGAAGGTCTTGACTTAGATGACCCTGAACATGTTGGTGCA
TTTAAAGTTGTAGTTGATCCGGAAAGCTTGCAACCATCTATCGGTTTATTAGTTAGATAT
GCTTTATCAGCAAATCCTTATACTGTAGCAAAAGATGAAAAAGAAGCAAGAATAATTGAT
GGTGGAGACATGGATAAAATGGCGGGTCGTTCAGATTTGTCTGTTTTATTAGGTGTTAAG
CTACCAAAAATTATTGTTGATGAATAAAACAAAGGGACCGAAAGGTCCCTTTTTATTTAG
CTCACCAACTCAATCCAGGCTGGACGAAGTACATCTTGTACCATTTTAACTAATTCCTTT
TTAATCAAAGAAGGATTATCTGCTTGAGTCAGAGTAATACCTTCACGAGAAGTTTCTTCC
AAAATATCTTGAACAGTTAGTCCCATCACCTTTCCAAAATCTTTAGGACCAATTTCACCA
ATTTTAGAGATAACGTTATTTACTCGGTTCAGTGTAACGTAGCAAGCTAAAATTCTCAGC
AATTTATTATCAGCTTCTGACAACTCAACTTTAGCTTTAATAGGCTTATCAGACTTTTTC
TTTTCGCTAAATTTAGAGTTCTTGCATTTGATGGCTACACGATTGCCATTAGGCATCCAA
GAAGGATAACAAGGTTTCAATACATATCCTTCAGCGGTAAATACTTCGCCTTTTGCTTCG
GCATTCCAAACGCATTTATTTGCATCAGCTAATCCAGCATGGTCTACTGTAAAATTATAA
TCTTGGACGACAGAATCTAAATCATTTGGCAATTTAATAAGCTCTTCAAATTTACCGCGA
CCTAAAAGTGGAGCCATTTTAAATTTGAATGTATTACAGAATGATTCCATCATATAATCA
TCGACATAAGTCACGTCACCACTTTCTGTAGTGACAATAATGTCAAATACATAAAAATCT
TTATCGCCATAATCAACATTCTTCTGAATGCCAGGTCCAGCGAATTCGCCAAAGACTTGA
TAAGATACAACTGCTGAAGTTTCCATAATATCTTGCACTGCTTTAATAGAATCAGCATAA
TTCTTTAAAATAATTTCATACCCAAAGAAATCTTCAGCAGGAAGAATAGGACCAGTACGT
TTAGCACAAGTTACTTTATCACGCTCAATAATCAATGAGAAATTTGTACCATGAATCTTT
TCACGAGCTACCCACTCCCCACCAGTCAATCCCAAGCTATAAAGTTTTTCAATAAATTTA
GAGTTGTAATGATTTTCAAGACTGCTATACTTTTTAAACATAATTAATCCTCAAAATGTA
ATTTCTAACCAATCACCATCACGCTGGTCACTATTGGCTTTAAAGCTAAATCCTTCTTTT
CTCAGCCAATCACCAATTTCTTCAGTAATCAATTTATCGCGAGCAATGCAATAATAACTA
AAATATGTTTTACCTTGTTCAGCTGCTTTATTAGCAAGTTCTGAAAAATCTTTAATAAAA
CATTCTAGTTTAAACTGTTTACTTTTAAGTGCTTTTTCTCGCAATTGATTAGCAAAAGAT
TCATTTTCATAAAGATCATACTGTTCCATTTTTCACCTTTTTATTGATATGTCTTTTTCT
ATAGACAACTTTTTCTCGAGTTTCAAATTTATTCTTAGCAGTCATAGCTCGAGCCCATAA
TACAGCCACTTCTTTTGCCTGTAAGTTTAATTCACGAGCAATTTCAATGAATGACTTTCC
AGACTCATGAAGAGTAAACACCACAACCTCAGTTCTCATAATCAATCTCATGTTATCGAG
TTGGTGCCATTATATACATCATTTTCTGATTGTGTTTTGCGTGCTTTCAAAATGAAGAAA
GGGGGCCGAAGCCCCTTACGATTATGGGTATGTATAGATGATACCAGTTTCCAAAGCAGT
TTTATGGATGATGTATCCATTACGTGATTCCTGAACATCAACTTCCGGATAGTCTTTCAT
CATCTTCTGAAGAGTGTAACGATGCAGGTAGTATTTACTATCTGGATCTTCAGTTTTCCA
ATCTTTACCTTCTTCAGTCATTTTTTGGATTTCATCAATAACCCACCAACCGCACCAAAT
GTAAGCTGAAGTACGATGTGGAAGAGGATGAACATAAGGTAGTTCACCTTCTGGTTCTGG
AGCAACTTTATCAGTCACTTGAACTTGACCTTCTGCTGTAATAGTTTTGCTATCGTAATC
AGTTGCAGTAATAGTTGCAGTAACTTCAATAGTTTGACTTCCAATAGATGAGGTATCAAC
GGTATATACATTAGTTGACCCTTCTACAGGAGAAGAATCTTTCTTCCATGAATACACAAT
TTGCGCTTCTTCTGGAGCATCAGTGACATTAGCGGTAAATGTAGCCGAAGCATCTTGTTG
AACATTAATAGAAGGAGGAGTCAATGTAACCTGTGGATTCATTGTCTTCTTATTAACTGT
TAATGATACTTCATTCGAAGTAACTTCCTTTTCATTGTAATTTTCAGCAGTTACTTGGGC
TACGCATTTAATTCTTTTTACTCCACTTGTAGTTGGAGTATAGCTAAATGTAGAGTTAGT
TTCTCCACCAACTTGTGAATCATCTACATACCACTGATACGTAGCAGATGCTCCATCAGG
TTGAGAAGCTAAGGCAGCAGTAAATTGAACTGGGGTTCCAATTACTCCAGCTGAAGGACT
ATCGGGAGTTACTGCCAAAGTAGTTGTCTGTGTCTTTTTATTAACAGTCAGTGATACTTC
ATTAGAAGTAACTTCTTTTGCGTCATAATCCGTTGCCGTCACTTGGGCTACACACTCAAT
TGTTTTAACTCCGCTTGTGTCAGGAGTGTAATTGAATGTAGCGCTAGTCGCTTCGCTCAC
AGGAGAACCGTCAACATACCACTGATACGTAGCAGATGCGCCTGATGGCTGCGAAGCCAA
AGCAGCGGTAAATTCAACAGCTGTTCCAATTACTCCAGCCGCAGGACTAGCAGGAGTTAC
GACTAAGGTAGTCGTCTGTGTCTTATTTTTAACTGTGATAGTTGTTGTCGCTTCAGCCGT
TTCCGGACCTCCTTCAGAAAGTGTATTTGTTGCAACTACTTTAATAGTCTTTTGACCGGC
AGGTCCTTTTAATACATAATCAAAAGTTGCTTCAGCTCCATCTTGTGGAGCATCATCTAC
AGTCCAAGCATATGTAATAGTTCCGTCTCCAGTTTGACCACTGGGTGTAGCAGTAAACTG
CTTAGTTTCATCAATAACCCCTGTCGGTGTTTTAGGAGTTATATCAACTGTAAAAGCCAT
AAGTTATCCTTATTTTAATGTTACGAAAGAAGAATTGCGTGTTTCACGAATTAGAACTGA
TCCGTCGCGGTTAATGTAATAAATTAAGCTAAATAAAGTTTGGTGTGCTGACGCATGTTC
AAAACTTGTTGGGTGAGATTTCCAATCTGGAGTTTCAGCAATCCATTGATAAATCCACCA
AGGAACAGTGCAGAATCCTGGATTTTTTCCAATCAGCTGAAGATTTGGGCTAAAGTTTTC
TGGAAGAGTAAATACAGACGGCTTTTCAGATTCAATAATCTCAGCTACAGCCTGTTCGAA
TTTTTCTTCAACAAAAGGAGTGTCTTCAATCAAAACATCGGTATTTTCAGGAATTTTATC
CGTTTCTACTACTTCAATTTTAATGTCAGATTTAACCGGAGAATCAATCAAAAGTGCTGC
TTCCGGATTGACTTCTTCATCGTCATATTTTAATCCCTCTGCGGCATCAGCAGCATCAAT
TAAGTCTTTAATAGATAACCCATCAGTCTCTGGCATAGGTTCACTAGCGAGCTTCTGGAG
GGCTTCTTCAATATCAACAACGATATTATCAAAAGATTTATTCTTTTTGACCTTTATACC
AAACTGTTCAGCATATTCAGCTAATTTAGCTTTAGCTTCTTTGTTATCATCAAGAGCCTT
CAGCTCTGCAATATAAT

[0136] In another aspect, the invention provides an SFNHSI bacteriophage targeting a Shigella spp. bacteria. In certain embodiments, SFNHSI binds a molecule of OmpC. In certain embodiments, the SFNHSI bacteriophage has a genome comprising a nucleic acid sequence comprising SEQ ID NO: 8.

SFNHSI
(SEQ ID NO: 8)
TATTATTAAGTAAACTCATTATGCAATCCTTATCCAACGGTATACAGTAATAGACGGTTG
AATATTACTAATATTAGTAGGAGGAGTATGTGAAGAGTTTGTTGTTGCGTAGTCTTCACG
ATATTTTGTATATATAGGACCAGTTTCGTCTGGGTCATATTGACATCCTCCAATAATAAC
TGATCCATTTTCGTCTTCAATTAAAACTCTTTCATCAGTTTTAGTCGCAGGAAGATTTGC
GTTTTCAAGCGTTACTGATGTTGTACCAACTGTTCCACCGGCAGTATGTGAAGGATTTCC
GCTAGAATCTAAATCATTATTGTTTAAAGCAAAGTTTGGATCCGTAACATCATCATTCCA
TCCTACTAAAACTTGTCCTTTACCAAATAATTTCCATGAACCAAATCCCATATAAGTCAC
CGGATTATTTGGGTTTATAGCATTTTCATAAATTGAACCAACAGGATAAATGCTGTCGAA
AATAGATGATATTGAATTATACGTTCTAGTATAAGAATCAACTTTTTCAACATTTGGCCA
ACCGATTTTATCAAAATCTGTTAAGGCTACATCCCCAGTAACTTCAGTAGATGATCCTTT
ACTAACATAACGGTCATCAGTTAATTCAATAATGTCATCTTTTTCTAAAAGAGTTCCTAA
ATCATTATTAAACCATGTTATAACGATTATATCACCTGATTCAAATTTTCTATCAAATAA
AAGACTGACAGGTTTTCCATCTTCATATTCTATAGAATAATCTGTGTTCGATTCTTTCCA
TTCACCACCAAGAGATATACATCCTGCTTGCGTATCTGAGTTAGCACCTTCACACAAAAA
CAGAGGATATCCTGCTGTTCCAGCTTGTTGTTGTAAAATTCCATTAAAACGAACTTCAAG
AGAATTAGGATTAATAGGTTCTCCAGGAATTAATCCAAATGCAGAAAATGGAATTGATTT
CATTGTTGATAAATCAGTAACGTAAATACTTCCTTCTAAAGACGTTTTTGACGTTAGTTT
TGAATCCAGTACTTTTATTTGGCGTCTTGTATATGAACTTCTCCATTGTGATACACCATC
CATAAATGTTTCAATTTGAACAGTGTCACCAATATTACAAGGCTGTCTTAACCTAATATT
AAATCCATCAAGAGGAATCAATTCTCCTTCATTTTCTCCGGGAGAGCCAAAGTCACTGTT
TTCACTAAATACATCGCCGTAATATAATTCATTACCACGGTGTTTTACTCGGATGTTATT
AACATTATAGCTAGTTCCGCGGAAAACATCTAAAAAGTCTGTTTGTCCTTGAACTTCGAC
TAAAAATTCTTTACGTGCTACATTACTAATATCTGAACTAATAATTTTGTCAATTTGTTT
GTTTTTGACATATTCCCAACGTCCTGGAGCGCAATAAACGAGCTCTAAATCACTAAATTG
AATATTAATTTCAACTGACGATGACGACCCTTTAATTGTATCCCCAGAAGCAGCTACTAA
AGTAACTGGATTAATGTTCCATGTTGCAAATACATCCCTAGCTCTAATTACTTTATTATA
ATCATTAACAGTTCCTTTAGGAAGTTGTAAAGTTACTCTTCCAGAAGAGGTATTAATAGC
GTATGATTTTCCCCACTTAGCTTTTAATGTTTGACCGGATGAAGCATTATAAGTTTTCCA
GGCACCGGCTGAATATGGAACATCTCCATCGCCAAGTTCATAATAAAGTTCATCAAAGTT
TTCATTTATTTTTATACCACCTTTACGCAGGTAGTCACCGGTACCATCATCAACAACATT
ACCGATATTAATATTTTGTTTCATTATTGAGCCACCCCGATTTTCTGCGTAGCGATAACT
TTAACTGCTGCTCTCATGCCAACGGTAGAAGAACTTATAGTCGCCGTTACATAGTTGGTT
TTAATACTAAATGCAATATTAGCAATCTCGTCTTCTTCTGTTTCATTTCCAACTCTCATG
ACAGCATACTCAGAAGAAATAACTTCTGAATTAACAGTATCCACAAGAATATTTATTTCT
GCTGTTTTAATTTTTCTTCCATCTACTGATTGGCACGTAACTAGCAATTTAGCCATATTG
TATTCAGTGCGATGAAATAGTGGAATATCAACTGATCCGGATGTAGAAATATTCCATGTA
CCTTCAGCTGGTGATTCCTTTTGTCCAAACATACTTTCAATAGAATAATTCCAAACCGAT
GTAGAATTATCAGATGAAATACAGCGTAAAGTTACTTTACTATATGGGCTAGTTACTACT
AAATTACCTGAAACACCTTTAATTGAATCAATAGCTTGAATCGTTAAAGGATTAGTAACT
GATATTGATCCATTAGAGTTAATGAATTCAACACAATCGCCGAGTTCGCCTCTTTCAATA
ATAACTTTAACACCTACAGTAGAGGTATCAATATCATGTCTAGTGCCAACTTTCACTGGA
GTTGCGTACTCTGTAATAGAGTGTTTTTGATAATACCCAGTAGCATGGATAATTTGACCA
TCTGCTCCAGTGCCATTTGCTACTGCCATTTTACGCTGATCGCCAAACGCATTATAAATT
GCGTTAAAATCACTATTAATTTTATTACCACCGTCGAATAAGATATCACCAGTAGAAGCG
TTACCAATTTCGCCGGTATCAATCAATTTCTTTGGTTCTTGAATGAACATAGCGGTTTCC
TTATGAGTTTATAGTATTTATAAAGAAAAAGGGAGCCCATGGGCTCCCTTAATTTAAAAT
GTAAACAGAATATTGATTTCTTCTGTCTGATCCATTGCCATGATAATAGGTGGCCTATTT
TCCATATAAATCATTTCGCCCGAATGCCTCATTAAATCTTCTGGGTCATAATAATCCTTT
TCAGCTTTAACGTTTGGGTCATTTGGATGAGCTTTAGCTTCAAGAGGATTCGTGATTATT
GATATTTGTCTAAATCCTTTATTTCCTGGCAATGCAGCATCAGGAAAATAAACTGAATCT
AAATATGCTTTAAAACGGATAGTATTTGCCTTAACCCGGTAAATTAATCCAAAATCATCT
TGCTGCCAAGTGAGATTATCTTCATACCCCCATCTAGTTGGATCTTCTTTTAATTCCTCA
GGCCAAGGAACTACGATATATTCATTTGTGCATCTATTTATAGATACATCGGGCGGAATC
TCAAAAAGATATTCCCAAACATATCCGTCTCCAGGTTCGATTGTTCCTTCCGCATCTCCT
CGACCTTCAGGAGGAGTCATTGACCTAACAGAAGGAGTCCATTTTCCGCCTAATTTAAGG
CATTCATCCTTATCAGTTAAAGATGCAATTGAACACATTCCAGTATCAGGAACATCTAAA
CAACGATATACTAACCAGCCTGCGCCTGATTCAGTAGCGTTGTAAGGAGCTGAGTTACAC
ACTACAATATCGTTAATTCTAAATGTGTATGGATCCGGATATCTAGTATCTCCCCAATCT
CGACGAGGAATAACTGCGTCAAGCATTGATGGAAGAACCTTTACTGTTCCCATCATATGC
GTCCACATGTCAGTTACGCCTAATACAGAATCGGTTGGATAAGGTGGGGCAAAGCCCACC
TCATTTTCATTTGATGACCACGGTTCTGATCTTCCAAATGTGATAAAGATAGTGTTTTTA
TCCGGACCACTTCCAATTGAATTATAAAAATTCAACATTTTTTCTGTTCTAAATTTTGAA
GTAACTATCGCACGATAGATAACACTTGAATCATTCATCTATTTTAACCTGTGTTGGATT
TTCAGGGTCTCTTGGATTTCCTATATTATCTTTTAGACGTTTATTAACTAAATCCCTAAA
TTGCGTAAATGTTGTTCCAGAAGCATCAAATAGGGGACTCATTAATTTACGTCGTTCAGA
CGGCAATTGACCTTGAAATATTGAATTATTATTTTCAGCATTATAGTCATCAGGAAGAGG
ATATTCTACACCAGCCATTGGGCCAGGCTCATAAATTGCTTCGCCTGTTACTGAATCATG
CTCAATTTCACCGGTTGGAGTTAATTTAGCTACTCTATCAGCATATTCAGTAGGCAATCC
AGAATCCCATTTATAGTTTTTATATTTATTAATTATTGTCTCTGTGTGTTTAAGAGTTAA
ACCAACATTAATAAACATCGTTAAAAGGGTAATTGCTATAAATCCAAATCCTACTGGATG
AACAAAACGAATAACGTCAGATTTCCAGCGGGAAGAAGGTAAATTGGATTTAATTTTCAT
TACATAGTATGATCTACTTCTATTAATATAGTCTATATTGTTTTGAAGCAAATCCTTTCC
TTTAACTCCACGAATAATTTCGCCTTCAAAACTAGGGAGTCTTTCTGCTTTAACTTCTTG
ACCAGCAATTAATCTTCCTAAAAGATTATGAATAGTTACGGTCCATTGCAATTTACCATT
AGAATAGCTTCTTTCTATATAAGTAACATTACATCTTCCTGTTGCCGTATAAATCGTTTG
TCCTACTAAATCTTCAGTCAAAGAATCAGATTGAACGATTATGTCATATTCAGTACCGGC
CCCAGATTCAATTTCAATTTCAACTTCTTCATTATAAAGAACTTTAAAAAGAAACTTGTA
TGATGCTTCAATTCCTTTAGTAGAATAAAAATCATAGCTACGTGATTCAAAGAATCTCGC
AACAGCATCACGTTTATCAGCATTTAAATAAATGTTTCTTTTATATATCTCTGACCACAA
ATATTCCCACGCATGCTCTTCTCGTGGATATTGGTTACGAATTAAATTTCGTAAATTGTT
ATACTGAGTTCCATATCCGTCAGAAAGATATTGAATATATGCTTCACAAAATGCCTCAAA
ATTAGAATCTTGTAACAAGTAAGAATCAGGCATCATTGTGCCAATTAATGGTCTTAAATC
AGGGTCAGCTAATCCATGCTCTTCTTCTGGCGACCAAGGAGTTTCGCGCTCTTGGTTTTG
TAAAAATGCTTTTAAAAATACTTCAGTTGGCTTCCAAATAATTTCTACTGTATCTCTCAC
ACGATAGTTAAAATCATAATAAGAAATTATTTCGCCAGAAGATTTGTAGAAAAGCATTCC
TGATGCGTATTTTTTAAATCCGGTGAATTTAACATTTGGCATTACTATCGTGCAATCACC
ATCATCCCAGTATTCATGAACTAATCTATCTGGTGATGTTTCTGGAATATTTTCTATAAC
TTTAGTGTATTTTAAATCAGCATAAACTACTACAGCTCTATCAGAGTTGTTTATCCAACA
TCGTGTGTTAGATTTTTTAGACCAGTTAAAGAACGGTTCTGCGTAGTATTTCATTGGTTG
AGGAGTAAAAGTCTCCCAATCAGATTTTTCATCCGCTATAAATGCCATCATATGATAATG
CTTATCAGCTAACCATTCACGAGGAAATTCATATTTAACAGCACCGATTAACTGATATTT
CACCACAGTTTCAGGGTCATTAACAATGTTATCACTTAAAAATTTAAAATTACTCGAAGA
TAGAGAAACTAATTTACCGTCAGTTGACATATTCGCATATCCGGGTTGAATACGTCTTCT
TTCTTCTTCGGTATTACCGAAAACTCTTTTCCACGTTTTCGTATCATGGTTTAAAACATA
TATTCCTTTATCAGCAGAATCAATTATTTTTGATGTTCTAGGATTGGCATTTAATGTTTC
AACTTCACCAATAATAAGAGCAAAAACTTTATCACCAACAGAATCCATTTTATAGCATAC
TGCTTTAGGATTTCCGGTTATAGTCATGGTATCAGGTTCAAAAAGTCTTTCCGAATATGT
TGGAGATAATGGATCAGAATCTATAGGTGCATTACTCGTTTTTATGTATCTAACTTTGTC
TCTGGCGACAACGTAAATGTAATCATCGGTGCAAGTAATAGCTTCTGCAATGCGGTATAC
ATTCGCTGGTAAAGTCGCATAAGTGGCAAAAATTTCTACATCAAATCCTAAATGTAATTG
GTCGCCAAGTTTAGCGAATGTTATATCCTGTGAACTGAATCTGACATCATCAGCTGACCA
TCTAACATCAGTAGATTTGCGGCCATAGAAAATCTTGTCGTATCCTAGAACGTATGTAGT
GTTCGCAGATTGGTAATATACTGTCTTAGATAAAGGATATCCTACACGGTCATTGAAGAG
CTTTACAGCTTTCCAGGTTTGTCCTTTATCATTAGATACTTTAACCACGGGTTGATAACG
CTCAAAAAGATATAGAATCCCTTCTGATTCCATCAAATAAACTCGGTTAATATCCTTACA
TACTTGCTGAATGGAACCTTGTATTTCATGATACTCATTTTCACCAATAATAAAATTACT
GATTGATGAAACATCAACATATGATGGGCTGAATTGGAACGATTCATTCATCAATGCAGC
CATTATAGTGTCATTATTAAAATTGACATAATTAGAATTGTTAAGAGTAAACTTTTCCTG
AATGAATTTATTGGCTAATTGCATTTCAATCATGTTTTGAAATGTGTAAGCATTCGTAGC
AAAAGTTTCAAACTCTTCAGTATAAATCCAATCAGACTGCTCAAAATCCTGCGCAGCTGT
AGCTACTCTAATAATGTACGATGTTAATGGATTAGCATTATCAAAAAAGAAGCTGTTATT
TGCAGTATATCCTAAGTTAATCCATCTGTATTGATTGCTCGGGAGATTTTCTCCCGAGTT
TGTTTTTGTCTCAGCGATTTCTACAAAATAGTAGAAATTAGCACCAACGTCATCCCAGCG
TACTTGCACCTGATTTGCGGATAACTTGGAAATTCTGAGACTAGTGACTGAAGGTGCTTT
TACTGTCATTGTGATATAGGCTCCAAATCGATAGTTAAGTATTGTGGACGTAAATCATTT
TCAAATACAATCAGTGAACCATCGCGCGTGAAAATAACATCGTCTATTGGATCAGAATAT
AGCTCAATAGTCTGAACCTCAAATTTATCGGATGTTAAATTAATTTTAGCGATATTCCAA
TAAATCATGTCAGCTGGATAATTTATTTCACCGATAACATAGTATTTGTCACGTCCATCG
GAACTTGCTAATTTATTAAAATCATTGCCTGTATATGGCTGAATGTTTTCATTTTCTGTA
ACATCGCCAGAAGCAAATGGACCAATAATAACTTTGCCAATTCCTTTAGAATCTCGGTCT
GTTGATACTATATGAACGTCATATAATACATCTTCTTCTAAACCAGTATCAGGATTTACA
ACCTTTCGTCCAGAATTAAATGAAAACGTATTAGATTCCATAGAACGATCTTTTATTTGA
TTATTGTATTTAATACCCGCTTCAGGCGTTTTATAGAAGTTTTGTACTTCACGAACCATT
TGAATAGTCGCTGATGAACCAATGACAGAATGATCTGCATCATCTACATATGTCAACATC
TTAGATTTAGCGAAAGATGAGTTAAAAATTTCTACATCTTCTGTATAATAGCGATCAATT
TTATCAATTATTTGACCTTCAAGCCATTGCTCGGATTCTTGCAGTTTATTTAAAGCATAT
GTGACTTTTAAATTAGTCTTAATAAAAAGATAATTAGGAGAAATAATTGATGGCGTAATA
GGAGCTAAATTATAGTCTTTGAGATAATTTTTAATATCTTCACGCTGTACGGTAGTTAAA
TACAGACCTGATTTAGGTTTGGCAGCAATGAATGCATACCCAGGTTTAGTAGAATCAGTG
AAAGTTTGAACAGCTTGAATAATAGAACCAAATCTTTCTGAGACAAATGTATCATAATCT
GTCGCAGTTACACATCGCTGCTGAGTTTCACGCTTAATAGTACCCAATTCACGAATACGT
TCAATATCTTCTGGATCACCACCACCATCAGCACCAACAAAATCTGGGTCATCGTTTGGA
TTTTCATTAATATTGATGACAGTTATATTTGTTAATGTATCTGCATATGAAAATCCGACT
GCGCCATTCGCATCTGCACCGTTAGTACTGATGTACTCAATAACAATCGTAGAGTTCTGG
GTAGGTTTAAGACCTCCGATATAATTAGCGGTCAAAGCTCCTTCAGAAGCATTAACAGAA
ATTTCACCTTCGCCAAAATAGAATTCAGTGTTTCCATCAATAGTTTCACGCATATAGTAA
ATCGTTGATGTTGAACCAGCATGAACCATTGACTTTCTCGTCCAGTTAATCCATTCCGCT
CCATCAACATATAATTTAACCTGGTTTCTATCAATATTTTTATCATAAATGATAATAGGT
GTTAATTTATCATAAATGATTTCAGTTCTTACTATACGTCCCTGGGCCAATTTCAATCGT
GGAAAATATTGGTTATTTTTATCACGAATAGCAATAACATCTTCGGTAGATACAAAGTTA
TAAGGATTAACAGAAGTATCCTTTGCATATGCTAAAAAGCGAGTTCCGCGAGGAATAGTA
ATGTAATTCCTATTCAATGCGTCGGTGCATGTTAACATAATTTCGGTCTGCGCAGCGGAT
TTTGAAGTAGGTAAATATCCGTTATCTTGTGCAGCTTGAACAACTGAACTTCGTAAGTTA
GCAGTACGCATAAAGCTTTCATACACAGCAGCATTACCAAACTGCTGAATGTATAATGTA
TTATAAGCTAAAAGGTCACACAGAACGTTTAATCTTGAGCCTTCAAAATCATAATCCAAA
AATTCATTTTGGCCATTAAGCCATTCAATGAGGTTTTGTTTTATTTCAGCAAACGTACCC
CCGACGAATATCTCGGGAATAGCATTTGCTGTTCTTGTTAATTGATAATTTACAGGGGTA
TTTGCCATTTTAAATCCTATTTAATGAATACTTTAGATGATGCCTGAGCCACAGTATCAC
CGCATGATATTGGATCAGCCATTTGAACAGCTTTCTTTCCCGTGACATATACCTTAGATG
TTCTAGGTTGTGTCACTCCGCCATGTGTTTCATATGGCTTTTTAATTTCTGTATGTTCTG
TAATTGGATCGCCTGCTACTAGAACAGCAATTCCTCCAGTGAATACTTTACTTTGTGTAG
CATTCACAACTGTTGGAGGCCACGCTTCATGGCCAGCAGTAACACACTTATCATAACTTA
ATCCTGACATTTATGGCCTCTCATACACATAGCTTCTCAATTTATTAGCCCAACGACTCC
AATTTCCAACTATAGTTTTAGTATAATTTTTAACGAGAGTTTTTCTTACTGGAGCAGGAG
GATCCGTCGGTTCAGTAGTATCAGAAGATGACCTAGAATTACTGCCAGAACCTCCAGATT
CACTTTGTTCTTGGTAGTCATATATTAATGTTACTTCGTAAGTGAATGTCTTCTGGAGAT
TTTGAGGAGCTTTCCACAAATACAACTGAGTATCAGAATCAGTAGGAAGTTCTTCCCATG
AAGCAGCAGTTTTAAATTCATCGCCTAAACGATATTTCAACGCGTCATCTCCAAATCCAA
ACACAGATTCATATGTTCCATATAAGCGATTTTCTTCTACTAAAACCCCAGGAGTTTCTT
CGTAACTAGTTATATTTATAGATACTAACGTTTCACCTGTTTCTAATTGAGCGGTAAAGG
TGACGTCGATAGAAGAACCTTCCATGGATTCTCCTAAATCAGCGCTCATTGGAAGTATAT
TAGCCAATGTCAATCCTCGATCCATCAATTGTGTATTGACCAGATGAAATAGAACTCATA
GATGCCATTTTTTCTGTCCAATCACCACCAACGTCCCAATCAACTGTCCCAGCAACTTTC
CAAGAAAGATTTCCATTTACTGTATTAGTTTGATTACCTTCAACTAAAGTGGTAGCATCT
CCTTTAACTGTAATGTCAGCATTACCTTCAACTACAATAGTAACATTACCTTTAACTAGG
ATAGTTCCATTACCTTCAACCGTCTTAGTTTCATCGCCACGTACAAATATTGTATTGCTT
CCATCGATTTGATGTAAACGATTATCCATGTTGTAATAAATTTCTGATCCACCGACGTTA
GTCTTTTTATCACCGGCTACCAAAAAATTACCATCAGCATTTGTTATATCATACAAATTA
TCAACAGTTTTTCTTGTTCTTCTTCCTGACGGTGATACTTCTTCATAAGTTCCAGTTGGA
TGAACTAATCTGTATCGTTCTTGCCCAGGGGTATCATCAAATTCTTGGATATGTCCACTT
TCAGTTTCCATCGTATGCACATAAGGATACTCACCTTTATATGAAGAAACTGGTTCTTTG
AATAAAATTCTCGAGTCATTTGGAATAGGAGGATCAGCAGGGTCAGAAGATTTAGCTACA
GTAGCAGCCATTGCAGATAAAGACCTAGCTGGTGTTTTCACTTCAACACCATATGATTCC
AAATTTCCCGTAAGAATAATCATGGTAACACGGGATGCACGACCCTTTGTTTGTTGATAC
CACAATGAATCACGACCGGCTTTATACGCTTTTTCCCAATCTCCTGCTAACATAGCAGTT
AACATTGTGTTAAATTTAGCTACACCACCAACACCCATCTGAAATGCCATATTTTCTAAC
GCCATTTGACGAGAACGGTTGACAGCTTGCCAGACTGGTCCTACTTTAGAATGTGATTTA
ATGTCACGTTGCATATCAGCCAAATCACGCTCAAATAAAGTCGTCGCCTCTTCCATTGTA
ATAGAACCTGGATTTCCTGTAATTTCACGACCAACTTGTTTTGATAAAACTTTATTAATT
TGAGCCATATCACGAACTGGCTGCTTCATGATAAGATGACCAATACCAATTGTCGGATAT
CCTTCGGTATCCCAATAAACTTTTAATCTTAATCCTTCATCACGGCGAAGCATTTCAGCC
ATTGACATATTTGGATTATCATCGGTTGGAATCTCTGATAGTGGTCTATCATCGGGATTT
ATTGCGGTGTCTAAGTTACTATCTTGAATAACGTTAGAAGAGGAATCATATCCTACTTCT
CCGCCTTGGTTTAATACGTTCGTATCATTTCCTAAACGTCTAGGATATTGCCCAGTTGGA
TCAGAAAATCCTTCAAGTCTATTCGGTTTTTCGCGAACTATTCCACCATACGTGCCAAGG
ACAATTCCATTAGTTTTCCATTTGTCTAAAAAATGACCATAAACTCTAGTTCCTTCTACT
GGCCCTGTAACAGAACCTCCAATTCCTGACATCGCTGCAGAAGTTATAGGTTGAATAACT
GACATCCATGGTAATTTTTCAGTTGGAATACCCATTACATCGCCTTGTGCTCTTTGAGGT
GGATGTAGACCAACCACACGAACACGAACACGACCTAATTTTAATGGGTCCATTCTATCT
TCAACAACACCAACAAACCAATTAAGGTTATTACTTATCATTTCCATAAGATTTCTCCAT
TATACGTATAAGGTCGTTCATAAATGAATTAATGTCTGATTTTGCTATTATTTTTATTTG
ACGAAGTTTTTCATTTTCAAGAACAGCAGCTTCATACGTATCGACCGCAGCAAGTGCTCC
TTCATATTGAGGATATTTTCTAGCTTTATCACCTTTGTCATACCAAACATATGGATTATC
ATCGTATGATATTAAATTATAAAATTTTTCACCGTTCTCATTTACATGATATACTATTTG
GTCTCCACCTACATTTTTGTATTTTTGTATAGATGCTTGATAAGCAGCTTCTTGCGAAGT
AATCCATCCATAATACGGGTCATAATTATCATTACACATCAATAAAACCCAATACAACTG
TGGATTTCCATATATAGTATTTGCTAATTCTTCCGGGCGTGGTGAACCTTTAATATAATA
AGTACGTAAGCGGTATCCCGCAAGAGCACGTTTGAAATAGTCTTTATAGTTTCTAAAAAT
ATCTGTCATAGGAATAGTCGGCGCGTTTTTATTCACCGTTTTGGCCGCATATTCAATCGG
ATCAAAAAATGTAAAGAGCATGGGCCCTCCTGTTTATAAATATATTATCTATTTATAAGG
AGAATCCAATGGCATATTCTGGAAAATGGGTTCCTAAAAATATATCAAAATATAGAGGTG
ACCCTAAAAAAATTACGTATAGATCAAATTGGGAAAAATTCTTTTTTGAATGGTTAGATA
AAAATCCAGAAATTATTGCATGGGGTAGTGAAACAGCAGTAATTCCTTATTTTTGTAATG
CAGAAGGGAAAAAACGTAGATACTTCATGGATATTTGGATGAAAGATTCTTCTGGACAAG
AATTTTTTATTGAAATAAAGCCTAAAAAAGAAACACAACCACCAGTTAAACCAGCACATC
TAACAACTGCAGCGAAGAAAAGATTTATGAATGAAATTTATACATATTCAGTTAATACTG
ACAAATGGAAAGCAGCACAATCTTTAGCTGAAAAGCGTGGAATAAAATTTAGAATTCTAA
CAGAAGATGGATTACGAGCTCTTGGCTTTAAGGGGGCATAATGGCTATTTTTCAAATAAT
TAATGAAAGCACTCCCCAAGTTCCAAAGGTTAAGCAATCATTAAACGAAAAGAAATGGAT
TCAGATAGGTCTTGAATATAAAAAGGCCAAAGCAAAAGGAATGACAGGAAAGCAATTTGC
TGAAGAAAGAGGAATCAAATACTCTACGTTTACTTCGGCAATGTCAAAATATGCTTCAGG
AATTAAAACGGCTGAAAAGATTCAAAAGCTTGAATCAAAACCAATGAATAAGCTCAATAA
GCAAGAAAGACAACTGCTTATGATAAATTCATTCAGGCAAACATTGCGTGATAAAATTCG
TAATGAAGGCGCAGCAATTAATAATAAAACCAGAAAGTGGTTTGCTGAAACTATTAAGCA
AGTAAAAGGACATAAAGTTGTTCGCCCGCAGCCGGGACGAATATATGCTTTTGCTTATGA
TGCTAAACACAAGGAAACTCTTCCTTACTGGGATAAATTTCCTTTGATAATTTACCTTGG
TTTAGGTAAGCATAATTTAATGTACGGATTAAACTTGCACTATATTCCACCTAAAGCTCG
TCAGCAATTCCTAGAAGAGCTTTTAAAGCAATATGCAAATACACCTACTATTACTAATAA
AACGAAATTAAAAATTGATTGGAGTCAAGTGAAAGGATTTAGGGGTGCAGACCAAATGAT
TAAGGCATATATACCTGGTAATATTATGGGTAGCCTTGTTGAAATCGCCCCGAAAGACTG
GGCGAACGTTGTGTTGATGCCACTTCAGCAGTTCGTTTCAAAAGGAAAACGTTTCTCTGC
AAACAAAGTCTGGTCAAATATCTAATTCTATTATCTTCCATTCTTTTCTGTTGTTTGTTC
TAAATGGAATTGAATGGAAGGGACTTAGACCCATTATACCACCAACAGTTATAAAGCATT
ATGAGGAATATATGTCGCAAGCTCTGCAACAAATTTTTAACCAAGCAAATACAACTAACT
TTGTAGTATCAATACCACATAGTAATACTACATCTGCTTTTACTTTAAATGCTCAGTCAG
TTCCTATTCCAGGAATTAGAATACCTGTTACTGATACTGTGACTGGGCCGTTTGGACTGG
GCCGAGCACAACGTCCAGGTGTTACATTTGAGTATGATCCACTCATTGTGAGATTTATAG
TTGATGAAGAACTTAAGTCGTGGATAGGAATGTATGAATGGATGCTAGGAACTAGCAACT
ATCTTACAGGTGAAAATACTGCCCAAAAAACAGGTCCTGAATACATTACGCTTTACATCT
TAGATAATAGCAAAACTGAAATCGTGATGTCAATAAATTTTTATAAGCCTTGGGTTTCTG
ACCTATCTGAAGTAGAATTTAGCTACACAGAAGATTCAGACCCGGCTTTAGTATGTACTG
CAACGATTCCTTACACCTATTTTCAAGTAGAAAAAGATGGTAAAATTATAGCAGAAGTTT
AATGCTTCAGTTTTGTGTGTTATAATCTTAATTAAATTTGAGGAGAAACACATGAAACTA
ATCTTTTTAAGCGGTGTAAAGCGTAGTGGAAAAGATACTACTGCAGATTTTATCATGAAT
AATTATTCTGCAGTTAAATATCAACTTGCTGGTCCTATTAAAGATGCATTAGCTTATGCA
TGGGGAGTATTTGCAGCAAACACTGACTATCCTTGCTTAACTCGTAAAGAGTTTGAAGGA
ATTGACTATGATCGTGAGACTAATTTAAATCTGACTAAATTAGAAGTAATCACAATTATG
GAACAAGCATTTTGCTATCTTAATGGTAAAAGCCCAATTAAGGGTGTGTTTGTTTTTGAT
GACGAAGGACAAGAATCAGTTAATTCCGTAGCATTTAACAAGATTATTGACGTTATAAAT
AATATTGAAGATCAATGGTCAGTCCGTCGTCTGATGCAAGCCCTAGGTACGGATTTGATT
GTTAATAACTTCGACCGCATGTACTGGGTAAAATTATTTGCTTTAGATTATCTTGATAAA
TTTAACTCAGGTTATGATTATTATATCGTTCCTGATACTCGTCAAGATCATGAAATGGAT
GCGGCTAGGGCGATGGGTGCTACAGTAATTCATGTAGTTCGTCCTGGTCAAAAATCCAAT
GATACACATATTACAGAAGCTGGATTGCCAATTCGTGATGGTGATTTAGTAATTACAAAC
GATGGTTCTCTTGAAGAACTTTTTTCTAAAATTAAAAATACACTAAAGGTACTATAATGT
CTGAACAAACTATTGAACAAAAACTGTCTGCTGAAATCGTAACTCTGAAATCTCGTATTC
TTGATACGCAGGACCAAGCGGCTCGTCTGATGGAAGAATCTAAAATTCTGCAAGGAACTT
TGGCTGAAATTGCTCGCGCAGTAGGTATCACTGGCGATACTATTAAAGTTGAAGAAATCG
TTGAAGCTGTCAAGAATCTTACTGCTGAATCTACTGATGAAGCAAAAGATAAAGAATAAT
GGAATTTAAAGACTTTTCAACGGGTCTTTATGTAGCAGCTAAGTTTTCAGAATTAACACT
TGATGCGCTGGAAGAACTCCAGCGCTCTTTACGTGTTCCTAATCCAGTTCCTAGAGAAAA
AATTCATTCGACTATATGTTATTCGAGAGTAAATGTTCCGTATGTTCCATCAAGCGGAAG
TTTTGAAGTAGCTTCTTCTGGACATTTAGAAGTATGGAAAACACAAGATGGATCTACTCT
TGTACTTGTACTAGATTCTGAATATCTGCGCTGTCGACACATGTATGCGCGGGCGCTAGG
TGCTACACATGATTTTGACGATTACACACCGCATATAACATTGTCTTATAATGTTGGGCC
CTTATCATTTAGCGGTGATGTACAAATTCCGGTCGTATTAGATCGTGAATACAAAGAACC
TCTTAAGCTTGATTGGGCAGACGATTTAAAATAATTTCACAAAGTTGTTTACACACTGAT
GAGGTAGTGATACTATTACCTCATCAAAATTAATTAGGAAAAATAAAATGAAAACTTATA
AAGAATTTGCTACAGAAACTATTATCACTGAATCTTCTCATGGTATGGAAGTAAAGCTTG
GAATGGCTTTAGCTGAAGCTGAGCGTCTTTTCTCTCGTATTAAAGAACTTGCTGCTGCAG
TCGATCCTTCGTCTTTTAAAGGAGACCAAACTAAAGTTAAAGCACTTTTAGCATTATGCT
CTGACGCAGGAGAAATCGCTAAAAATGGTTCTAAGATGAAGAAACGATTAGAAGATTTAA
AATAATTTCACAAAGTTGTTTACACGGGGTTTTAGTAGTGATACTATTACCCTATCAACT
ACTGAGGAGAATAAAATGAAACGTTGTGAATTAATTCGAAATGTTGCTATTGCAATTTCT
GCTTCCGCTTTTAGTTTTTCAATGTTTGTTGGATTTATATGCGGATTATTAACTACAGCA
GAAAATGTGTTTTCGCTTGTAGTAGCATTTTTAATTGGTTTAATCGCTATCGTTATGGAT
AAAATTTCTAAAGGTGAATAAATGAGTATTAACGAATATTATGTTTATGCCGGGGATTAT
GCAAATCCTTCTCATTTTGAAGGTAATTTAATACCTGATAAAGTTTTTAATACTCCTTTT
GAAGCGTGGAGTTGGATTGAAAGTAAAAATGGATTTTCTTACCGTTATGTTGAAGTAACT
GATTGGAGAGGAACTAAATACCCTAAAGACCATTATTACGTAAATCCATCTAAGGTAAAT
TTTCTTTTATTCGCAGGTGATAATTATTATCCTTGCGGTGGATATGATGATTTAATTGCG
TATGCTGAAACAGAAGATAAGCTGCGTGATATCATTAAAGAAAATGAAAATAAACCAGAT
TATGATTCCAATCGTTTCGACTGGTGGCAAATCGTAAATGCCCATACTCATGCTATCGTT
GATAGAGGCTGACAATGATTCTTTATGCTAAAGTACTACCTTATAGGAATGATATTGCTT
AAATTAATATTGAGGTAGCTGAGACTATGAAATTAATTAAATCGGGTGGAACCAGATGGG
TACTACTAACACGTAAGTATGCTATTAAGTTCCCTATCCCCAAGACATGGAAACACTTCG
TGCAGGGTATGCTCAGCAATCTTACAGAAGGTCAGTGGAAGGGGTATGATAACAAGCACC
TATGCCCGATAGCATACTCAAACAGATTTGGTCTCATGGTTGTGATGCACAAAGCAGAGC
CAGTTGAGGATAAGGAGCTTTTTAAATCTGATTTGCAAAAGCTCTATAATGTTGATGGTG
ATGAATGTAGAACGCTTGACCGTGATTTCTTTGAGTATGATGCCTTTCCAAAGAACTTTG
GCTACTACAAAGGTAGATTGGTCAAGATAGACTACGGAGTGTGATAATGATTCTTTATGC
AAAAGTATCATCCATTGAAAATGGATATAAATATGATCAAGACGCGGCTAAAGCCTTGAT
TGATGATTATGGCGTTTTAACATGTTTTGAAGTTGAAAAGGTTTACATTGACCGTTCATC
TTCACAAGTTAAATTAGTGAAGGAAGACCGTAAATTTAATACAGTAAATTTTGATTTCTT
TATTGAAACGGAAAAAGGTCCTCTTGAATATGATATTTTCAAGAATCCTTTGGGTCTTGA
ATGTATTGAATATACTTACATTAATATGGTGAGCAAATGAATATTTGTTTAGGTACTACA
ATTCCACAGGGTTACGTAATTGATGTCACTACCTGGGAAAATGATGGTGACAACTATAAA
ACTAAAACACTGTTTGGCGTAGAAGAGCATGAAATCTTACAATTTCAATATCTTTTAAAG
AAGTTTAAAAGTAGACATTCTAGTACTAAAGCTGAACGTTATTGTGGTAATGGCTTGTTC
AGCGAGCAATCGCTTTTTATTTATGAATACTTGGTTGAAGGACTGTTCTCAGAACAACTT
TATCCAGAATTCATTAAAAAGGTCTTTGATATAGAAGTTGATCTTGGTAATAAATCTGAA
GAAGATGAAGAACGTGTATTTGACTTATTTTTTGTGAATGGTAATAAAGTGCTTGAAGGA
CTTATTAATATTTTAGGTAATGCTTCTGAGTATTATGATTATGATTTTTTGCGTGTAGTT
GAGAGTGTTAAATACTCTTATATAGAAGAAGAAATTGTTTTGCCGACCGTTAAAATGTTT
AATTTGCTTTAAGAATTATTTGTTATTATTAACTCATACCGCACTGATTAATACCCTCTA
TCATCAAGGGTTCTTGTTTGAGAGCCTTTGTTAATAATTGGGAATTAGCCAAGTTGGTAA
GGCATAGCACTTTGACTGCTAGATGCAAAGGTTCGAGTCCTTTATTCCCAGCGCGAGAAT
GGTCAAATTGGTAAAGGCACAGCACTTAAAATGCTGCGGAATGATTTCCTTGTGGGTTCG
AGTCCCACTTCTCGCACCAAATTTGCGGATATCGTATAATGGTATTACCTCAGACTTCCA
ATCTGATGATGTGAGTTCGATTCTCATTATCCGCTCCAATTTAATTTACTCCGTGTAGCT
CAGTTTGGTAGAGCGCCTGATTTGGGATCAGGAGGTCCAAGGTTCAAATCCTTGTATGGA
GACTGGAGGCGTGGCAGAGTGGTTTAATGCACCGGTCTTGAAAACCGGCAGTCGCTCCGG
CGACTCATAGGTTCAAATCCTATCGCCTCCGCCAGTTTTGCTGATTTAGCTCAGTGTATT
GAATAAGTAGAGAAATTTGTGATGAAAGAAGATTATGCAAAATATATTTCTCAGCGGAAT
TCTGCTATACGTAGAAACATTGAATGGAATTTAACTTTTGATGAATGGCTGCATTGGTGG
AAATCAACGGGAAATTATGATAAGCGTGGAAGAAAGGGTCATGAATACTGCATGTGCCGT
TTCGGCGATAAAGGACCATATTCATTAAATAACATATATTGCGCAACTAATAATCAAAAT
ACAAAAGATGCGAGACTAAATGCTAGATTTCCTCCAAAATCTAAAAATTTTAATTTTAAT
GGTCGAAAACACTCAGCACAGTCCTTAGAAAAAATTTCTAAAAATAATGCAAGTACCTTA
AGTCAAGATGATATAACTAGACGATTAAAAATATTAGAAAATTTTAATATGGATGAACGA
GGTTTTATTAAAAATTATGCAAACGCTATAAATGTTAGCCATACTCAAGCTAGAAAGTTT
TTAAATAAATATTACATAAAATAAGAAAATTTGGCCCTGTAGCTGGAAGGTTCAAGCAAG
CGACTCATAATCGCCAGATGGTGGTTCAATTCCACCCAGGGCCACCAAATTAATTTGGGG
AGTTATCCCGTAGAGGTAGCGGTGTGGACTGTAAATCCATTGTCATTGCGACTCGGGTGG
TTCGACTCCATCACTCCCCACCAATTTGGATGTGTAGCTCAATGGCAGAGCGATCGCCTG
TTAAGCGATTGGTTATAGGTTCGAATCCTATCACGTCCGCCAAATCCGAGGCATAGCTCA
GAAGGAAGAGCAAGGACCTTCTAAGTCCTAGGTCGTAGGTTCGATCCCTACTGCCTCGAC
CAATTAAGTGAGGAAAATATGAAAGGTAATGTTTATTTAGTAGTTCATGATTTAACATTC
TATTTTAATCATAATGACACTGTTATTTCTGAACGTGTAATTAATTTGCTTTATCAGCAC
GCAGATTATGTTTATGTCGAAAACGAATACGGTCATTGGCAATTTCTTAAAAATCGTTCA
TTTGGCTTAGATGGTTATGAATACTTTGAACATAAAGACCTTTTAGATAAAATTCCGTTA
TCTACGCAATATCAAAATCACAAGTCTTTATATAAATGCCGTCCAATTCGAAATGCTGAA
TCTGCGTATGAAGCAATTGATTTATGGCGTAAACGCCGTGAGCAGATTGATGCTTTAAAA
GAATATTAAGAAACCGGGTCGCTACCGGTAAGTCGTCGGACTGATGTTCCCTGAGTAAGG
AATTGCGTTAATAATCTTTGCGTTTATTGATGCCCTCTTACATCACAGCAGAAACGGCGC
ACCGAATTATCGATTCGAGGAAATATCTTTGCCGTAAGCCGAGTAGCGTTTTTGACGGAA
CGTTCGGATATGGTCGAGATATGGCCTTTTAAAAATATTAAGTAGCGTCAACTGCTTAAT
AACCGGGTTCGAATCCCGGCGTTTCGTACAAACACTTGCCTTAGCAGGTGGAACCCCGAC
AAGGTTGCCGCAAGGCTTAGCCCCGACCGAAAGGTTGGGGCTTTTTAGTATAAATACAGT
AGTATATTAAATCCACGAATTAAAACAGGAAATAAGATGAAATCATATGCTCAATTTTTA
AATGAAGCGGTGTTAAATGAAGCATCTAGCACCGAAATTCAAGCTGTCGCAAAAGCAGCC
ATTGCAGCGGGTAAATATTCCTATAAAGATGCTTCTGACGAATCACGATTCCAATTTGCT
CGCGACATGAAAGCAGAAGGATTTACGGGAAATGCAGTTAGTATGGCCTGGAAAAGTCTA
GTTGCTACTGGCGCTGCTTTTGCAAAGGCTTCTGGTAAACCTGCTCCTAAAGCAGATCCT
AAAGTCACACAAGAGAAAAATATCGTTAAAGGAATTATCTCCAAATATGAAGCTATCCTT
AAAGAGCTTTTAGTAATCAAAACTGAAGGCCAAAAGCTAGCTCGTGCTTATAGTTTCAAA
GATAACCCACATGCTCACTCTCTTGAGTATGTTGAAGACATCCAAAAAATTATTAAAGAC
CGCATTTGGTCTGCTAAACAAATCAAATAACATTCTTAGCCCTAGCCGAAAGGTTGGGGC
TTTTTGGTATCTAGGCCTTTCCAGGCCTCTCTAGACATCATTTAGTTTCTACCCTTTATA
ATATATTATCCTATCCTTTGATTTCCCCTCCCTGCCCTAGAATTCCCCAAAACTTTTTAA
AAATTTTTTCACAAAACTGTTTACATCCCTGTTCTTCCATGGTACTATACAACTATCAAC
TACTGATACAGAAAACAACTTGGAGAACGAAATGGATAATTACGGCGAACTGTTCAACTT
CTTTATGAAATGTGTTTCAGAAGATTTCGGTCGTACAGTGAATGATATTAAAGTTATCGG
TCCTGATCATCCGATGTTTGAAACTTATGCGGTAATGGGCAATGAAGACGGTCAGTGGTA
TACTGTAAAGGTTGTGATTAACATGTTCACTGCTGAAAGTTATGTTAAACTGTCTTCTAA
AGTTTACCATGATAACGACGAAATCGCAGAAGAATATTTCAATAATATGAAATAAGTTTA
CATAGGCTCATGATTGAGATATTATGAGCCTATAACTTTGAGGAAAACATTATGAAACGT
AACTTTAGTAAAGCTTTTTGTAATAGAAATAATTATCCTGAAGAGCTTTTTGAATCTAAG
GACTTTAAAGAGTTTAACGAACGTTCTCAAAACATGCCTGTACAATGGGTGTTGGATTAT
GCTAAACGTATCTTTGAAGGTGTACGTTGGTTCAGTCCTGATGATGAAGCCCCATATTTT
CAAAGGGCATGGTCTATAGTCAATCAAGCTTATATTGATGCTTTAGAAAATATTAATATT
ATAGATGATGATGCTTTGTTAATCATCGATGAGTCTATTAATAGTAGTATCGATAAATTT
ATTGATGAATTGGACGAAGAATAAGTTTACAAACTCTTGGGAGTAGAGTATAATACTCCC
ACGGATTATAAAACCCTTAATTAACTAAAGGAAATGCTATGAACACACTGAAGAAAATTG
TTGAGTTTATTCGCACTAAACTTGGTTCTGCTATGGCTAAAAATCTATCTGTTGAAGAAC
AGTATACTGCTGCAGCAGCAAAACTACTTGATAAGATTAAAGATCTAAAAACTGCTTCTG
TTAAATCTATTAATGAAGAAAAGCGTATTCGTGAACTTATTGTCGAAAAGAATAAGCAGG
CCGAATCAAAAGAGCGTGAAATTCGCAAGCTTCTTTCGGAAGGTCAAGATGTAACAATGC
ATGCTAAACTTGGTTTACTATATCGTCGAACAGCTGAGCAGTTGACTACTAAAGCTGATG
GTTATGCTGAAATGCGAATTGAAATCGCCAAGAAAGTAGTTGAGTTAGATGATGCTCGCC
AAGAACTTGCAGTTAAATTGGAATATATCCGTGAAACTCGCGCCGCGAATGCCCTCGGAA
TTAGTACTGCTGATGATGTAGTTGAAATTGCAGCGCTGACTAAGGTTGATATTGAAGATA
CTCTTGCCCGAGTTGAAACCTTTAATGGAAATATTTCTGGGGTTGAAACTACCTCTGCCG
ATGTTCAGGAATATATTAATTCTCTGAAATAATGATAAGGGGCTTCGGCCCCTATTACTT
GGAGTAAATAGGAATGAAAATGCAAAGTGATTTCAATTCAATGTTTGAAGAGTTCCAAAG
ACAGGTTGATGTTCCAGACCAATTACTAAATGCTCTTAAACGCATGGCAGAAGGACGTAA
TTACTATTGGGGGTCTTCATATGAAACTGATGAAAGCCTTTCCGGAAGATTTTCTAGAGG
TAAAAAGTCTTTAATACGTCCTGGAATACTCATTAACAGTATTGAATCAATTCATTCATT
GACGTGTGATTTTGATGTTGAATTTACTGATTTCATTTCTCCTGAATGGACGGTTTGTTA
TTTAAACGACGATTTTGATTATCTCGGTGTTTATAGTTTAAGTGACGCATGGTTTAAACG
TAATTTACAAAAGTCAAATTTATTTTATATTGATACTACTGTAAAATTTCAGGGCAAGAA
ATATTTCTTTACTCTTATAGTTGATTCTGAAACGAAGCATGAAAATAAACGTATTCTTAG
TAAAAAGAATATCTTAACTATTGTTGATGATCTTTTTGATAAATTTGTAGAAAATCCCAA
TTTTGAAAGTGATTTATTACTAGAAAAATTTGTTAAGGAATGTAGAGAATATGTCAAAAC
CATCACTATACCTTCCAAGTAAACCTGTGAAGTATGAACCAAAGCGTCAGATAATTTCTA
CTGATGTGTTAATAGGTCCTGTTATACTCATATCATTTGTAATTCTATTGATTATTGGAG
GTGTTTTAGATGTTATGACTGATATTGATTCTGGCGAAATACTTGTGTTAATGCTAATTC
TTCCATTAATAGTTCCACTTTTATTAGTACCCGTAAATTGGGTAGGATACTGGTATCAAG
GAAGACATTATCGTAAACGTGTACGTGATTGGAAAGCTCAGTGTAAAAAGATTAAAAAGG
AACACCAGCTTAAGCTAGATATGTATGAATTTGATGAAATTATGAAATTTGTTAAGGAAT
CACGATGCAAAAGCCAAAACTAAATAAAGTCAAATATTCGTTTCCTGAGGCACTATTAAT
TCTTGCTGTATCAGTATTTACAGCTCTTGCGGGTAGTCTTATTGGATTGTTAATTGACTG
TTTTATTTTAAATATCGACGGCACAGTAATTATAACAGAGGTTTGGAGTGAACTTCGTTT
TACTATAGCGATTTCATTATTTTCATTTTTTGGTACCATGTTATATTTTCATTATGATAA
TTTTAAAATAAATTGGCAAAGAAAAAAGGATTACAAAATACAATTAAAAGAATATAATAG
CTACATGTCTTATATTGAAAATGAGTCAATGAAAGAGTTTGTGAGTGATTGTAGGAAAAT
TAAATGATTTTAAAAACTCGCTGGTATGATTTAGATGATGGGGATGATGGCATTTCAGTT
GATAGAGTTGACTGGAATGGTTGTTCCGAAGATATGAAAAATTTGTTGATTAGGGAGTTT
AGAATGGGATATCAAGCAGCTAAGCCATTTACTGTAACAGATGATAAGTTCGTATGTATT
CAAAACGGTCGCGCTAAGTTAACGAATGCTGATTGGTTCACAGATAAGAAGGTTCTTCTG
TGGTATATCATTAGTCTTCCTATATCATCGTTCGTATTTTACTTTTTTATAAAAAATCCA
ATGGACAGAATAGGAGATTGGGTTCTTTTAACTATACTTGTTAATATTTTTACAGCAGCA
GTATTATCAGGAATATGGCGTATGTTCATTGAAATGCCATGGCGTTTACGCAGACAACAA
AAGATTTTTGATGAAAAGAAATATACTCAAAATTTAAATAACTTTATCACTGAATGCAGG
AAATTAAAATGAAAACACTATCAGCTGGTATTATCTTTATGACAGAAGATAAAGATTTAT
TTATGGGTCGGGTTACTGGTTCTCGTAAGCCTGGAATGATGGCACATCGCTGGGATATTC
CAAAGGGCCGCGTAGAAAGTTCTGATTTGAATGCACTGGAAGCTGCAAAAAGAGAATGCT
CAGAAGAGACTGGTTTTATCGATTATAATCCAGACCTTCTAGAAGACTTAGGTGTATTTA
AATATTCTAGTAATAAAGACTTACAGTTATTTTATTATACGATTCCAGTAGAGCATGAGA
TGTTTAGAAATTGCCATTGCGAGTCTTATTTTGAAAATAAAGATGGCGTTATGATTCCAG
AGATGGATGCTTTTGCTCTTATTCCTCGTACTCAGTGGCAATATGTGATGGGTCCTTCAC
TTTACCGAATAATGAACAGCCTCTTTTAATTTATAAATACCTTCTATAAATACTTAGGAG
GTATTATGAATATATTTGAAATGTTACGTATAGATGAAGGTCTTAGACTCAAAATCTATA
AAGACACAGAAGGCTATTACACTATTGGCATCGGTCATTTGCTTACTAAAAGTCCATCAT
TAAGTGTTGCTAAATCTGAATTAGATAAAGCTATTGGGCGTAATTGCAATGGTGTAATTA
CAAAAGATGAGGCTGAAAAACTCTTTAATCAGGATGTTGATGCTGCTGTTCGTGGAATTT
TGAGAAATGCTAAATTAAAACCAGTTTATGATTCTCTTGATGCTGTTCGTCGTTGTGCAT
TAATTAATATGGTTTTCCAGATGGGAGAAACCGGTGTGGCAGGATTTACTAATTCTTTAC
GCATGCTACAGCAAAAACGTTGGGATGAAGCAGCAGTTAACTTAGCTAAAAGTAGATGGT
ATAATCAAACACCTAATCGCGCAAAACGAGTCATTGCAACGTTTAGAACTGGCACTTGGA
ACGCGTATAAAAATCTATAAAGTTGTTTACTTTCTCCTAGAATTGTGATAGTATATTCAC
AGTTACTTGGAGGGATAAAATGACTCGTATTAATTTGACTTTAGTATCTGAACTTGCTGA
TCAACATTTAATCGCAGAATACCGTGAATTGCCGCGTGTTTTTGGTATAGTTCGTAAGCA
TGTGGCAAACGGTAAGCGCGTTAAAGATTTTAAAATATCTTCCGAGTTTATTTTAGGTTC
TGGTCATGCTACGTTCTTTTACGATAAGTTAGAATTTTTGCGAAAGCGTCAATTAGACAT
TATAACGGAATGCTTAAAACGCGGGTTCAGTATAAAAGATACTGAAGTTCCTGACATCAG
CGATATTCCAGTAGAATGGAAAAATGATTATAATCCATGCAAATCAGCTATTAAATTGAG
TCAACAACGACTTGATGAAAAAATTTTAATGAAACCACATTGGTATAAGTATTACGGTAA
AAATATTTACATTTAAAGGAAACCCATGAAAACATATCAAGAATTTATCACTGAAGCAGC
TATTAATTCTCAAATTATTGCTGAATCTTTTACTGATCTTTTGAAATTTAAAAAAAGGTC
AAAAAATCACTGCTGTATTGGATGATGGTACAGAAGTTGAGATGGATGTACAAGGATATA
ATTATGCAGTAGATGGAAAACTGTATAATAAATCTCATGCTAAATTTGATTCATTTGACG
ACTTTGTTAATACAGTTGAAGATGAAAAAACTCGTCGATCCATTGCAACTGGTGATGCTA
AGGTTCTTATGGCACATGGTCATGAACGCATTCGCGCTAAACAGAATAAAATGGGTGAAG
ATAATTTTGCATTAGTTGGTTATCAATCTGGTAAACAAACCTATGGTTATCAGCGTACTG
CTACCATGTATAATAAAAATGGTAAAATTGCCTTTGTGAATAGTAAGGGTTCTATTCAGT
ACGTTAAATCGTTCAAATAATATGGGAACAGCCTGGACCTCATGATTCTATGAGGTATTC
CCGCCAACCTGTGATAAGGTCGAGCCAAAGCGCGGTAATGGGTAATGCAGGAATGGACAA
CTCATGTGCCATGGAATGGCCCAAAAATTAAGAGAGAAAATATGAGAACATTTTTAACTG
GCCCGTATCTATCCCTGATGAATGCTTTTACACACCATTCTGATGCTAGAGTAGAAGAAA
TTTGTAAAAACGAATATATCCCGCCATTTGAAGAATTACTTAAACAGTACTGTACACTTC
GTATAGATGGTGGACGTCAATCCGGTAAATCAATTGCTGTGACTAACTTTGCTGCTAATT
GGCTGTATGATGGCGGAACAGTTATTGTTCTATCTAATACTTCAGCTTACGCTAAAATTT
CTGCAAATAACATTAAAAAGGAATTTTCGCGTTATTCTAATGATGATATACGTTTTCGTT
TATTTACTGATTCTGTGCGCAGTTTTATTGGTAATAGAGGTAGCAAGTTCAGAGGTTTAT
CGCTTTCACGAATTTTGTATATAATTGATGAGCCTGTTAAATCTCCTGATATGGATAAAA
TTTACGATATTCATATTGAAACTGTGCAACATTGCTGCAATAGTAAATGTTGCATTGGTG
GTATTACTTGTCCACAGTTTTTCGTAATCGGAATGCAATGATGACAGACACTCAGCTTTT
CGAATATCTTTATTTTTCGCCAAAAACTATTAAAAATAAATTGGTGAATCATTTTGAAAT
TTTAGCAAATAATAACATTTTGAGCGAATTTTATCCCAAGCAATACAAATTACAAAAAGG
CGTATTCAAAGGATGCAGAGTTTTGTGTACTGCTCCTAATGCACGGCTAATGAATAAAAT
TCCATATTTTACCATGGAATTTATTGATGGGCCTTTTAAAGGACTAATCACCCAAAGTTT
AATGGCATATGATTCTGAGCCATTTTTAATTAAAGAACAATCTTGGATAAATTTATTTTC
TAATTGAGGTTTATATGAAAGCATATCAAATTCTTGAAGGCACACATAAAGGTACTATTT
ATTTTGAAGATGGTATTCAAGCACGAATTATTGTCTCTAAAACCTTTAAAGAGGACTCTT
TTGTAGACCCAGAAATTTTCTATGGTTTGCATGCCCGTGAAATTGAAATTGAGCAACAGC
CTACAGTTAAAATTGAAGGTGGTCAACACCTGAACGTTAACGTTCTGCGTCGCGAAACTC
TGGAAGATGCAGTTAAGCATCCGGAAAAATATCCGCAGCTGACCATCCGTGTATCCGGTT
ATGCAGTTCGCTTTAACTCTCTGACTCCGGAACAGCAGCGCGACGTTATTGCTCGTACCT
TTACTGAGAGTTTGTAATGGCAAAGATAATTATTGAAGGTTCTAAAGATGTGCTAAATGC
TTTCGCCGAGTGGTTTAGTAATTCAGGCGAACAGCAATTTAATGAAGCCTGGAATATGGG
TGATATTGATGGAATTTATCCTACGACAGAAATTTCTGTTCAAGGATATGGCATTCATGA
ACCTATTCGTTTAGTTGAATATGATTTATGTACTGGTGAGGAAGTCAAATATGATTGAAG
ACATTAAAGGTTATAAGCCGCATACTGAAGAGAAAATCGGTAAAGTGAATGCTATTAAAG
ACGCTGAAGTTCGTTTAGGACTTATCTTTGACGCTTTATACGATGAATTCTGGGAAGCAC
TAGATAATTGTGAAGATGATGAACTCGCGAAGAATTATGCTGAAAGCCTCGATCAGTTAA
CTATTGCTAAAACGAAACTCAAAGAAGCCAGTATGTGGGCTTGTCGTGCAGTGTTCCAAC
CAGAGGAAAAATACTAATGGCTCAATTAAGTGCAGGGTTTGGTTATGAGTATTATACTGC
ACCTCGTCGTGTATCTGCCGCTCCTAAGAAAATTCAAAGTCTTGATGACTTCCAGGAAGT
AGTCCGTAAAGCTTTTCAGGACTATGCACGTTATCTTAAAGAAGATTCACAGGACTGTCT
CGAAGAAGATGAAATTGCTTACTATGAGCAGCGTCTTGAACAGCTCAAAAACTTACATGA
GGTTCGTGCAGAAGTTTCAAAGTCTATGAATAAATTGATTAGATTTAAAGAATAACTGTT
TACTTTTCCTCTTGACTGTGGTATAATTTTTCTATCAGTTAAGAGGAGAATAACATGACT
ATCAATACAGAAGTTTTTATCCGTCGAAATAAGCTTCGTCGTCACTTTGAGTCGGAGTTT
CGTCAAATTAACAATGAGATTCGTGAGGCATCAAAAGCAGCAGGAGTCTCATCGTTTCAT
CTAAAATATTCTCAGCATCTTCTTGATCGTGCAATTCAACGGGAGATTGATGAGACATAT
GTTTTTGAATTATTCCATAAAATAAAAGACCATGTTTTAGAAGTTAATGAATTCCTGAGT
ATGCCTCCGCGTCCTGACATTGACGAGGATTTTATTGATGGGGTTGAATATCGTCCTGGA
CGTTTAGAAATCACAGATGGAAATCTTTGGCTTGGATTTACGGTTTGTAAGCCTAATGAG
AAGTTCAAAAACCCGTCACTTCAATGCAGGATGGCAATTATCAACAGTCGTCGTTTACCA
GGAAAGGCTTCTAAAGCAGTAATTAAAACTCAATGAGGTAAGCATGAGAAAAGCACTACT
CGCTGGTCTATTGGCCATTTCAATGATGGCACATAGCTCCGAGCATACTTTCAGTAATGT
CCAACTCGATAACATGCGTTACGCGTATCAATTCGGGGAACAATTTTCTAAGGATGGAAA
ATATAAAACACACAAAAATATCCATAAGAGCGGATTAGGTCATATAATGGCTGCTATTTT
ATGGCAAGAAAGCTCTGGCGGAGTTAATTTAAAATCTAAACCAAAGCATCACGCCTACGG
AATGTTCCAAAATTATTTGCCTACTATGCGAGCAAGAGTTAAGGAACTTGGTTATAATAT
GACCGATGCTGAAATAAAAAGAATGTTGAATAAACGGTCCAATTCAGCTTCCTGGGCGTA
CATTGAACTTTCTTATTGGTTAAATATACATAAGGGCGATATAAGAAAAGCAATATCCTC
TTATAATTCGGGATGGAATGTTAAAGCAGGTTCTAAATATGCTTCTGAAGTCCTAGAAAA
GGCTAATTACCTTAAAAATAATAAACTTTTGGAAATAGTAAATGACTAAAATTTTGGTTT
TATGTATAGGATTAATTTCATTTTCTGCGTTAGCAGATACATCATATACTGAAATTAGAG
AATATGTAAACCGCACTGCGGCAGATTATTGTGGGAAAAATAAAGCATGTCAAGCTGAAT
TTGCACAGAAATTAATATATGCATATAAAGACGGAGAAAGAGATAAATCAAGTAGATACA
AAAACGATACATTATTAAAACGATATGCTAAAAAGTGGAATACCTTAGAATGTTCAGTTG
CGGAGGAGAAAGATAAAGCCGCTTGTCATTCAATGGTTGACCGTTTGGTAGATTCTTATA
ATCGAGGATTGAGTACTAGATGATTGTAAAATATATCAAGGGCGATATTGTCGCCCTTTT
CGCTGAAGGTAAAAATATTGCGCATGGATGCAATTGTTTTCATACTATGGGTTCAGGCGT
AGCGGGTCAATTAACTAAAGCTTTCCCTAAAATTTTGGAAACTGATAAATTACAGACTGA
ATGGGGTGATGTAACTAAACTCGGTTCTTACTCAGTCTATGAAAAATACTTTAGGACTCA
TAAAGCTTACTGCTTCAATCTTTATACTCAATTTCAACCAGGGCCAAATTTTGAGTATTC
CGCTTTAATGAATTGTATGTTAGAATTAAATGAGTTTGGTGAAAATAAACTGATTAAACC
TACAATCTATATGCCTAGGATTGGTGCAGGCATAGGTAAAGGGAACTGGGATATTATTGA
GGGGATTTTAGATACATATTCCTCTAAATTAGAAATTGTGATTGTTGATTGGGAACCGTT
ATTATGAATATACATTATCCACATCCGTATGACCCAAAGAATAAGGCAGTAATTATTCGT
CAATGGGAACGCATTTGCCGTACTAAATGTCCAATTAATAGTCCACATGATGTAGATAAA
GACTACATTGGAACATTCGTTGAATATACCTTTATTGATAAGAAAGGTCGTAAACAGCAT
GTAGAAGAATACTGCTTAAAGGTGACATGGTTATGAGCCAAACTAGTATTCTTAAAAATG
CCCACTGTGAAAAGTGTAAATGGCCGGTTGTTTTTGCTTTATGCAACGATGAAATGGCTT
GTGATTTCGATTATTGGTGCTATTGTTCTAATAAAGGATGCATCAATCATAAAGGTGAAG
GATTTTATTCGGGATTTTATCCTTATCCAGATTTCGTTAAAGAAGGTAAACCGAAATGAA
TAGTTCTGAGTTACAATATGAAGTGTTACGTGAACTTGATAATTTAATTGAACTCGCTGT
TAATAAAGGTTTTGCCATTGGAATTGGTCAAAAAGATACTGATCATTTAACTGTGGAAAT
ATTTAAGCAAAAGCGAATTATTTTAAAACTTTTGGAAATTAATATATGAGTTTAAGCAAA
GAACAAAAAGACAAACTCTTTTCTCTTATCCACGAAGTTATGGATAAAAACAGTGAATTG
GAAAAAGTTTGTGATGAATGCGGTCCTTTTAATGCAAATGAATACGAAGAACTTTCTAAA
GAATTCGATAATAAAGAACAAGAACTCATTGATTATATAAATTCTTTATGATTACTCGCG
AACAAAAGAACGAAATATTATTTTTAGTTGGTGAAATTATTAGTTTAGAAAAGGATTTGT
CTTTTGAATTATCTTCTGATTATGGAGATGCCGAAACATATTACGAATTAGTAAAATCTA
TCGATAAAGCTGAAAATGATTTAGAAACATATTTAGAAAATTTAACTAAGGACTAAAATG
GCGAGTTTAATTTTTACTTATGCAGCAATGAATGCTGGAAAATCTGCTTCTCTTTTAACT
GCTGCACATAATTATAAAGAACGCGGAATGAGTGTATTAGTTCTTAAGCCTGCTATTGAT
ACTCGCGATTCTGTCTGTGAAGTTGTTTCTCGCATTGGAATTAAACAGGAAGCGAATATT
ATTACAGATGATATGGATATTTTCGAGTTCTATAAATGGGCTGAAGCACAAAAAGATATT
CATTGCGTATTTGTAGATGAAGCCCAATTTTTAAAAACTGAACAAGTACATCAATTGAGC
CGAATTGTTGATACATATAATGTTCCTGTTATGGCTTATGGATTAAGGACTGATTTCGCT
GGAAAATTGTTTGAAGGTTCTAAAGAACTTTTAGCGATTGCAGATAAACTTATTGAACTA
AAGGCAGTTTGTCATTGTGGTAAAAAAGCGATTATGACAGCTCGATTAATGGAAGATGGA
ACACCAGTTAAAGAAGGTAATCAAATCTGTATTGGTGATGAAATTTATGTTTCTTTGTGT
AGAAAACATTGGAATGAATTAACTAAAAAGCTTGGTTAGTGCAAAAGTTATAAATAGGTT
TATCTAACTAAAGGGGTATATATGCTACAATTAACTGAAAAGCAACTTCGCAATCTTACT
GTGCTTCAATTAGATGAAATTCGTAGGGAAGTTGGAAATATCATTTCAGCTTTGCGTCGA
GAAGTATCACTCAACCAATCTCCGGCAGACTATACTAGATTGCGAAATTTTGAAAAATAC
CTTGATAAAGTTAAGGCCGTGCACCGGCATAAAGTAAATACAGGACAAAAATGATAGGAG
GCCTTTATGGCCTTAAAAGCAACGGCACTATTTGCCATGCTAGGATTGTCATTTGTTTTA
TCTCCATCGATTGAAGCGAATGTCGATCCTCATTTTGATAAATTTATGGAATCTGGTATT
AGGCACGTTTATATGCTTTTTGAAAATAAAACTATAGAATCGTCTGAACAATTCTATAGT
TTTATGAGAACGACCTATAAAAATGACCCGTGCTCTTCTGATTTTGAATGTATAGAGCGA
GGCGCGGAGATGGCACAATCATACGCTAGAATTATGAACATTAAATTGGAGACTGAATGA
AATTCAGCGACTTTTCACAAAGTGGAAAACCTTCAAAGGCAGATGAATACTTAGGTTTAT
TAATGGCTGCACAAGCTTATTTTCATTCTGCACATTTTGAAACTAAAAGTTATGCTAGAC
ACAAAGCATACGATTTTATTTTCTCCGAGTTGCCAGATTTGATTGATAAATTTGGTGAGC
AATATTTGGGGTATTCTGGTAGAAAATACACGCCTTCAATTCCAGATGCCAGTAAACTTC
CTACCGACACAATTAAAATGATTGATCGCATACTAGACCAATCTAACAGCATTTATAAAG
AAATGCCTCCAGCCATTCAAAGCACGATAGATGATATTACTGGAATGTTTTACCAGAGTA
AATATCTTCTTTCCCTCGAATAACGTTAGTCTCCTTCGGGAGACTTTTTTCATTTTACCG
GTTTACTTTCCATTTGAGCTGTGATACTATACAACCATCGGATAAAGAGGAGAACATCAT
GAAAATTGAAGCACTTAATCAAGAAGGAAATATCTACGTCATCATTAATGGTGATTTTTT
CGTCGACATGGATGAAGTTACTAGTGAAGAACTTGTAGAACTTCTTAAGAAACGTTATAA
TATGTGTGATGAAGTTGCAACTCACATGGCGTGTGCAATATTCTCTCTTTCATATGTGGT
GGAATAATGATTAGTATCGAACAAGCGGATAAAATTAAGGAATTGGTAGCTTTAATTCGT
AAAGCAGATGAGGAACTTAGTGACTTTGCTTGGTTTTCATCAGGCATTGCAAATAAAGGC
ATTGATGAACTTGAAGCTAAAGTTGATAATGCTTTAGAAGCGTTAGATATGTTTCTTGAT
GAAATTATCGATCATAATACGAGAGTTTAAGTATGCTAACACGTGAACAGTTTGAAAAAA
TCATTAAATTAGCACGTGATATTGAAATAGATTCATACCAATTAGCAGTTGAGCATTGTG
AAGGATATTCATACGACGGTATAGAAGCAGCTAAAAAGGATTTGGATAAATCCAAAGCTA
AGTTAGTTCAATATCTTGAAATGATTAGGTGGAATAATGAAAACTGAAAAGCAGATGTTT
TTAATGAAGCTAATTGAAGAATATGCTAATGCAGTTTCTGACTATGAGTATTCTGCTCGG
GAAAGAGGTACGGCTTTCGCTAAAGAAGAATTGAAAATCATGGTTGATGCTCATACAAAG
CTTCAGAATTTTATCGAAAACGTCATTTAATGGTTTACAAGTTGGCAAGGTTATGGTATA
GTAATCTTGTCGACTGCCAAGGAGAAGAGAATGAAAGTTTTGTTTGTTGTGTATGTGATG
ATTCAATATAATTACCCAATGTTTACTTATAATTTGGTAAACAACATTATTGATATGATT
CAGAGGAGTATGTAATGACAAGTGAGCAGGCTTTTAAATTAAGAGAATTAATTGAGACGT
ATAGTAAAGCTGTTCATACATCAACAATTATTGATGAATCAGCTTTCTCCGGACATGCTA
ACAAGATTAAATACAAAACTCTTATGGAAGAAGCTAAAGTAAATCTTGATTCTTATATTG
AAACTTTAATTGGTAAATAATATGAAAGCTGTAATTGAAACAACTGATTTGTTCGGTGAC
CTAGTTATCGAAAAACGCGGTAATGTATACGTTCTGACGCAGGAAGACGATAGTATTACT
ATTCTTCCTATGGAACTGGCTGCGATTTTATCTTATGCTCCCCCAGGAGTTACCGGTGTA
ACTAATATTACAGGTGACCTCCAAGTTCGTTTTTATCGTGGCCTTTACGGCGGTAATATT
GAAACTGAATTTATGTGTCTTTCTATCAACAATTGGGCAACATTCGTTGCCAAGGTGAAA
GAATTCTTAGAATCTGAAACAGCCGAAACACCCGAAAAGGCTAAACTTCAATGGGCTAAA
GATCGCGGTGCTAACATTATTAATCCAGTAGCTGCAAACTATACTACGACTTTGGATGTC
AAGACTTCTTATGAAGATGGCGATGTCGTACTTGTTCGCCAAAATGATGATTCTCGAGCA
CATATTGTCACATTTACCAAAGACGAAGCTATTGCGCTAAAGACTTATCTTGATTCTGTC
ATTCCAACTATGATTTCAAAGTGAGGAAATATGTTTATTTCAAGTGGAAGTGGTTTAATT
CGTGTTGAATTTAAAAATGACATCTTTCTTATTCAAGGAGATGATATTATTAAAATGAGT
TATGACGAAATCAAGAAAATTTGTCATGCTCTTGAAAGTCATGGAAAAGTGAACGCTGTT
ATTGATATTGGCGATTTATGGGTGACACTTTATGAAGTATCCGAAGGATTTAACATTGAA
GATGAAAATAACATTTTAGCTATTGATAAAAGAAGTGATTTGTTTGATGTATTAAAAGTT
TATGAACAGTCAAATGGCGGAAGAAAAGCTGCATTGATTTATCAAAAACCGCATTCATGT
GGAACTGCTTCAATCATTTCAAATATTGAAGATGAAGTTGATACTTATATGTGTGTTTTA
AAAGCTGGTGGTGACCGTCATCCGGATTTTATTTCTATTCGTCAAAACAATGGAGAAATT
TCATTATCAAAATCAGAAGCTGAAGCTATGATTAAGTATTTAACAACTGTTACGCCTTCA
ATGAAAGGATAATTATGATTATTAATGAAAACTCTTGGCACTATAAATTATTCAAATTGT
TTAACGATGAATGGCAACGACCTAAGACACTATGCGCATATTTTTGGTCTATTGCCATTC
CTACATTTTTCGTTTCTATTTTTGGATGTGCTATACTCGTAGGGCTAACAATTATTTGTG
CAGAAAGCCTACAACGTTGGCTTATTTTCGGTAGTTTATGGACTCTTCTTCCATCAGCAT
TTATACTTGCGCTTTTGGTTGTTTTACTTATTATCGGTTCATTTGTTATTCCTGCACATT
TGCATGAAAAATATAAAGATTATAAATGGAAAAAGGATTATGCTTTACACATAGAAAATA
TTGATAGGGCGTATAAAGGTTTACCTCCTATTCAACCCAAGAAATCGGTTATCGTTGAAT
TTTTAAAAGCTCGTAAAGCTAAAGTATGTCCTGTTATTGAATATAAGGCTGAATGATGAA
AACAGTAATGAAAAGCTATTTTGGTAGTCATCTTTATGGAACTTCTACCCCAGAATCTGA
TGTAGATTTTAAAGAAATTTTTGTTCCTCCTGCTCGTGATATTCTTATCGGAAATGTCAA
AGAGCACATGAGTAAAAACACTAACAACACATCATCTAAAAACACTAAAGATGATATTGA
CCATGAACTATACAGTCTTAAATATTTCTTTAAATTAGCAGCAGATGGTGAAACTGTAGC
ATTGGATATGCTTCACACTCCACCTGAACTAGTAGTTAAATCAGATTTGCCTGATGTGTG
GAAGTTTATTCAAGACAACCGTTCTCGTTTTTATACGACTAACATGAAATCCTATTTAGG
ATATGTCCGCAAGCAAGCTTCTAAATACGGTGTCAAGGGTTCTCGTTTGGCTGCATTACG
TGATGTATTGAAAGTAGTTAATCAAATCCCTGAGCAATGGGTTGATTACCAAGAAGACGG
TTCCATTAAGCAGCGTCGCACTAAAGTTGAAGATATTAAGCATCGTCTTCTAGAAAACGA
ATTCTGTGAATGGGTGTTCCATAATCATGAGAAAACAGGTCCACAAACGTTCTATACTGT
ATTGGGTCGTAAATATCAGACAACGCTTTCTCTTATTGAGCTTAAGCAGTCACTGAACAA
ATTAGATGCTGAATATGGTGAACGTGCTCGTAAGGCCGAAGCCAATGAAGGTATTGACTG
GAAAGCTCTGAGTCATGCTTGTCGTGGTGGACTTCAACTATTGGAAATTTACAAAACTGG
TGACTTGGTTTATCCACTCCAAGATGCTCCATTTATTCTCGACGTGAAGTTGGGTAAACA
TCCATTTAAAACAGTTCAAGAGTTTTTGGAAGATGTGGTCGATCAAGTAGAAGCAGCATC
TACTGACGCTTCTAAGAATGGTATGCCTAAAACAGTAGACATGGGTTTCTGGGATGACTT
CCTTGAGAAGGTCTATCTTGAAAACCATCGAAGTTATTATAAATGATAGGGAGCCTTCGG
GCTCCCTTTTTTATTTCAAAAATTTTTCACAAAGTTGTTTACAAGCATAAAGCTTTATGG
TACTATACAACTATCAACTGATACGGATTTGGAGAATAAAATGAAAACTGTAACTATCAA
TAAGGGTATCTACTTCGGTAAAGAAATCTCTGGAACTTTTGAGCTCTTAGGCGAATGGTT
CCCAGATAATGCTCCAGTAGATGCGCAAGGAGATGGTAAAGTTTTTGTTGAAATTGACGG
TAAGCGTCGCGGTGTTTGGGTTTACAAATCAGACATTTCATATGATGGTGTAAAAGTTGA
AGAAGTTAAAGAATCGTATGAAGATATGAAAACCCGCATTAATAAAAGATTTAATGTTAT
GGGAATGATGACGAATGGTATTATTAATGGAAATATTCGTTCATTAATTATCTCTGGCGC
GGCAGGTATAGGTAAAACATATTCTTTAGATAAAGCTTTAAATAAAGCAAATGATATTGG
ATACATTGAATATAAAAGCATTAATGGTAAAATCTCTGGTATCGGTCTTTATGAACAGCT
TTGGAATAATCGTGAAGAGAATTCTGTCCTTTTGATTGATGATGTGGATGTTTTCTCTGA
TATGGACATTCTTAATCTTCTGAAAGCTGCTCTGGACACTGGAGAGACCCGTAAAGTCTG
CTGGAGCACCGCATCTTCTTACTTAGAAGAAAAAGGCATTGAGCGTGAGTTTGAATTTAA
AGGAACTATTGTTTTTATCACAAACGTTGACATTGACCGCGAATTAGACCGTGGTACTAA
ACTTGCTCCACATTTACAAGCATTAGTGTCCCGCTCAGTTTATTTGGATTTGGGTGTTCA
CACTAATGAAGAAATTATGGTCAGGGTTGAAGATGTTATTCTTTCAACTGACATGATGCA
AAAGCGCGGTCTTTCTGATGAAGAAACTTATAAAGCATTATCATGGATGAAAGTCAATGT
TAATCGTTTACGCAATGTTTCACTGCGTACTGCTCTTTATCTTGCTGACTTTATTATGAC
AGACAAAAACGGTTGGGAAGAAATTGCTGAGGTTACTCTTCTGAAATAATTCATAAGAGG
ATTTCTATGACAAAAAGGCAGTTCAGAAATAGATTATATGGACTGCCATTAAAAAGATGA
CTAGAATTAAACTGGTAAATGGAGGTAATGATGTTATACTCAAAGGCTCGTGAAATTTAC
GAAACTAAAATTAAAGAAGCAGTATTTCAGTTCGCAACAACGATGCGATGGACAAATGAT
TGGGAGTATTCAAAAAATCATAAGAAGCCCTTGGTGACAAGAAAGGCTCATATGTTAGTG
TTAATAGACCGTGAGCAGATTAAAGCCCGAGAAGCCCTCCAGAATCATAAAAAGGCTGCC
TTTGAATGGTTTATGGATAACATTGCTCCTGAGACTAAGAAAGCAGTGAGCGCGTGGTTC
AGTGGAAAAAATTGTGAAAGAAGTTTCTTTTAGTTGTTTACAAGACCGTTCCTCTGTGGT
ACTATACAACTATCAACTACGGAGGAACAGAAAATGAATGCTAAAGATATTTTCAACTTG
GTAAACTACAATGATGGTAAATTTAAATCTGAAGCTCAAAGCAAGTTCTTTAATGACATC
TCAATTGGAGGTGAAATCACGGTTGATGGAGGACAAATTTACAAATCTCGTTGGAATTGG
ATCGTTATTATCGATGAGATTGGTATTGTAGAAATTTACAAAAATACGAATAAAAATCGT
ACATTACACTGGTCTCGTGATACTAACGAACAGTACAAAAAGGATAAAGCATCTAAATTA
TCTCGTGTAACTCAAGAAGATATTGAGTTCATCAAGAAAGATATTTTGATGTATGATAAC
TTAATTGTTGAAGAGCAAGCTGTTATTGATAAATTTGACGAGATTAAAGCTTCTCGTGAA
ATTCCTGATTTTATGAAAGAATCAGTAAATGAACGATACACTCTCATTTCAGAGCGTATT
GAAACTTACAAAAAGCAAAGAGCTGAACGCCAGAATACTCTTCGGAAGTTTGAAGAACGG
TTAAAGACGGTACTCGCATAACCGCTTTATACCAAGGATGGTATAATGGTTCTAAGCCCT
TTTAATTGAGATTATTATGAAACAGTTGATAATTAAAAGATTGAATTTATTGATATGTTG
TTTATGTATAGTAATTGCATATGGTTATTACGCAATTAATGATTATATGCATTATAAAGA
TTATGATGTTACTGTAGTTAATACCCTTACAGGAACTCAAGGAAAGGGGTCTAGTTTATC
GTTTATTGCCGTATATGAACTCAAAGACGGTTATAGATTTAGTGAATATATTTCCCCAGA
GATGTATTCATCAATAGAAAAAGGCGATAATATTACTGTAAGTTTACGTCCTTTCGACGT
AAAACAGACATTGTTTGATAATATTGTTTGGTTCTTTGGAATGGTATTAGTTCAATCTGT
ATGCGGTGCTTATATAGTCTTTTCCATCATATTCTGCGTATTTAGTAAAATTGAAATTGA
GTGAGGAAAATATGTCAGTAGTAATTAATAATGTCAATGCAGTAATTAAATCTTTAGTTA
ATAAAAATTGAATGAATGGACTGTACTTCGTCGTGGAGAGCCAGATAAATTTTTTCATAG
ATTTAACCCAACTTTGGATTTGAATGTTATTGACAGAGATGTTCATGCAGAAATTTTAGA
TAAGTTTAAAGTTGATATTGGATTTGGATTAGAAAAACATTTACAGCGAACAAACGGGTC
TGGAATGGGTTTATCTAATCGCATTATGAAAGCCCTTAATAAAATTGGAGCATTGTCTCG
TATTAATGCAAGTGAAATTCTTCGCAATTATAATAAAGGCTATGATCTTTACGGTCGACT
AATGCCGAAATTATCATTTGACCAAATGATCGCAGATTTGTGGGAAAATCAACGACGATT
ATTAGCATTAGGCGCTCGATTAGCTAAAGGTCTAGATAAACAAATGATTTTTAAGACCAA
TAATACAGAAGACCTTAAATGCTTTAAATTTAGTATTCGCGAAGATGATTATTACATCAG
AGCTCGCTCTACAGATTATGTTAATATGGGACATCATCTCTGTTTAGCTTTTGAAGTTTT
AAAAGAAGCCGGAACATTAGAATATTCGTCTGGTGCAAAATGCCCGATTGGTTCAAGTTG
TATTTTAATTTATCGCCCGGATGAATCCAGTTCATCTAAATTACCTACAAAACCTGTACC
AGTTCGTAGTAACGAAAAACATTCTGAACAAATTGATTATTTTAATAAGCAAATTGAAGA
GCTGAATATTTCTATTCAACAGTATGACGATGAAATTTTCAGACTATCTGGATTGAGTAG
TAAAGCTAAATCTGAGCGTGAAAAATTAATTAAAATTGTTGATTTACTTAAATCTTAAGG
AACACCATGAAAACTCGTTCTCAAATTGAAGATATGGTTCGTAATGCCAGCTATACTCGT
GATGTTATGACATTTTTGTGCCAAAATAATTTAGACCCTGATAAAGTTAATCGTGATATT
CACTTTAAGTATATGAATAGCAGTGAATGGTTACGTCATTTTAGTAAAGCGGGATATATT
ACACAAATGACTGCTCGTGAGCAGCTCACCGATTTCTGTAAAACTATTGATTATAAAAAT
CCTCTATTTGTTCAAGGCGTTGGTCAAAGTAAGGTCGATTTATCATCTGGATTTTTCAAT
CCAAATCATTATCGTATTGAATGGAGATTTATTGCTCTATTCCGTAGACAATTAAAGCAA
ATTTTGTCTACTGCTAGTCGATTAAAAGGTTCTGATATTAACTTAAAGAATCTTAAATTT
GATGGTTATACTCTTCAGATGGAAGTAAGACCATTAAAGGAAAATAATAGAACTGCACGA
ATTAGCTTTAAGCCTAATACTAAAAATTCTCTTTCAATTTGTGAATGCCTTAAATCACAG
TTGACAGAAGCATTTAAGTATATGGATGTTGTTGCTGCTGTTCAATCTAAGATTTTACCT
CGTTTTGAACGATTTAAATTAGACACAACAACATATGAACTTGATATGGTTGTTTCATTT
AAATATGATTTTTTGAGAAAGGACGAAGTCCCGCAAGAGAAAAAGCAGGAAGTGCAAGAT
AACTTAAATTTATCCAATTACTTATCAAACGATCCTAAATTTTGGATGTATAGCTCAAGC
AATATAGATGCATGTAAACTTAATAAAGTGAGTTTTCTTCCTACTGAAAATTCAAATTTT
AAACCTGTAGAAAAATGGCACGCTGACGCGATTGAGAAGTCTCTTAAGGCAGTAGATGAT
GAACTCGTTAAAGCGACCAATGAAGTGCTAGAAGCTGAAAAGGCGTTAGAACAAGCTCAG
TCAAGGGTTCAAAATCTGACAAAGCAACGTTCTAAACTGAACAATGCACTAAATGCACTG
AACTAGTTTACTTTGCCACAAGGATGTGGTATAATGTTCTTACTTTCTACTGAGGAGATT
AATATGACTCGTAACGAATATATCAAATCATTCAATAGCGTTATTGATGATAAAGCTATA
CCGATGTTTGGTCAAAATATCGTTCTTTCTATTATCAATCAATGGCTCAATAGTGTTGAT
GCAAGTATTGTTTCTTCTACTAAATTTATTCATGAAATTCGTAAAATTTCTAGCCGTGTA
GATAAAGATGTTATCAAGAAAACCTTTAAAGAGTCTCGTCTTCTTTCATATTTGGTTAAT
CGGGATATTCTTGGTAATTTTGGGAAAGAAATTAAACGAACTAAAGATGTAGTAGGATAT
AATTGGTTCGGTGATGTTAATTCTTATCATCTTAATAATAAAGAAGACCCTGAGAATATT
TTTACTCGTCGTTGGATTAGTAATTTCAGACTTTTCAAAGGACAAATTCTAAAATCAGCT
TCTAAATTATGTTATGGCGATTATCGTCAAATTCATCCTTTGGCTTCTGATATGATTATC
GTAAAAGAATATGAGCTTGATAAAAATAAAGTAGCTATTTTTGTGAATTATGGATTTTTT
ACACCAGAAACTAACCAAAAGAATATTAATAAATTTTTCTCAATTGCTAGCACTATAACT
CGTCAGTTAGAGACTGCATTACTTTGTATGGAAACAGTAGAAAATATTCATACATATCCT
TTTAAGAATATATGCGGATGGGAAGGATATAAAATTGTAATTAGTCTTCGTGAAGTGAAA
TGTGCTTATTCACCTACTAGTAAAGAAATTTACCAACAAAAATGTGATGAAATTGTGAAT
ACTCCTAAAGAAGAAACTACCCTTGAGGAACTAATGGAATGTCTTGATGATTCACCTGAA
CCGGCAGAAATTCGTCCAGAAGTTATTGCACTAGAAAAAGCTTATAAAGAAGTTCTAGAA
ATTTCTAATAAAGCGCAGAAAGAATATGAGCAGGCTAAAAAGATTTGGGAAGAATCTGTC
AATCGCTTGGATCGTCTTGAACAAGCTTTACAGTTAATTAAGTAATTTAAAGCCAAGGAT
GGCTCGGAGTATAAATCATTAACCAAGTGAGAAGAACATGAAAACTCGTAAGCATTATAT
TGATTATTTTGACAGTCTTATTACTAAACACCGTAATTATCAAATCGGACACAGAGCAGT
AATCAATAATATTCTTCGTGATTTTCTTCAATATGTTGGCCAGGAAAATCATATCTGTAA
AGATACTCAAAACGCTTATTCTTATTCGGTAGGCAATTTGCTTGAATGGTTTAAACGTTC
TCGTATGTTATCTTCTACTGTAGCTCGTGATAACATTGAAAACTTTATGAAGCCGAGCTT
CATTAAATCTGCGACATCTATAACCGATTTGGTTGAATTTACTATTGTTAACGATGTTAA
AAAGACCCATTTGGCTGATTGGTTATCTACCATTCCTGAAACTAAATTTGCTGATAAGTT
CGCTTGTCAATTCAATGACCAAGTGAATATGCTTTTTAAGCATGCTCGTAAACTATTTAC
CGCGGGCGATGACCGTACAAATACAGTTCATGTTAAGGACTGGGTTATTGCTGATGAAGT
AACACACAAGCCAGGTGGTTCATCAGTATTAATTAATATCCAGGTTCCTTATTATTACTC
ACGTAATCTTGGCACCATGACAGCTAAAGAAATTAATAAGCACAACAAAACTATTCGTTC
GTTGTCTTATAAACTCCGCATGATGTTAAAAATCATGGACGTAGTGGAAATGTATGACGA
AACCGAAGATAATGGTTCAATGTTATACAGTTCACGCATTCTAATTAAACTGAAGAACCC
TAATACATATAAGACAGTTGTAAAAGAGCCTAAAGTAGAAAAGGTTGATAATCTGAGTGA
AGAACGTGAATATCTCAATGCCCGTTTGATTGAAGTTGAAGCCCAAATTGCAGAACACAC
CAAATTGTTAAAAGCTCTTAATGCAAAAGCAAATGGTTTACGTAATGCTATTGAGGTATT
GAAATGAAAAAGCGTTTATTAGAAGACATTGCAGCTTCAAGTAATTCCAGTTTAATTAAA
ATTATTATGGCTGGTGAGGAAGATGATATGGAAATGCGTGGAAAGATTCACGGCTGCGAC
GATTTAGATTTTAAACCTCCAGCATGGGATGCTATTATGGCTATGGTTGAACGACGTGAA
AGAGCTTCTAAAAACGTTCCTAATTGCCCTGAATGCGGTACTGAACAGGTGCAATTGGTC
CATTGGCAGACTAGTAATCTTCGTTATAAATGTCGCCATTGTAAACACCGATTTGACCGA
GAAGAAAATGACCAAGCGTAAAGAATATATGGAGGCTGCTGAAAAGGCAGTCCGTGAATT
AGCAATAGCTTATTATAATGAACATGGTAAATTTCCTGATAGATACAGCGTGCTTAAATC
TGCTTTAACTCGTTCATATAAAAATATGCTATCAGAAGTAAGTGATATTATATACAAACA
TAAAGAACAAACGGGCCAAAGTCTTGATTACGACGAGACTTTTAAACAAGTACTAGGAAT
TAAGGAATAATATGTTTAAAGTATATGGTTATGATAGCAACATTCATAAATGTGTGTATT
GCGATAATGCAAAACGTCTTTTGACCGTGAAGAAACAGCCGTTTGAATTTATCAACATTA
TGCCGGAAAAAGGTGTTTTTGATGATGAGAAAATTGCTGAGCTTCTGACTAAACTAGGTC
GTGATACTCAAATCGGCTTGACGATGCCTCAAGTATTTGCTCCTGATGGAAGTCATATTG
GTGGATTTGACCAACTGCGAGAATATTTTAAATGATGCTCGAAGGAACTGACTATATTCA
CGATTACCGCGGAAGCGCGGTATATGTAGGTGATGAAGTTGCAGTTTATTATGGGTATGG
AACTTTGATGACAGCCAAGGTTATTCAAATTAAAAATAATCGTGCTAAACTCGAAGTTTA
TTATTCTAATGGTGAAAAGTCTATTTCTAAGTGGAAATACGGCGATTGTATGGTTAAATT
GGGGTAAATATGATTTACGATATTAATGTATCACGAGCTCCGTCAATGGTTACTATTCCT
GCTGAAGAACTAGATCGTCTTCATAAAATTGAAGAACTTCTTTGGGAAATTGAATGTGCC
CTGCCATCAGGACTAGAATCCTGGATTGATGATGAAGAACTTAATAAATTGCGAAATTAA
TTGGTGAAAAATGACTATTGAAAATAAATTAGATGTTGATGCAGTTCTGAGCGAAATCAT
TGAAGACCATGATGCATTTTCAGAAAACTATGATTTCGATTTTTCCGATTATCTTAAACC
TGTCGAAATAGAAGACTGGGTACAAGACGGCAAATGTCAATATCGTCAGTGTGTTTATTT
TAGTCCAAAACATAATGTACATGTAGCGGTAAATGAATCTCGGTCAGGTTCTTATCATTC
TGACTGGTATTATGCAGTTCCGACTGTTGAACTAGTCGAGCCCCATGAACGTGTAGTAAC
TCAGACAGTACGAGAATGGATTACGCTATAAAACCTTGGTGGGCGGCTAGATGGGAAACT
GTAGAGCCAAAGCCGGAAGAATCGGTTTACACTGATGAAGAAACAATATATAATGAACCA
ACGATAAATGACTTAATTGATATGGAGATGGGACATGATTACAGTAGATAAGTGGTTTAG
AATTAATCGTGCTGATACAGGGCTGTGTAATTACTGGCCGGAACTTAGTGCAGGCACTGT
CTTTAAAGTTCGTGAACTTGCAAAAGAATGTGAAGATGATATAGAGCCTGATACTGGAAT
TATTGAAATTGAACTTTCTGATGGAAAGATTATTAACATCTACGATAAGCCAATTACGTA
TTGGTGCTTGTGGAATACTGAATCAGTAGAAAATGGCGAAATTGAAGAAGTTGTAGATAG
AACTAATCAAGTTGTTCAGAAGCCTAAAGCTGATTTTCAAGGTGAACGTATTTCATACGC
ATTAGCTAAATTAGCTGCACAAGAAAATAACGATGGCTATGAAGGAAATTTGATGCAAGC
TGCGGCAGAATATATTGAATGGCTTGAAACCCAAATTTCTTTTTCTGACCAAAAGATTCG
GCAATATAAGCGATTGAATCAAATGTTTTACAATACCTGAAAATAATAAATACCCTTATC
TATTTAAGGTAAGGGTTTTATTATGTTATTGACTGGCAAATTATATAAAGAAGAAAAACA
GAAATTTTATGATGCACAAAACGGTAAATGCTTAATTTGCCAACGAGAACTAAATCCTGA
CGTTCAAGCTAATCACCTCGACCATGACCATGAATTAAATGGACCAAAAGCAGGAAAAGT
ACGTGGATTGCTTTGTAATCTCTGCAATGCCGCAGAAGGTCAAATGAAGCACAAATTTAA
TCGTTCTGGCTTAAAGGGTCAAGGTGTTGATTATCTTGAATGGTTAGAAAATTTACTTAC
TTATTTAAAATCCGATTACACCCAAAATAATATTCACCCTAACTTTGTTGGAGATAAATC
AAAGGAATTTTCTCGTTTAGGAAAAGAGGAAATGATGGCTGAGATGCTTCAAAGAGGATT
TGAATATAATGAATCTGACACTAAAACACAATTAATAGCTTCATTTAAGAAGCAGCTTAG
AAAGAGTTTAAAATGACAATTGAAAAAGAAATTGAAGGATTGATTCATAAAACTAATAAA
GACCTTTTAAACGAGAATGCTAATAAAGATTCTCGTGTTTTTCCAACTCAACGGGACCTT
ATGGCTGGTATTGTGTCTAAACACATTGCCAAAAATATGGTCCCGTCTTTTATTATGAAA
GCGCATGAAAGCGGAATTATCCATTTCCATGATATTGATTATTCCCCTGCTCTTCCATTT
ACTAATTGCTGTTTAGTAGATTTAAAAGGAATGCTTGAGAACGGATTTAAGCTTGGTAAT
GCACAGATTGAAACTCCTAAATCAATTGGAGTTGCTACTGCAATTATGGCACAAATTACT
GCACAGGTTGCTTCCCATCAATATGGCGGAACGACTTTTGCGAATGTAGATAAAGTACTT
TCTCCTTATGTTAAACGCACCTATGCAAAACATATTGAGGATGCAGAAAAATGGCAAATC
GCTGATGCGTTGAATTATGCTCAATCTAAAACAGAAAAAGATGTATACGATGCATTCCAA
GCTTATGAATATGAAGTAAATACTCTCTTTAGTTCAAACGGACAAACGCCTTTTGTAACA
ATTACATTTGGTACGGGAACTGACTGGACTGAACGAATGATTCAGAAAGCAATTCTGAAA
AATCGTATTAAAGGTCTTGGTCGTGATGGGATAACTCCTATTTTCCCTAAGCTTGTTATG
TTCGTTGAAGAAGGTGTTAATCTTTATAAAGACGATCCGAACTATGATATTAAACAGCTT
GCTCTAGAGTGTGCAAGCAAAAGGATGTATCCTGATATTATTTCAGCTAAGAACAATAAA
GCTATCACTGGTTCATCTGTTCCTGTTTCTCCAATGGGTTGCCGTAGTTTCTTGAGCGTA
TGGAAAGATTCGACTGGTAATGAAATTCTTGATGGACGTAATAATCTTGGTGTTGTAACA
CTGAATCTTCCTCGCATCGCGTTAGATTCTTATATTGGAACACAGTTCAATGAACAGAAA
TTTGTTGAATTATTCAATGAACGAATGGATCTGTGTTTTGAAGCTTTGATGTGTAGAATT
AGTTCCTTAAAAGGAGTTAAAGCGACTGTTGCTCCTATTCTTTACCAAGAAGGTGCATTC
GGGGTTCGTCTTAAACCTGATGACGACATAATTGAGTTATTTAAAAACGGTAGAAGTTCA
GTGTCTTTAGGATACATTGGTATTCATGAATTGAATATTCTTGTCGGTCGTGACATTGGA
CAAGAAATTTTAACTAAAATGAATGCTCGTCTTAAACAGTGGGCTGAAAGAACTGGGTTT
GCTTTTAGTTTGTATTCGACTCCTGCTGAAAACCTTTGTTATCGCTTCTGTAAACTTGAT
ACAGAAAAATATGGAAGTGTAAAAGATGTTACCGATAAAGGATGGTACACTAACAGTTTC
CATGTTTCAGTAGAAGAAAATATTACTCCGTTTGAAAAGATTTCTCGTGAAGCGCCATAT
CATTTCATTGCGACAGGTGGTCACATTTCTTATGTTGAACTTCCTGATATGAAAAATAAC
TTAAAAGGTCTTGAGGCCGTGTGGGATTATGCTGCACAACATTTAGATTATTTTGGTGTT
AATATGCCAGTAGATAAATGTTTTACGTGTGGAAGTACTCATGAAATGACTCCTACTGAA
AACGGATTTGTTTGTTCTATTTGTGGAGAAACTGATCCTAAAAAGATGAATACCATAAGA
AGAACATGTGGTTATTTGGGAAATCCGAACGAGCGCGGATTTAATCTCGGTAAAAATAAA
GAAATCATGCATAGGGTTAAACACCAATGAATTATGATAGATTTTATCCTTGCGATTTTG
TGAATGGCCCTGGTTGCAGGGTCGTTCTTTTCGTTACAGGTTGTTTGCATAAATGCGAAG
GGTGTTATAATAAATCAACATGGAATGCTAGAAATGGTATTCCATTCACTGGAGAGACAC
TAGAGCAATTAATTGAATGTTTGAATAATGATTATATAGAAGGATTGACTATAACCGGAG
GTGACCCTCTCTATCCTGATAACCGAGATGTTATTCATTGCATTGTTCAAACGGTAAAAA
ATCTTTATCCCAGTAAAAGCATTTGGTTGTGGACAGGATATAAGTTTGAAGATATTAAAC
AACTAGAAATGCTTAAATATGTTGATGTTATTATTGATGGGAAGTATGAGAAAAATCTTC
CGACTAAAAAGCTGTGGCGAGGATCAGATAATCAGCGACTTTGGTCAAATACCGATGGGG
TGTGGACACATGATTAAATTGAATTACATTATGGATACTATAAATGATATGATTTTTCAT
TTTGGTCCAGAATTTTATTCGCAATATAGTTTAGTGCTTATCAATGCTTGGTTAATCAAT
TAAGGGTAAAATATGTATAAATTTCGTAAAGGTTTAGCTGATTTTCTTACAACTGTAACG
TTCTTTTTGTTTATGGCAGTTGGAGCTATTTTCCTTATTCCTTTTATTGTTGTATTTTTC
GTTATTAGTTTAATTTCTCCAGAAAAGGGCTTATCTTCTAGTGAGTTCAATAAGCGTCTG
GATAAAATTACTAACAAGCTGAATGCTGCTCTTAGTAAGGAATAGTTGTGAAACAAAATA
AGATTGAAGTCTATGGAATTCCAGATGAAGTAGGTCGTTGTCCTGGATGTCAATCAGTTA
CAAAACTTCTAAAGGAGCTTAATGCTCCTTTTACTTTCTATAAAGTTCTTACAAATAATG
GTAAGATTGAGTATGATCGTCCGCTGATTGTATCTCTTGCTAAACGCGCTGGATTCACAT
CTCTTAACATTCGTTATCCGGTCATTTTCATTAATGATTCTAGACAAAAGAACATTAAAC
ACTTCAAAGAAACTCTCATTTCACTTGGATATGATAAAGATATCATAGAAGACTAAGACG
GGCCCTCTGGGCCTTTCTTTCTCACATTCTGTATATTACCATTCTAAGCTATCGTTCCCT
TCTTATCATTCCCTAAAATAATTTTCACAAAGTTGTTTACAACAAGTTCAAACCGTGGTA
TTATTAACATATGAATTGCCTTTGAGGATTTGATATGGTTGTGGTTGATAAAGAAATTAA
AAAGGGACAATATTATTTTATTAATGGTAATGTTGTTCGTGTTACTTACGTAAATGGTTA
TGATGTTTATTATCTTATACTTAAGTTACATAAACACATGATTTGTGATCGTGCTGTATT
TAGTTCAGTTGCTAAGGAAATTAAACTCCATGGGTAAAACGTATCGTCGTAAAGACTTGA
AAGTTCGTGATTATGACTATTTCGGAAAGCGTAAAGCTCCTGATGGGATAAGTCATAAAG
ATATGGTTGAAAACATTTTTCGTTCAGATAAATGGCGACGTATGCGAGGTGTTGATTCAG
AGGTTAAGAATGAATTGAATCGTCAACTGCGTGGTGAAGTAAGAAAGTTGAAAAAATCAG
TTTACATTGACGATGATTTTGATTATAATACATCTCAACGAGTTGCTAAGCGCAAATCAA
ACGAATGTTATCGTTACAGCTGAGGAAAATATGAATATCAAACGAATGCTTTTTAAGCAG
GGGTTATACACTTTAAATGTTGCTCCAAAAGGCGATACGACCAAGTGGTCAGTAAATGAC
TGGATTAAATTTATTGATGAAAATGGTAATTGGAAAATTTAAATGAATCCTGAATCTAAA
TTATCGCAACGAATTGCTGAAGCTCGTCGCCAGTTCTTTGAAAATATGATAGCCCAGGGT
ATTGATGACGAAGTTTTTCTGAACTGGTTTTGGAATCACAAATATTCAAAATGCGCAGGA
GCAATATTAATATCAGCCGCAATGATGTACGAAGGCTGGAAGGGTGCCAAACAGTTTAGC
TAAGGGCTTCGGCCCTTTTTGGATAATAAAATTTTAACGCAATTGAGGATAATGTATGAC
TATTCAAATTAAAAACGCCATCAATTCTTATGCATATGATAAAGTAGTTTCTTTGCTAGA
AAAAGGCGATATTGTAACTCCTCAAAGTTTGGATAAATGGGAAAAAGAGCTTCATCAGAC
GATGAAACAGAATGATCAGAAGATTGGACGCAACACTATCCGCGAATTGTTGGTTCAATA
TATCTTGTCAGAATTTGATGTTAAAGCTTTTGGCGTAGAATCTAAAGCTTATCAAAAACA
TGAAATTTCCGATAAAACTATTCGTCGTATGAAAAATCAACGCAAGAAAAAATTTGCTGA
CCTGAAAATTACTAAGGTATAATTATGAACGAAGCTCTTATTAACGATTTACGTCTTGCC
GGATATGAAGTAAATACAAATGGCATTGGTTTAACTCAAATTGAAGGAAATGGATTCATC
CTTGAGTATGAATTTAGCCAATGGTGGTTATATGCCAATTATGGCGAATTGATTGAATAT
GTTGACCAATTTGATTCACTAGATGCAGCTCTTGAAGCGGCTAAGTTGATGAATGTATGA
AATTTATTAATATTTCTATTACTATTGAAAATTATGGCATTTTCTATGTTGACCAATACA
TGAAAATTTCATTTTTCCCAAATAAGACTGGTGTTGGATATTGGGAAAGCCATGTTTCTG
AATTAAATGAAAGTGAATATGTTAGTACACATGAAAAGTTTTTAGACTTTTTATATCATG
CTGATCTAACTAGTCATTATATAGATATTCATGAATTTAAAAAGATGATGGAGAAAGTGT
TCCAAGCATACTGTTTACTTAGATAACTGATTCATCCTCTGTGCTTTAAGATAGATCTTC
AAATATTATGATATAATAGATCTATGAATTGAGCTAAGAGGTGAAAATGTCAGAAACTAA
GCCTAAATATAATTACGTAAACAATAAAGAGCTTTTACAAGCTATTATTGATTGGAAAAC
AGAATTAGCAAATAATAAAGACCCAAATAAAGTAGTTCGTCAGAATGATACTATCGGATT
AGCCATTATGCTTATTGCAGAAGGCTTATCTAAGCGTTTCAACTTTTCAGGATACACCCA
GTCTTGGAAACAAGAAATGATTGCAGATGGTATAGAAGCTTCTATTAAGGGGCTTCACAA
TTTTGATGAAACGAAATATAAAAACCCACATGCATATATAACTCAAGCTTGTTTTAATGC
ATTCGTCCAACGTATTAAAAAAGAACGTAAGGAAGTTGCAAAGAAATATAGTTACTTCGT
TCACAATGTCTATGACAGCCGTGACGACGATATGGTTGCGTTAGTAGATGAAACTTTTAT
TCAAGACATCTATGATAAAATGACGCATTACGAAGAATCAACCTATAGAACACCGGGGGC
TGAAAAGAAAAGTGTTGTAGACGATTCTCCTAGTTTGGATTTTTTATATGAGGCTAACGA
TTAACCTCTCCGGATTCTTGGAAGAAATACCTGAAGTTGAAGCTATTCCCTATTTACTTA
AAATGTATCTCAGGGAAGTTTTAGCTCTTGACATTGATATTGATCCAGAAAATCCGTATG
ATACCGCTTTTAAATCTAATGGTGTAGAATTAAACTATCGGTATCATTTAACAGATGATG
ATTTTTATTTTATATTAGAGAAATAATATGACTGATAAACCCGAAATTAATGATGAAGTG
GAAAAGCTTATTTCTTCTATTGAAGAAAAGAACCGTCTTGAAGCAGAAAGAAAAGCAAAT
AAGTTATTGTCTAAAAACAAACGCGAACTGAATCGTCTTTATAAGCACGCTCAGACTGCA
GCTGAAAACAATAATTTTGCTCAATACGAATATGCTATCAAGAAAAGTCGGGATATTCTA
AAACAGCCATATAACGATGAACTCATCAGTATTCTTTGGAAGACTACTAGATCGCAAATT
GAGGATATGATTGATGCTTACACACGTAAAATTCAAGCGTCTTAAAATTAATGCAGGATT
TACTGAATCTTTGAATGGTCATCTTTGTGTGAAAATTTCTGAAAAAGAATACCATGATAG
TTCAATTAAAGAAGTTAATCCTCCTATTGTAAGAGCAGACCCTAATATGAAAGTGTGGGT
TGATTCTTATCAAGTCAAAAAATGGTGGCAGTTATGAAAGATGAACACCCAGACTTCTGA
AATAGATTATAATAAAATTCGTTCCTCTAAAGAGGAAATGATGAGACTCTTTAAAGCGTC
TCATGATAAAGCTAAAGCAGAAGGAACTATAAAATATAAGCGCATAAAATTTAAAAGTTC
TAACGAGCCTCTGTATGGCGTATTATGTGGATAGGAGCTTCGGCTCCTATATTGCTTTAT
AAATTTTTGGTAAAATAAACCAAAACAAAGAGGATATTAAATGAAAGTATGTATTTTTAT
GGCTCGAGGTCTTGAAGGTTGTGGTGTAACTAAATTCTCACTCGAGCAACGTGATTGGTT
TATTAAAAATGGTCATGAAGTGACTTTGGTTTATGCTAAAGATAAATCATTTACTCGTAA
TTGCGCGCATGATTATAAATCATTTTCAATTCCGGTTTTATTGGCAAAAGAATACGATAA
AACACTTAAGCTGGTAAATGATTGTGATATTCTAATTATCAATTCAGTTCCTGCTACTTC
GGTTGAAGAAGACACTATTAATAACTATAAAAAAATTATTGATAACATTAAACCTTCTGT
TCGTGTTGTAGTTTATCAGCATGACCATTCTTCTCTTTCTTTGCGTCGAAATTTGGGATT
AGAAGAAACTGTTCGTCGAGCTGATGTTATTTTTAGCCATTCTGATAATGGTGATTTTAA
TAAAGTTCTGATGAAAGAATGGTATCCTGAAACAGTTTCTCTGTTTGATGATATTGAAGA
AGCACCGACAGTATATAACTTTCAGCCTCCTATGGATATTGCGAAGGTTCGGTCAACCTA
CTGGAAAGATGTTTCTGAAATTAACATGAATATCAACCGTTGGATTGGTCGTACGACCAC
ATGGAAAGGTTTTTATCAGATGTTTGATTTTCATGAAAAACATCTTAAACCTGCAGGACT
AAGTACTATTATGGAAGGTCTGGAACGTTCTCCAGCGTTCATTCCTATTAAAGAAAAAGG
AATTCCATACGAGTATTATCGTCTTCATCAAGTAGACCAAATTAAAATTGCTCCTAATTT
GCCAACGCAAATTCTTGACCGTTATGTAAATAGCGAAATGCTTGAACGTATGAGTAAATC
CGGTTTTGGTTATCAGTTGAGTAAGTTGGATAAAAAATATCTACAACGTTCTTTAGAATA
TACTCATCTCGAGCTTGGTGCATGTGGAACAATTCCGGTATTTTGGAAATCTACTGGCGA
AAATTTAAAATTCCGTGTTGATAATACTCCTTTGACCTCGCATGATAGCGGTATCATTTG
GTTTGATGAAAATGACATGGAATCAACATTTGAACGTATTAAAGAACTGTCATCTGATCG
AACTCTTTATGACCGCGAACGCGAAAAAGCTTATGAATTTTTGTATCAGCATCAAGATTC
AAGCTTCTGCTTTAAAGAACAGTTTGACATTATTACAAAATAAAGGGCTTCGGCCCTTTA
GCTTTATACGGAGTTTGATATAATGATATTTCTTGGATATGTGATACTTTTTCTTGCATT
TTATCTATTCACTAGAGCATGTTGGATTGGGTTCTTTAGCACGCCAGATGGGTTTATTTC
AATAATTTTATTTTGCATTTCAATGACGGTTCTTGATATATGAAAATTTTAAATTTAGGT
GATTGGCATTTAGGCGTTAAAGCCGATGATGAGTGGGTTCAATCCATTCAGTTGGATGGA
ATTAAACAAGCAATAGAATATTCTAAGAAAAATGGAATTACTACATGGATTCAATACGGC
GATATTTTTGATGTGCGAAAAGCAATCACGCATAAAACTATGGAGTTCGCTCGTGAAATA
GTTCAAATGCTTGATGATGCTGGTATTACCCTACATACTGTTGTAGGAAACCATGATATG
CACTTTAAAAATACTTTAACTCCAAATGCCTCTACTGAGCTTTTGGCTAAATATCCTAAT
GTTAAAGTATATGATAAGCCTACTACAGTAGATTTTGACGGATGTTTAATTGATTTAATT
CCTTGGATGTGTGAAGAAAATACTGGTGAAATTCTTGAACACATCAAAACTTCATCTGCT
TCTTTTTGCGTTGGTCACTGGGAACTGAACGGATTTTATTTTTATAAAGGAATGAAATCT
CACGGTCTTGAACCTGATTTCCTTAAGACTTATAAGGAAGTGTGGTCTGGTCACTTCCAT
ACTATCTCTGAGGCTGCTAACGTCAGATATATTGGGACACCATGGACACTAACTGCAGGT
GACGAGAATGACCCTCGTGGGTTCTGGATGTTTGATACAGAAACAGAACGAATGGAATTT
ATTCCAAACAACACTACCTGGCATCGTAGAATTCATTATCCATTTAAAGGAAAAATTGAC
TATAAAGATTTTACAAATCTATCAGTACGTGTTATAGTAACTGAAGTAGACAAAAATCTG
ACGAAGTTCGAATCTGAACTAGAAAAAGTTGTGCATTCATTACGAGTTGTGTCAAAGATT
GATAACTCTGTCGAGTCAGATGACAGTGAAGAAGTTGAAGTTCAATCTCTTCAGACGTTG
ATGGAAGAATACATTAATGCAATTCCAGACATCACTGATTCTGACCGCGAAGCACTTATT
CAATATGCAAATCAGTTATATGTAGAGGCAACACAATGACTTTTGATGAATTTAAAAATG
TTATGATGAGTCAGCATTTTGAATGCGAAGTAAAAGATGATATTGGGCATAAAGAAATTA
TTGAATATTGGTTTGAACCGCTAGAGGTTGAAGATAATTGTATTAAAAAGGTTACGGTCT
GCACTGACTGGGCTGTATCTTTTAACTTCAACATTTTAGATAATGACACACCTAAATCAT
TACGAGATATGGCTGTATCTTGTATTAAGGATGCATACTGTGAAGTTTTCGACATTTGAC
ATTAACGATGAATTCATAGCAAATATTGATTATACCGAAGAAGATTCTAGATATGTTGGA
ATAATTTATATTACATCAAAAACAGCACAAGGTGTTGTTTGCATGGCTGAATTTGATGAA
TACTTTTTAGATTATGATGATATGATAGAATGGTCTAAAAGATACATTAAAAGGAATCTT
TTGTGAAGAATTTTAAACTAAACCGAGTTAGGTATCAAAATATAATGTCAGTAGGTGGAA
ATCCTATTGACATTCAATTAGATAAGGTTCAAAAAACTCTTATTACTGGCCGAAATGGCG
GTGGTAAGTCTACTATGTTAGAAGCCATCACATTTGGGCTTTTTGGCAAGCCATTTCGTG
ATGTAAAGAAAGGTCAATTAATAAACAGCACAAATAAGAAAGAACTTTTAGTTGAACTGT
GGATGGAATATGATGAGAAAAAGTACTATATCAAAAGAGGACAAAAACCAAACGTTTTCG
AAATCACCGTTAACGGTACACGTCTTAATGAATCTGCCAGCAGTAAAGATTTCCAAGCAG
AATTTGAACAGCTTATCGGAATGTCATATGCCAGTTTCAAGCAGATTGTTGTCCTTGGTA
CAGCAGGGTATACCCCTTTCATGGGTTTGTCGACCCCTGCACGAAGAAAGCTTGTGGAAG
ACCTGCTTGAGGTAGGAACATTAGCTGAAATGGATAAGCTTAATAAAGCACTAATATGTG
AATTAAATTCACAAAACCAAGTGCTTGATGTTAAAAAAGATAGTATTATCCAACAAATTA
AAATATATAATGATAATGTTGAACGCCAGAAAAAATTGTCTGGTGACAACCTTACTCGTC
TTCAAAATATGTATGATGATTTGGCAAAAGAAGCTAGAACGCTAAAATCAGAAATAGAAG
AAGCTAATGAAAGATTAGTTAATATTGTTTTAGACGAAGACCCGACTGATGCATTTAATA
AAATCGGTCAAGAAGCAGTTTTAATTAAATCAAAAATTGACTCGTATAATAAAGTCATTA
ATATGTATCATGAAGGTGGATTATGTCCAACCTGCTTGTCACAATTAAGTTCCGGTGATA
AAGTTGTTTCTAAAATTAAAGATAAAGTTTCTGAATGTACGCATTCGTTTGAACAGCTTT
CAACACACCGTGATAATTTAAAAGTTCTTGTTGATGAATACCGAGATAATATTAAAACTC
AGCAGTCGTTGGCAAATGATATTCGCAATAAAAAGCAATCTCTAATCACGACGGTAGATA
AAGCTAAAAAAGTTAAAACAGCTATAGAAAAAGCATCTTCTGAGTTTATTGACCATGCTG
ATGAAATAGCACTGCTTCAAGAAGAACTTGATAAAATTGTTAAGACAAAAACTAATTTAG
TAATGGAAAAATACCACCGAGGAATTTTGACTGATATGCTCAAAGATTCTGGTATTAAAG
GTGCTATTATTAAAAAGTACATTCCATTATTTAATAAACAGATTAACTATTATCTTAAAA
TAATGGAAGCGGATTATGTGTTTACATTAGATGAAGAATTTAATGAGACAATTAAATCCC
GTGGTCGTGAAGATTTTAGTTATGCTTCATTCAGTCAAGGTGAAAAAGCGCGAATTGATA
TTGCTCTTTTATTTACTTGGCGTGATATTGCTGAAAAAGTTTCAGGTGTTAAAATAAACA
CACTAATTCTTGATGAAGTTTTTGATTCAGCGACCGACGTTGAAGGTGTAAAAGCTATTT
CAACTATTTTAGATAGTTTAAAAAATACTAATGTTTTTGTTATTTCGCATAGAGACCATG
ACCCACAAGCATACGGTCAGCATCTTCAAATGAAGAAAGTTGGTCGATTTACTGTAATGG
TTTAATTTATAAGAGATTATGCTTTAATTTATTAGAGTATAATCTCTGTGGAGGAAAAAC
ATGGAATATTCAACTGGACAACATCTATTAACTATTCCTGAAATAAAACGATATATTCTG
AGAAATAATTTTTCTAATGAAGAGCATATAGTTACTGAATCTATGCTTAGGAATGCATTT
AAAGCAGAATATACAAAAATAATGTCCAATAGAAATGAAGCTTGGACTGTTACTGATTAT
TATGACTAAAGGTGTATTATGACTAAAATTACTGTGAATTATACTGTTGACGTAAAAGAT
ATTCAGCCAAAACACGTGCGTTCTGAATCAAATCCACAAAACCAAAATAAAATTCGTCGA
GCATGGGTTTTGTCTCTTTCTGATAACGCAATGGAAGTTATTCAGAACAAAATTAAATCT
GCACCTGCTCGTCATGCGTATTATGAAGCTATCGATCATGAAGTAAGTAATAAATGGATT
GAACTAATGCGCAAACATACTACAGAATCTCTAAACGCCGGTGCTAAATTTATTATGACT
TCATGTGGTGAACGCCTTGAAGATGAATATTGCGGTAATGCAGATGAACGTCTAATTGTT
GCTGCTCAAATTGTTGCCGAAACAATTGCGGCTGATTTTAATCGTTAATTGCTTTATTAA
ATTAGTTATAAAATTAAATCTCATTTGAATTGAAGGAAATTACATGAAACTGTCTAAAGA
TACTACTGCTCTGCTTAAAAATTTCGCTACTATTAACTCTGGTATTATGCTTAAATCAGG
TCAATTTATTATGACTCGTGCAGTTAATGGTACAACTTATGCGGAAGCAAATATTTCTGA
CGTTATTGACTTTGATGTAGCAATTTACGATTTGAACGGTTTTCTTGGTATTCTGTCTCT
AGTTAATGATGATGCAGAAATTTCCCAGTCAGAAGATGGAAATATTAAAATTGCTGATGC
TCGTTCAACAATTTTTTGGCCAGCAGCCGATCCGAGTACAGTAGTTGCTCCTAATAAACC
AATTCCATTCCCGGTAGCATCTGTTGTTACTGAAATTAAAGCTGAAGACCTTCAACAACT
GTTGCGTATATCTCGTGGTCTGCAAATTGATACAATTGCTATCACGGTAAAAGAAGGTAA
AATCATAATTAACGGTTTTAATAAAGTAGAAGATTCTGCTTTGACTCGTGTTAAATATTC
TTTGACTCTTGGTGATTATGATGGTGAAAATACATTTAATTTCATTATCAATATGGCAAA
TATGAAAATGCAACCAGGAAATTATAAACTTCTGCTCTGGGCAAAAGGTAAACAAGGTGC
TGCTAAATTTGAAGGTGAACATGCGAATTATGTAGTAGCTCTTGAAGCTGATTCTACCCA
CGATTTTTAATAGAGGGCTTCGGCCCTTTATAATTTACACTAAAACTTGAATGAGGAAAT
TATGATTACCGTAAATGAAAAAGAACACATTCTTGAACAGAAATATCGTCCATCTACTAT
CGATGAATGTATTCTTCCCGCCTTTGATAAAGAAACCTTTAAATCTATTACAAGTAAAGG
TAAGATTCCACATATTATTCTTCATTCTCCTTCTCCAGGAACAGGTAAAACAACTGTAGC
GAAAGCATTGTGTCATGATGTAAATGCTGATATGATGTTTGTGAATGGATCAGATTGTAA
AATTGATTTCGTTCGTGGTCCTTTGACTAATTTTGCCAGCGCCGCTTCATTTGATGGTCG
TCAAAAAGTAATCGTTATTGATGAATTTGACCGCTCAGGATTAGCAGAGTCTCAGCGACA
TCTTCGTTCCTTTATGGAAGCTTATAGTTCAAACTGTAGTATTATTATTACTGCTAACAA
TATTGATGGTATTATTAAACCGCTTCAGTCACGCTGTCGAGTTATTACGTTCGGTCAACC
GACCGATGAAGATAAAATTGAAATGATGAAGCAGATGATTCGTCGGTTGACCGAAATCTG
TAAGCATGAAGGAATTGCTATAGCTGATATGAAAGTTGTAGCAGCTTTGGTTAAAAAGAA
TTTTCCTGATTTTCGTAAAACTATTGGCGAGCTCGATAGTTATTCATCTAAAGGTGTTTT
GGATGCTGGTATTTTATCACTGGTTACTAACGATCGTGGTGCTATTGATGATGTTCTTGA
GTCTCTCAAAAATAAAGATGTTAAACAACTCAGAGCTTTAGCACCAAAATATGCAGCTGA
TTATTCGTGGTTCGTAGGTAAACTTGCCGAAGAAATCTATACACGCGTAACTCCGCAAAG
TATTATTCGTATGTATGAAATTGTTGGTGAAAATAACCAGTATCATGGAATTGCGGCTAA
TACTGAATTACATTTAGCATATCTTTTCATTCAATTGGCATGTGAAATGCAGTGGAAGTG
ATATGAGCTTATTTGAAGATGATATTCAATTAAACGAGCATCAAGTTGCTTGGTATTCAA
AAGATTGGACAGCTGTCCAATCCGCTGCTGATTCTTTTAAAGAAAAAGCTGAAAATGAGT
TTTTTGAAATAATTGGAGCTATTAATAATAAAACTAAATGCTCTATTGCTCAAAAAGATT
ATTCAAAATTCATGGTTGAAAATGCATTATCACAATTTCCAGAGTGCATGCCAGCTGTAT
ATGCTATGAATTTAATTGGATCAGGCTTAAGTGATGAAGCTCATTTTAATTATCTAATGG
CTGCAGTTCCTCGTGGTAAAAGATATGGTAAATGGGCAAAACTAGTTGAAGATTCCACCG
AAGTATTGATTATTAAGTTAATTGCTAAGCGGTATCAAGTTAATACAAATGATGCAATTA
ACTATAAATCAATTCTTACTAAAAATGGAAAACTTCCTTTAGTATTAAAAGAACTAAAAG
GTTTAGTCACGGATGATTTTTTGAAAGAAGTGACTAAGAACGTAAAAGAACAGAAACAAC
TCAAAAAACTAGCATTGGAATGGTAAAATGATTGAAATTACTCTTAAAAAACCTGAAGAT
TTTCTGAAAGTAAAAGAAACTTTGACTCGTATGGGAATTGCTAATAATAAAGATAAAGTT
CTGTATCAGTCCTGTCATATTCTTCAGAAAAAAGGACTATACTATATCGTTCATTTTAAA
GAAATGCTTCGTATGGATGGTCGTCAAGTTGAAATGACAGAAGAAGATGAAGTTCGTCGT
GATTCGATTGCATGGTTGTTAGAAGATTGGGGATTGATTGAAATCGTTCCTGGTCAAAGA
ACTTTTATGAAAGATTTAACTAATAACTTCCGAGTTATTTCTTTTAAACAAAAACATGAA
TGGAAACTCGTTCCTAAATATACGATTGGTAATTAAGGTAAATTATATGACACAATCAGA
GATTCAGTTTACCGAAGCTTTTCTAATATTCGAAAATCTAAAACAAACATATGGTCTGTC
TTCTACCCAACTGGTTTTTGACCTCCCGGAAGATAAACAAATAGAATTCCAAAAAGAATT
CCAACGATTAGTTTACCCACGCCAACGCGCATTTCATGCGATTATCAAAACCACAAATAC
AGATGGCAAGTCCGTTATATCGCGTCGTACAATAGAAATTTAAAGCAAAGGGGCTTCGGC
CCCTTATTTGGAGTATAATATATCAAGAGCCTAATAACTCGGGCTATAAACTAAGGAATA
TCTATGAAAGAATTTTATATCTCTATTGAAACAGTCGGAAATAACATTGTTGAACGTTAT
ATTGATGAAAACGGAAAGGAACGTACTCGTGAAGTAGAATATCTTCCAACTATGTTTAGA
CACTGTAAGGAAGAATCAAAATACAAAGACATTTACGGTAAAAACTGCGCTCCTCAAAAA
TTTCCATCAATGAAAGATGCTCGAGATTGGATGAAACGAATGGAAGACATCGGTCTCGAA
GCTCTCGGTATGAACGATTTTAAACTCGCTTATATCAGTGATACATACGGTTCAGAAATT
GTTTATGACCGAAAATTTGTTCGTGTAGCTAACTGTGACATTGAGGTTACTGGTGATAAA
TTTCCTGACCCAATGAAAGCTGAATATGAAATTGATGCTATCACTCATTACGATTCAATT
GATGATCGTTTTTATGTTTTCGACCTTTTGAATTCAATGTACGGTTCAGTATCAAAATGG
GATGCAAAGTTAGCTGCTAAGCTTGACTGTGAAGGTGGTGATGAAGTTCCTCAAGAAATT
CTTGACCGAGTAATTTATATGCCATTCGACAATGAGCGTGATATGCTCATGGAATATATT
AATCTTTGGGAACAGAAACGACCTGCTATTTTTACTGGTTGGAATATTGAGGGATTTGAC
GTTCCGTATATCATGAATCGCGTTAAAATGGTTCTCGGTGAACGTAGTATGAAACGCTTC
TCTCCAATCGGTCGAGTAAAATCTAAACTTATCCAAAATATGTACGGTAGCAAAGAAATT
TATTCTATTGATGGCGTATCTATTCTTGATTATTTAGATTTGTATAAGAAATTCGCATTT
ACTAATTTGCCGTCATTTTCTTTGGAATCAGTTGCTCAGCATGAAACCAAAAAAGGTAAA
TTACCATACGACGGTCCTATTAATAAACTTCGTGAGACTAATCATCAACGATACATTAGT
TATAACATCATTGACGTAGAATCAGTTCAAGCAATTGATAAAATTCGCGGGTTTATCGAT
CTAGTTTTAAGTATGTCTTATTACGCTAAAATGCCTTTTTCTGGTGTAATGAGTCCTATT
AAAACCTGGGATGCTATTATTTTTAACTCATTGAAAGGTGAACATAAGGTTATTCCTCAA
CAAGGTTCGCATGTTAAACAGAGTTTTCCGGGTGCATTTGTGTTTGAACCTAAACCAATT
GCTCGTCGATATATTATGAGTTTTGACTTGACGTCTCTGTATCCGAGCATTATTCGTCAG
GTTAACATTAGTCCTGAGACTATTCGTGGTCAGTTTAAAGTTCATCCAATTCATGAATAT
ATCGCAGGAACAGCTCCTAAACCGAGTGATGAATATTCTTGTTCTCCGAATGGATGGATG
TACGATAAGCATCAAGAAGGTATCATTCCAAAGGAAATCGCTAAAGTATTTTTCCAGCGT
AAAGATTGGAAAAAGAAAATGTTCGCTGAAGAAATGAATGCCGAAGCTATTAAAAAGATT
ATTATGAAAGGCGCAGGGTCTTGTTCAACTAAACCTGAAGTTGAACGATATGTTAAGTTC
AGTGATGATTTCTTAAATGAACTATCGAATTATACTGAATCTGTTCTCAATAGTTTGATT
GAAGAATGTGAAAAAGCGGCTACACTTGCTAACACAAATCAGCTGAACCGTAAAATTCTT
ATTAACAGTCTTTATGGTGCTCTTGGTAATATTCATTTCCGTTACTATGATTTGCGAAAT
GCTACTGCTATCACAATTTTCGGCCAAGTTGGTATTCAGTGGATTGCTCGTAAAATTAAT
GAATATCTGAATAAAGTATGCGGAACTAATGGCGAAGATTTCATTGCAGCAGGTGATACT
GATTCGGTATATGTTTGTGTAGATAAAGTTATTGAAAAAGTTGGTCTTGACCGATTCAAA
GAGCAGAACGATTTAGTTGAATTCATGAATCAGTTCGGTAAGAAAAAAATGGAACCGATG
ATTGATGTTGCATATCGTGAGTTATGTGATTATATGAATAACCGCGAGCATCTGATGCAT
ATGGACCGTGAAGCTATTTCTTGCCCTCCGCTTGGTTCAAAGGGCGTTGGCGGATTTTGG
AAAGCGAAAAAGCGTTATGCTCTGAACGTATATGATATGGAAGATAAGCGATTTGCTGAA
CCGCATCTAAAAATCATGGGTATGGAAACTCAGCAGAGTTCAACGCCTAAAGCGGTCCAA
GAAGCTCTCGAAGAAAGTATTCGTCGTATTCTTCAGGAAGGTGAAGAGTCTGTCCAAGAA
TATTACAAGAACTTCGAGAAAGAATATCGTCAACTTGACTATAAAGTTATTGCTGAAGTA
AAAACTGCGAACGATATAGCGAAATATGATGATAAAGGTTGGCCAGGATTTAAATGTCCG
TTCCATATTCGTGGTGTGCTAACTTATCGTCGAGCTGTTAGCGGTTTAGGTGTAGCTCCA
ATTTTGGATGGAAATAAAGTAATGGTTCTTCCATTGCGTGAAGGAAATCCATTTGGTGAC
AAATGCATTGCTTGGCCGTCGGGTACAGAACTTCCAAAAGAAATTCGTTCTGACGTACTG
TCTTGGATTGACTACTCAACTTTGTTCCAAAAATCGTTTGTTAAACCGCTTGCAGGCATG
TGTGAATCGGCTGGTATGGACTATGAAGAAAAAGCTTCGTTAGACTTCCTGTTTGGCTGA
TAGAATAAATCTAGGGACCTCCGGGTCCCTTTTTCATACAAGTAATATAAATCTATACTT
ATGAAAAACAGATGATTCTGGACCTTTAGAATTCCCTAAAAAAATTTCACAAAACTGTTT
ACAAGACTGTTCTTCTGTGGTACTATACAACTATCAACTACTGATACAGATTTGGAGAAT
AAAATGAAAATTGTTATGGGATGCTTAGCAGTTTGTTTAGTTGCATTAGTAGCAGTTCCA
TTTGTTAGTGTTGAAAATGATACTCAACCTGTGATTAAATCTAGCACCGTTATTCACACT
AATGGTAAAATATCAGTTAAAATTGATGATAATCTTCATGTGAATACAAATGGATCTTTA
GGTGTGCAAATGGGTAATACCTGCATAAGCACTACTGGAGTAATTACTACTTGCATTTGA
GGAAATTATTATGAAAATCGCTATTTTGGTTATTGCATTAGGTCTTACTGGTTGTGTGGC
TCAAGGACCGGTAGTAAATCAGTCTGATGTAGGAAAAATTGTAAACTGTTCAAGCAAATT
TTATAATCCTAATGTCAAGTGTTATAAAGAAGCTCCAAAGCAAACAGTAGAACAAATGCA
GGCGAATTTTGACGAAGCTATTCGTCCAGATGAATCTGCTCAAGCATATCGTAATTCGGA
TGTAATTACACGCGAAGAAAAAATTGAAAACTACTGCGCTGAGCTTTGGGCTAATTGGGC
TAATAATTACCAATGGCGTACTGGTAAAAATGCTCCGATGGAGTATGTAGTGAATTCTTA
TAATTCATGTGTAAAAAATTTGACTAAGTGAGGAAAACATGGAAACTTTAGTAGCAGGTT
CAATTTTTATGGTTTTAGTTTCAGGTGTGTTGGCTATTATTATATACATGCTTCCATGGT
TTATCGCCTTGATGCGTGGGTCAAAATCGACAGTAGGAATCTTTTTCACATCTTTACTGT
TTAACTGGTCAATTATTGGTTGGTTTATTACATTTATTTGGTCAATTGCGGGTGAAACTA
AAAAGTCTGCACAACCAAATCAGGTAATTATCATCAGAGAGAAGGAATGAAAAGCAAAAT
TATAACAGTGTTGCTTTTAATCTTGATGATTATAATAAGTATATACTATAGTGTAACGGT
TCCTCTTATGATTCCAACTATTATTTTAGGTTGGGGTTTATTACTGTTACAAGTTAAATA
TGAATGTATCAATTGAGGTTTAAATGATTAGTGACTCTATGACAGTTGAAGAAATCCGTC
TTCATTTGGGGCTTGCATTAAAGGAAAAAGATTTCGTAGTTGATAAAACTGGTGTTAAAA
CTATTGAAATTATTGGCGCATCATTTGTAGCAGATGAACCGTTTATTTTTGGCGCTCTTA
ATGATGAATACATTCAGCGTGAACTTGAATGGTATAAATCTAAGAGCTTATTTGTTAAAG
ATATTCCAGGCGAAACACCAAAGATTTGGCAGCAGGTAGCATCTTCTAAAGGCGAAATTA
ACTCGAATTATGGTTGGGCTATTTGGTCAGAAGATAACTATGCCCAGTATGATATGTGTT
TAGCTGAACTTGGTCAAAATCCTGATTCTCGACGTGGTATCATGATTTATACTCGTCCAT
CCATGCAATTTGACTACAATAAAGATGGTATGTCAGATTTCATGTGTACTAATACAGTAC
AGTACCTGATTCGTGATAAGAAAGTCAATGCAGTAGTAAGCATGCGCTCAAATGACGTGG
TCTTCGGATTCCGTAATGATTATGCATGGCAAAAATACGTATTAGATAAATTAGTATCTG
ATTTGAATGCCGGCGATTCAACTCGTCAGTATAAAGCAGGTTCTATTATATGGAATGTTG
GAAGTCTTCATGTATATTCTCGTCATTTTTACTTGGTTGATCATTGGTGGAATACTGGCG
AAACTCATATTGTGAAAAAAGATTATAACGGTGAGTGGAAATGATTCAATTCGTAATTCC
AAGTTATCAGCGTGTCGGGGCAGTTTCTGCCCTTGATATGTTTCCGACTGATTATGAACC
CCATATTGTAGTGCGTGAACATGAAGAAAAAGCTTATCATGACGCTTATGGGTCTAGAGC
TAAAATTATAACTATTCCTGATGATGTAAACGGAATTGCCGGTACTCGTAAAGCAATTAC
TGATATGTATGCAGGTCAACGAATCTGGATGATTGACGATGATACTACTATTCGTATGAG
TTCAATGCGAAAAAGAGATGACCGTCGTTGTGTAGATAAAGTCAATCAATTAACCCGTGA
ACAGTTCTATGAATTGATTCAATACGTTGAAGATGCCATGGATTGCGGGTATTATCATGG
TCATGCTCGCCTACCAATTTTTAAAATTACTTCATCTTGGGGTAATTATCGTGAAAATTC
ATATGGATTCACGAATACATGGTATGACCTCGGAAAACTTACTACAGAACAAATTGGGTA
TGGAAAAATTGATTTGTGCGAAGATATGTATGCATTTCTCAATTTAATTAATCAAGGTTA
TCCGCATTTGGCCTTGTTCAAATATCTGGTTGTATCAGGTAAAGCGCAAGCTCCTGGTGG
GTGTAGTTCAATTCGTAGTAATTCTAAACATAATAGAGCGCTTGAGCAAATCAATAGAGA
GTTTCCAGAGCAAGCTCGTTGGAAAACGTCGAATATTGAAAAACGAAAATCGTTGGGTGA
AGAAGACGAGCCATTAAAGGTTCTTCGTATGTGTGTTTCGCGCAAAGAAAAATCAGAAGC
ATTTCATAAGTTTAATGCTATTCATCCAATAGCAGTTGATTAATGCCTAAATTTATTGTG
TTATAATTACTCTATCTTTAACCAGTGAGGAAAATATAATGATGCCTATGGAAAAAATGA
ATGTCTATTGCAGATTTAAAATCCCGTTTGATTAAAGCTTCCACTTCTAAAATGACTGCT
GAACTGACTACATCTAAATTCTTTAATGAAAAGGATGTAATTCGTACAAAAATTCCAATG
CTTAATATTGCTATTTCTGGTGCGATTGATGGCGGTATGCAGTCTGGTTTAACTATTTTC
GCAGGGCCTTCTAAACACTTTAAATCAAATATGTCTTTGACTATGGTTGCGGCATATTTG
AACAAATATCCTGACGCGGTTTGTCTATTCTATGATAGCGAATTTGGTATTACTCCAGCT
TATTTGCGATCCATGGGAGTTGACCCGGAACGAGTAATTCATACGCCGATTCAGTCAGTT
GAACAGCTGAAAATTGATATGGTGAACCAGCTTGAAGCTATTGAGCGCGGTGAAAAAGTC
ATTGTATTCATCGACTCAATTGGTAATATGGCTTCTAAGAAAGAAACGGAAGATGCCTTG
AATGAAAAATCTGTGGCAGATATGACTCGTGCTAAATCACTGAAGTCATTATTCCGTATT
GTTACTCCTTACTTTAGCATTAAAAATATTCCATGCGTTGCGGTTAACCATACAATTGAA
ACAATTGAAATGTTTAGTAAAACCGTGATGACAGGTGGTACAGGCGTAATGTATTCGGCT
GATACTGTATTCATTATCGGTAAGCGCCAGATTAAAGATGGTTCTGATCTTCAGGGGTAT
CAATTTGTTCTAAATGTAGAAAAATCTCGTACCGTTAAAGAAAAAAGTAAATTCTTTATT
GATGTTAAATTTGACGGTGGCATCGATCCTTATTCTGGATTGTTAGATATGGCTCTTGAA
TTAGGATTTGTGGTAAAACCTAAAAATGGCTGGTATGCTCGTGAATTTCTTGACGAAGAA
ACCGGTGAGATGATTCGCGAAGAAAAATCTTGGCGTGCAAAAGATACCAACTGTACTACA
TTCTGGGGTCCTTTATTTAAGCATCAACCATTCCGAGATGCTATTAAACGCGCTTATCAG
TTAGGTGCTATTGATAGTAATGAAATTGTTGAAGCTGAAGTTGATGAATTGATTAACTCA
AAGGTTGAAAAATTTAAATCTCCAGAAAGTAAAAGTAAATCAGCAGCTGATTTAGAAACT
GACCTAGATCAGTTAAGTGATATGGAAGAATTTAATGAATAAAGATGATTTGGATTTAGA
TCTAGAAATTATCGACGAATCCCCCTCTTCGGAGGGGGAAGAAGAAAGAAAAGAACGTCT
TTTTAATGAATCTCTTAAGATAATTAAATCTGCCATGGAAAATGTTATCCAGGAGATTGT
CATTAAACTAGAAGACGGTTCTACACACATTGTGTATGTGACAAAATTAGATTGGGTTGA
TGGAAAAGTCGTAATGGACTTTGCTGTTCTTGACCAAGAAAGAAAAGCTGAGTTAGCTCC
TCATGTAGAAAAATGTATTACAATGCAACTACAAGATGCATTTAATAAAAGGTCAAAGAA
AAAATTTAAATTCTTTTAAGGAGTAAGTGTGGTAGAAATTATTCTTTCTCATCTCATATT
TGATCAAGCTTATTTTTCAAAAGTTTGGCCATATATGGATTCAGAATATTTTGAAAGTGG
TCCAGCTAAAAATACATTCAAATTAATTAAATCTCATGTTAATGAATACCATAGCGTTCC
ATCTATTAATGCGTTAAATGTTGCATTAGAAAATAGTTCATTTACTGAAACAGAATATTC
TGGTGTAAAAACACTTATTTCAAAACTGGCTGATTCTCCGGAAGACCATAGTTGGTTAAT
AAAAGAAACAGAAAAATATGTTCAGCAAAGGGCGATGTTTAATGCTACGTCTAAAATAAT
CGAAATTCAAACTAATGCTGAGCTTCCTCCGGAAAAACGAAATAAGAAAATGCCAGATGT
AGGTGCTATTCCTGACATCATGCGCCAAGCATTATCAATTTCATTTGATAGTTACGTTGG
TCATGATTGGATGGATGACTACGAAGCACGTTGGCTATCTTATATGAATAAAGCTCGTAA
GGTTCCATTTAAACTCAGAATTCTGAACAAAATTACTAAAGGCGGAGCTGAGACTGGAAC
ACTGAACGTTTTAATGGCTGGCGTTAACGTTGGTAAGTCATTAGGATTGTGTTCATTGGC
AGCAGATTATTTGCAGCTCGGACATAATGTTCTTTACATCTCCATGGAAATGGCAGAAGA
AGTCTGTGCTAAGCGTATTGATGCTAATATGCTTGATGTTTCTCTTGATGACATTGATGA
TGGGCATATTTCTTACGCTGAGTATAAAGGAAAAATGGAAAAATGGCGTGAGAAATCTAC
CCTTGGTCGTTTAATCGTTAAGCAATATCCTACTGGTGGAGCAGACGCTAACACATTCAG
GTCTCTCTTGAATGAATTGAAGCTCAAAAAGAATTTTGTTCCAACAATCATTATTGTCGA
CTATCTGGGTATTTGTAAATCTTGTCGCATCCGAGTTTATTCAGAAAATAGTTACACAAC
TGTTAAAGCTATCGCAGAGGAATTGCGTGCTCTGGCTGTTGAAACCGAAACTGTTCTTTG
GACTGCAGCACAGGTCGGTAAACAAGCTTGGGACTCTTCCGATGTTAACATGAGTGATAT
CGCAGAATCTGCTGGTCTTCCAGCAACAGCTGATTTTATGCTTGCGGTCATTGAAACCGA
GGAGCTAGCAGCTGCTGAACAACAACTCATTAAGCAAATCAAATCACGATATGGCGATAA
GAATAAGTGGAATAAGTTTTTGATGGGTGTTCAAAAGGGAAATCAGAAATGGGTAGAAAT
TGAACAAGATTCTACTCCAACTGAAGTGAGTGAAGTAGCAGGTTCACAACAGATTCAGGC
TGAACAGAATCGCTATCAAAGAAATGAATCCACTCGAGCACAGTTAGATGCTTTGGCAAA
TGAATTAAAATTTTAGTTTACAAGCTGACAAGACTATGGTATAGTAGTCTTGTTGGTTAA
ATGAGGAGATTGTTATGGAATTGGTAAAGGTAGTTTTTATGGGGTGGTTTAAGAATGAAA
GCATGTTTATTAAAGAAACCACAATGATGAAAGATGACGTTCAATGGGCTACTACTCAAT
ATGCTGAAGTTAATAAAGCATTAGTTAAAGCTTTCATTGATGACAAGAAAGTATGTGAAG
TAGATTGCCGAGGATAATATGCATATTGTTTTATTTAAACCTACTCCGTATAACGTCAGG
AAAAATACGCAATTCAAAGCGCTTATTGCGGATACATGGGAATTGGTGTTAGATATTCCG
GCAGAAGAAAGCCCTCCATTTGGTCGAGTGGAATTTATTAAGTTTGCTGTACGTCCTACG
AAACGGCAGATTCGTCAATGCAAAAGATACTTTCGTAAGATCGTTAAGCTAGAGAAACAG
TTTGTAACATGTGATTATGCAGAAGTTTTAAAATAGCTGTTTACTTTTGTTGGAAATTGA
GATACTATATAAACATAAACTACTGAGGAGATTATCATGAAAAAATTTATTTTTGCTACA
ATTTTTACTTTGGCTTCTTGTGCTGCTCAGCCTGCTATGGCAGGTTATGATAAAGATTTG
TGTGAATGGTCTATGACTGCGGATCAGACTGAAGTTGAAACTCAAATTGAAGCGGATATT
ATGAATATCGTTGAGCGCGATCGTCCTGAAATGAAAGCTGAAGTGCAAAAACAACTTAAG
TCTGGTGGTGTAATGCAGTATAATTATGTTCTGTATTGCGATAAAAACTTTAATAACAAA
AATATCGTAACCGAAATCACAGGCGAATAATATGATTTATTATATGCACAAAAATCCACC
GTTTAAATACGGTAAATTTCCTGATGCACAATGTTATAATATAACGCCTGATGAAAATAA
CCGTGGATATCTTATTGGCACAATTTTTGTAATTGTTAAAGATAACGAAATCGTTGCCTG
GGCAGATTTTAAAGGTACAACACATGATGTTAATCCGGTACCTTTCACATATTATAATAT
AATGGATTTGGCATATGATTATAATTGGTTTAATCATGACGCGTTGGCTCATATTGAAGG
TGTAGGATTTGACATCTCTTATTCTAGCTACTCATTGTGTCCTATGAGTCGGGCTCATAA
AGAACCTGAATATTTTTCATTTAGGAAACGTGTAAACTTTAAACGCAACACAGAGTATGT
CGGTGGAATCTTTGTTAAAGATAATCGAATTATTCGTATTAATTATCCTTTGAGCGTTAG
TCAAAAAGATATTGATGTTGATTTAGATTTCACTGAAAATAATATTAATCATATTGCTTC
TGTGTATTTTGGTATCGATCACAAAATTGTAATATGTGGATATGAATTACCATCAGAAAA
ACAGTCTAAAGTAAATGTTTCTATTGATGACCAAATTTTTAATGCTTTTATGAATAAAGG
TTAATATGTATAGTTCTGAATTTTCATATTTAAAAATGGAAAAAATTTCATACGATTTTA
TAGATGAAAAGGTTTATTACAGCTTCCATGAACCGCGTTTTAATAGTGAGGTTGGGTTTA
TTGTAGTAAAAGACAATTTCATTTTAAAAATATATTCAGCATTAAAGGATTTTCATTACG
AAAATATTAACCTAAAATTTAATAAAGAAAACGTTCGTAATTGTGCAGTAACAATTACAG
GAAATAAAGGCACATGTGTTATGCTATCTGATGAAATTAATGATTTGCTAAATGATGCAG
AAAATATTACTGTGCCATCTATTGATGACCAAATTTTTAATGCTTTTATGAATAGAGGTT
AATATGAAAACATATAAAGAATTTATTAAAGAAGATATGGTAGCTGGAGATTCAGGTGGT
AATCCTGAAAATATCTCTACTGGAACAACGTCGGGCGCTGTAGTAAATAAAGGTCCTGAA
CAGATTCCTAAAAAGAAGAAAGAGGAATCTAAAGAAAAAGAAGAGTAAAAATGTCATCAA
TACCTTGGATTGATAATGAGTTTGCGTATCGTGCATTAGCTCATTTACCTAAATTCACAC
AAGTAAATAATAGTTCAACTTTTAAATTGCGATTTAGATGCCCTGTTTGTGGAGATTCAA
AAACCGATCAGAATAAAGCTCGTGGATGGTATTATGGTGATAATAATGAAGGAAATATTC
ATTGTTATAACTGTAACTATCATGCACCAATCGGAATATATTTAAAGGAGTTTGAACCCG
ATTTATATCGTGAGTATATCTTTGAAATAAGAAAAGAAAAAGGTAAAAGTCGTCCAGTAG
AAAAACCTAAAGAACTTCCTAAACAACCTGAGAAGAAAATAATTAAATCTCTTCCGTCAT
GTGTTAGATTAGATAAACTGGCGGAAGACCATCCAATTATAAAATATGTAAAAGCTCGTT
GTATTCCAAAGGATAAATGGAAATATCTTTGGTTTACAACCGAATGGCCTAAATTAGTTA
ATAGCATAGCACCGGGAACATACAAAAAGGAAATTTCTGAGCCTCGTCTTGTTATTCCAA
TTTATAATGCTAATGGAAAAGCTGAGTCTTTTCAAGGACGTGCATTAAAGAAAGATGCTC
CTCAAAAATATATCACCATTAAAGCTTATCCTGAGGCAACAAAAATATATGGAGTCGAAC
GAGTTAAAGATGGCGATGTATATGTTCTAGAAGGACCTATAGATTCACTTTTTATTGAAA
ATGGTATAGCTATTACGGGTGGTCAATTAGACCTAGAAGTTGTTCCATTTAAAGATAGGC
GTGTGTGGGTCTTAGATAATGAACCTCGTCACCCTGACACTATCAAACGAATGACTAAAT
TAGTTGATGCAGGAGAAAGGGTTATGTTTTGGGATAAATCTCCCTGGAAATCAAAAGATG
TTAATGATATGATTAGAAAGGAAGGTGCAACCCCTGAACAAATTATGGAATATATGAAAA
ATAATATTGCCCAGGGGTTGATGGCTAAAATGCGGTTATCTAAATATGCTAAGATTTAAA
TCAACCCAACTAAAGCAAATGCTAAATCTACAAATGTATCAAGAGTAACTACTGGAATAT
TAACACCATGCGCAATTGCAATTGGTGATAAAATAAAGTTCCAGAGTAAAATTCCTACCA
TAGCAGAAATAGTAAAAGCTATACGTTTTTTATTACCTTTTATGGCATTAACAAGTGCCA
TTAATTTTTGTACCATATGTCCTCCTTATTGCTTTATATATTTATTGTATAATTAATCTA
CTAACCCATGAATTGAAAGGAAAAATAATGGCTTACTTTAACGAATGTTCACAACTGATC
GAAGGCGCTGATAAAGCTCAAAATGAATATTGGGATATTCTCGGTGATGAAAAAGACCCG
CTGCAGGTAATGCTCGATATGCAGAAATCTCTGCAAGTTCGTTTAGCTAAAGATAAACCT
GAATATAATCGTCATCCTGATGACTTGGCTACTGCAGGTGAAGTTGTTGATTGGTTGCGT
AATCAGAAAGATTATATTGACGATGAATTCCGTGAACTTCTGACTTCTCTTGGTGGTATG
AGCAATGGTGAAAAAGATGCATCTGCTGTATGGAAACCTTGGAAGTCGCAGCATGGTGAA
CGTCGTGAAACTCTGATTACTGATTTGTCTCCACAAGACCAATTGGAAATTAAATTTGAA
ATGATTGATATTCTCCATTTCGTTCTGAACATGTTCCAAGGTCTTGGTCTTACAGCAGAA
GAAATCTTTAAACTTTATTATCTAAAAAATGCCGAAAACTTTGCTCGTCAAGACCGAGGT
TATTAACAGCTCGTCTTAAAAGCCGCGAGAATTTATTATAAATAATCATGTAATTTAAAT
AAAAGGAGAATTACATGGCTAGTACTCGCGGTTATGTTAATATCAAAACATTTGAGCAGA
AATTAGATGGAAATAAGAAAATTGAAGGAAAGGAAATTTCAGTAGCTTTCCCTCTTTATT
CTGACGTTCACAAAATTTCTGGCGCTCATTACCAGACATTCCCTTCAGAAAAAGCAGCAT
ATACTACTGTATATGAAGAAAATCAACGTGCTGCATGGATTGCTGCAAATGAAGATTTGT
GGAAAGTAACTGGTGAATAAATTCAAGGACTCCTTCGGGAGTCCTTTTTTCATTTTATGG
TTTACTTTCCAAAATGAGTATGGTATAATAAAAATATCTTATAGAGGAGAACACCATGTT
AAATCGTTGGATTAAACCAAATGAAGACCTCCAGAAGGTTCTTGATAAAGCTATCTCTGA
TAAATGGGGTATGAAAAGCTGGGATTGTGATATCGTCACGCATTCATTCATGATGCATGC
AGATGGTTCAGTCGAGTTCAATGCTGAAATGCGATACACTGACTGGGGTGGATTTCAAAG
AGTCGAATTTCAAAGAGGCTTTTTGTAATGTTTATCTTTAATTGGTTTAAAAGTTTCTTT
ACGGATTTTTTCTCTACGACTCCTGGAGAAGGTGTAGTTCCTATTTCAAATGACTACCTT
CCTTTAACTGTAGTTGAATATGTTTATATGGGAGATGGAACAGTAGAAGCAGTCACTATG
ACTTATGAAGAAGCCCAAGAATATTATAAAAATCCTTGGCGCTGGTCAGTACCTACTACA
TCATCTAACGCGCAGTCTAGTTCTGATTCATATGACACTAATGTTCCTGTTCATGTATGG
GCGGGTGATTCATGTGGAAGTTCTTGTGATTCTAGTTGTTCATCTACATCTTGCGATTGA
GGAAAATTATGGAAGCAATTTTGTTTGAAATGTATATTAGCAGTAATAGTATGTCGTTTG
CTAAAGACGTTCCAATTACCGTAGCAGTAATGATTGATAAGGGTTATTGTGACCCAATGT
ATCTCGTAGAAAATTTCGTTTCAATGCCAGTTCCAGAAGATGCTGAAATAAAACTTAAAA
AGATCGGAATTATTGAAACTGTACCAAATATTCCATTTAGAGCAATTGAAGCATTTACTA
AATCCGAATACATTAATGTTAGCGCAGAACAATATAATGATAAACCCTTATCTTTTTATT
CGTACGATTCAATATATAACTGGAAAATAGATAAAGGAAACAAATTTATAATTGCGAGTG
AAGATGCGTTATCATACTTTATTTCTTCTGTATGGAATAGTTTACATCCAAATTTGCTAA
AAATTCATGAATTTGACGGTGTCCATACTATTGTTTTAGGTAAAATAAATGAAAGCTCTC
AAGAAGATTCTTGAATGGTTCAATAGACCAAACTCAATGTATATTGATGATGGTTGGGTT
GAACAAGCAAATAAAGAAATGCAGAACGAGTCAGAAGAATGGATGAAATCAATGATTAGT
GCTGAGAAAGAAAAGAAATTAGAACGCTCAGTGCTTAAATTGATGAGAGACATCTATGGT
GATAAATCATGACCAAAGATATGACGTTAGAAGAGGCAAAGGCTAAAGCAAATGAAGCTT
TGGATTTGCTTCTTAAAATCGGTAGTAAAATGATGGAAGAAAATGAGAAGTATATCCAGG
AAAATAAAATTCCTGACGGTCCATTAGTAGGCAAAAGGAAATCACATGATTGAAGTAGCA
AAATTATATTCAATAGAATTTATGTCTAAAGAAGGTAAATCAGTAAATACACTTGATAAA
AAGTGCTCATTAATTATTCCTTTAGCAGAAAATCCAGATATTTTAATTAAAGATATAAAA
GAAAGAAAATATCCAGAAAATGTTATTCTAATTATAAAGCATACTGAAGATATTTTGCAG
AATACAGATTCACCATTTTCTTCTTCTGAAGCTTTAACTATTAAAGGCTATAAAAGAGCT
CATGAATATGGTCTTTTTGACATGTTTGAAGACGATAAAGTTAAATTAGCGAGTCAACCT
TCTAAAAGTAAAACATTCATTATTGAAGATATTAAAGATATAAATGCATTTGTTAGGATG
GTCTGGGCTCATTTTGATGTTGGACTACGCTGGAGAATGTCCGAAGAAGAAAGAAAGATC
ATTGAAACTAATCGTTATTTTGGTTTTTATCGCTAGGAATTAATATGGATTTATTTGAGA
TGTTAGAAGATAATCATTCTACGAATATCCAGAATGATTCTAGTGATTATAAAAAAGAGT
ACCGTATAGTATTACAGAATTATGGAATTGAAGCCCCAGATGCTCTTCTAGAAGAACTAG
CTTCATACCATCTTGACCCTCCGCCTTGGGCTCCCTGGGCAAAATAATTCAAAAAGTTGT
TTACTTTCCTTCCTAACAATGATATGATAGCTTCTGAAGTATACGGAGGCTATCATGATT
ATTAATCCTGCAGATGTTGAACAGTTATCTATAAAAGCTGAAAGCGTTGATTTTCAATAT
GATATGTATAAAAAAGTCTGTGAAAAATTTACTGACTTTGAGCAGTCTGTTCTTTGGCAA
TGTATGGAAGCCAAAAAGAATGAAGCTCTTCACAGACAGTTGAATAAAATCATTAAAAAG
CATTTAACTAAATCACCTTATCAGTTATATCGTGGTATATCAAAATCGACAAAAGAACTC
ATTAAAGATTTACAAGTTGGAGAAGTGTTTTCAACGAACAGGGTAGATTCATTTACTACT
AGTTTGCACACAGCATGTGGTTTTTCTTATGTTGAGTATTTCACTGAAATAATATTTCGC
TTAAAAACTGATAAAGCTTTTAATTATTCTGACCATATCAGCGATATTATACTTTCTTCT
CCTAATACTGAGTTTAAGTACACGTATGAAGATACTGACGGGTTAGATTCAGAGCGTACT
GATAACTTAATGATGATTGTGCGTGAACAAGAATGGATGATTCCAATTGGAAAGTATAAA
ATAAATTCTATTTCAAAAGAAAAATTACACGATTCATTTGGAACATTTAAAGTTTATGAT
ATTGAGGTAGTTGAATGAAATACTCAGTAATGCAACTAAAAGATTTTAAAATAAAATCAA
TGGATGCATCGGTGCGTGCTTCTATTCGTGAAGAATTGCTTTCTGAAGGGTTTAATTTAT
CTGAAATTGAACTTTTAATTCATTGTATTACCAATAAGCCAGATGACCATACTTGGTTAA
ATGAAATAATCAAATCTCGTTTGGTTCCAAACGATAAACCTCTTTGGAGAGGTGTTCCAG
TCGAGACTAAGCAGGTGTTAAATCAAGGAATTGATATTATTACATTTGATAAAGTCGTAT
CAGCTTCATATGATAAAAATATAGCTCTACATTTTGCTTCCGGTTTAGAGTATAACACAC
AGGTTATTTTTGAATTCAAAGCTCCTATGGTATTCAATTTCCAGGAGTATGCTATAAAAG
CTCTACGTTGTAAAGAATACAATCCAAACTTTAAGTTTCCGGATAGCCATCGTTATCGTA
ATATGGAATTAGTTTCAGATGAACAAGAAGTAATGATACCAGCTGGAAGTGTATTTAGAA
TTGCAGATAGATATGAGTATAAAAAGTATTCAACATACACTATCTATACTCTTGATTTTG
AAGGATTTAATCTATAATGGAAGGACTTAGATTCATTATACCACGAAAGTTTTAAAGCAT
TTTACATAAAGTTGTTTACAAGCTGAAGTAAAAATGATATAGTATAAGTAAGTTAACCGT
CCGTGAGAAAAATATGAAACTGTCTAATAACCAAATTCGTAAAATTAAACGTCGTTTAGA
GCATACTCAGGCATCTGCAAAAAGACGTTCTAAAGATTTTAACTTAGACTTCAATTACAT
TAAGAACATTTTAGATCAAAAAGTTTGTGCTTACTCGGGAGAACCTTTTGATAATCGTAT
TGAAGGAGAGAAATTATCATTAGAACGTTTTGATAATAACATTGGATACATTAAAGGGAA
TGTTATTGCAGTAAAGAAAAAGTATAATACATTTCGTTCTGATTATACTTTAGAAGAGTT
GATTGAAAAGCGTGATTTATTTGCTTTGCGAATTGGTCGTTCATCTGCGAAAAAAGTTCA
TAAACTAAATTTAGATGAAAAGAAATGGGCTAAAATCAAAAAGACTTATAATCAAATTAA
AGCTATACAGAAAAAACGTGAAAATCGAATTGAACACATTTCTCAGCTTTCTAAATCAAA
ACAGACCTCTGACATTAAGTTAAGGATTATAGCACTTAAAGCTCGTATTGATGGTTCTCG
CATAGCAGAAGGCGCTGAAGTTGTTAAACTGAACGTTCTTCTTAAAGGCTCGGATTGGAA
AATTGTGAAAAAGTTGTCAGAAGCAGAAATGCAATATGATATGTGTGATAAAATTATTCA
AGGTGTAGAGCGGTATCAAAACTTGTCTTTTATTGATAAACTTAAACTGAAAAGAGGATA
CCCGCTAAATTGTTCAATTTTTAAACTTATCCGAGGATAATATGGTTTATGTATATGCGA
TAGTTTACCGAGACAAAGACGGATTTACGGCGCCAGTTCCACTTGATGAACATCGTCCTG
CTGTGTTTTTTGAAAGAGAGATTGCTGATAGAGTTTTTACTACTCTCAAAGACCAATATA
AACTAGCTTTAGGTATGGGAATTCCAAGACTAGTTGAGACTCCACGCAAGTTTTGGTTTA
ATAAAATAGAAGTTAAACATGTTAAGCCTGATGTAGATACACAAAGATTATATCAACGAA
TTCTAGATACTGGGCGTATTGTTAGTATTCCAATTGCAGGGACTTTCCGATGACATTTGA
TGATTTGACAGAAGGCCAGAAAAATGCCTTTAACATCGTTATGAGGGCTATTAAAGAAAA
GAAACATCATGTAACTATTAATGGACCTGCTGGTACTGGTAAGACTACTCTTACTAAGTT
CATCATTGAAGCTTTAATATCTACGGGTGAAACTGGTATCATTTTGGCAGCTCCTACACA
TGCAGCTAAAAAGATTCTTTCAAAACTGTCGGGGAAAGAAGCGAGTACTATTCACAGTAT
TCTTAAAATTAACCCAGTAACATATGAAGAAAACGTTCTTTTTGAACAAAAAGAAGTACC
AGATTTAGCTAAATGCAGGGTATTAATCTGCGACGAAGTGTCAATGTATGATAGAAAGCT
CTTCAAAATTTTGCTTTCAACTATCCCACCGTGGTGTACTATAATTGGAATAGGCGATAA
TAAGCAAATTAGACCTGTTGACCCAGGAGAAAATACTGCTTATATCAGTCCATTCTTTAC
ACATAAAGATTTTTATCAGTGTGAACTTACTGAAGTTAAACGCAGTAATGCTCCTATTAT
TGATGTAGCTACTGATGTTCGTAACGGTAAGTGGATTTATGATAAAGTTGTTGACGGGCA
TGGAGTACGTGGATTTACTGGTGATACCGCTTTACGCGATTTTATGGTAAATTATTTTTC
AATCGTCAAATCGCTAGATGATTTGTTTGAAAATCGCGTAATGGCATTTACGAATAAATC
TGTTGACAAGTTAAACAATATTATTCGCAAAAAGATTTTTGAAACTGATAAAGATTTTAT
TGTCGGTGAAATTATTGTAATGCAAGAACCGTTAATTAAAACATATAAAATTGATGGAAA
GCCTGTATCAGAAATTATTTTTAATAATGGACAATTAGTTCGTATTATAGAAGCAGAGTA
TACATCGACGTTTGTTAAAGCTCGTGGTGTTCCTGGAGAATACTTAATTCGTCATTGGGA
TTTAACAGTAGAAACTTACGGCGATGATGAATATTATCGTGAAAAGATTAAAATAATTTC
ATCTGATGAAGAGCTATATAAGTTTAACCTGTTTTTAGGTAAAACGGCAGAAACTTATAA
AAATTGGAATAAAGGCGGAAAGGCTCCGTGGAGTGATTTTTGGGATGCTAAATCACAGTT
TAGTAAAGTGAAAGCACTTCCTGCATCAACATTCCATAAAGCTCAGGGTATGTCTGTAGA
CCGTGCTTTCATTTATACGCCTTGTATTCATTATGCAGATGCTGAATTAGCTCAACAACT
TCTTTATGTTGGTGTTACCCGTGGTCGTTATGATGTGTTTTATGTGTGAGGCTATATGAT
TAACATCAATTCAAAATATTTAAATCGTCTAATAGATGGTATAAGGAAGCATACTAATAA
GCAAGATAATCTTAATGTTATGGTAACAGGAGCTGAGCTCCTTCATAAGCTTTATCTTAT
AAGTGATACTATATTAGCAATTAAACGAATTGAAAAACAATCATATCACAGTAATACAGA
TACGGTAATTACACTAGATGAAAGTGTCTGTAAATTACTAATTAAATTTGAGGAAGCTAT
TCGTGGAAATAACTAAAGATCAGTTTTATCTTCTTCAGGATAAAGTTAGCGAAATTTATG
AAATAGCTTATAGTAAAAATCGCAAAAACGTGAAAATTGAATCAGGCAAGTTAATGCTTC
AATTGGAAGAAATTGAACGAGATTTGATTGCGTTAGAATTCTTTTGTGGTGAAGTAAAAA
CTGTTACAATCAGTGATTACATTTTAGGTGAAATTAGCCATCTTTATAAGGCGGTTATTA
ATGATTGAATTAAGTTGGTGTCAGTTTAAATCTCTTATGACAAATGTTAAAGCTGTCATT
GAGAAAAATTCTGGTCCTGAAAATATTACTATTCGCGAAAAAGCTTTAAAGATAATATAC
AGTCTTGAAGAGATGCAAAAAGATATTGAATCTATGGCAAAATTTATTGATGAACCTATT
AATAAAGTTTATATTCAAGACTATACTGTAGGTCAAATTCGCGATTTAGCAAGGAAAATT
TAATGTTTGATTTTATTATAGATTTTGAAACAATGGGAAGTGGTGAAAAAGCAGCTGTTA
TTGATTTAGCTGTAATTGCTTTTGACCCTAACCCAGAAGTAGTTGAAACATTTGATGAAT
TAGTTTCACGCGGCATTAAAATCAAATTTGATTTAAAAAGCCAAAAAGGACATCGTCTTT
TTACTAAAAGCACTATCGAATGGTGGAAAAATCAGTCTCCTGAAGCTCGAAAAAATATTG
CACCATCAGATGAAGATGTAAGCACCATCGATGGTATTGCAAAATTTAATGATTACATCA
ATGCACATAATATCGATCCTTGGAAATCTCAAGGCTGGTGCCGTGGAATGTCGTTTGATT
TTCCAATTTTAGTCGATCTCATTCGTGATATTCAACGTCTTAATGGTGTTTCTGAGAATG
AGCTTGACACATTTAAGTTAGAACCATGTAAATTCTGGAATCAGCGTGATATTCGTACCA
GAATTGAAGCACTTCTGCTTGTTCGTGATATGACCACGTGTCCTCTTCCAAAAGGAACTT
TAGATGGATTCGTTGCGCATGATTCTATTCATGACTGTGCGAAAGATATTCTGATGATGA
AGTATGCTTTGCGATATGCTATGGGTCTTGAAGATGCTCCGTCAGAGGAAGATTGCGATC
CTCTATCTCTTCCAACAAAACGATAAAAAGTTGTTTACTTCCTCGGTTAGTTGTGGTATT
ATAACACCATAGCTACTGAGGATAATAAAATGAAAATTTATCGTGTTGAATCATCGTTTA
GTATTCTTGATTATGAAGATGCTATAACAATACGTCGAAATCTTTGTGTTCAAATAACGC
CGTACAGGAGTATAATAGATTCATGGAGCGAAGAGTGGCTATTACACGTAGGTTATGACA
GACCTAATTTTATGCATCATAGCGATAATAATAAAAGAATTCCTTTACCACACGAAGATA
AACTATTAGTTAAAAACGCTAATATAGTAATTAATACTAAGTTCAAGAAAGATTATGTTG
GAGTAGAATATCATATTCCAGGATGGTTTATAGGTCTTTATCATTTTGCTTTCGCTAGTG
AATATGATATGATGAGATGGTTCACACGAGAAGAGCGGGAAGAATTATCTTCTAAAGGAT
TTTATCTCGCTGTATACGAAGTTCCTGAAGATGAAGTTATCATTGGTGGGCACCAAGTAA
TGTTCCGCAAATCGCATGCTGAACTCGTAGATTTTATTGAAATGAGATAATTATGAAATT
TAATTATAATCCTGAATACATACCAAATCCGGTAGCTAAACTGATTGATTTTGATGTTGT
AAGCACTTATGTATGCCCTGTTAAACCACTGGAAATTAAGGAACCTATTATGACTACCGC
TATTGAAATCGGCAAAACCTACAAACTGGTTGAACCTAAAATTAAAACTAATGCCTTGAT
TTCTGGTCATAAAACTCTGACTGATGTTTTTGGCGAAGGCGAATTTATTGTTGAAGAATT
TGCCAAAAGTGAGTGGTTTGACAAATCTTACGTCATCCACGGTCGCCGGTTAGATAATAA
CAAAATAAAGAAAAACCTGGTTTATGAAGATGAGTTCATCCTGTTCCAAGAAGTTGAAGA
ACAAGACCCTACAGACCTGTTGTGTGCTGCTGTGTCTATCCGTCGTCCTTTTGATAATCC
TATCTGTGGTTGGGTAACAGACCAGTGGATTGAAGATGGCGTTGAACTTCTGAACGTAGT
TCATGCTGGAGAATACTCTGTAGTTCCTCGTAGCGCAGTGATTAATGTTCGTTTAAGCTA
GTTTACAAACTCTTGGGACCAGAGTATAATGGTCCTGTGGAGTATAAAATCTTTTTAACA
AGTGAGAGATAATTATGAATATTAATATCGGTGAAATTGCTCGTGTATCTGATAAATCCC
GTTCTAAAGCAGCAGGAAAATTGGTCGAAGTTGTAAGCATTCAGCTTAAACACGGTGTTA
AAGATGAAGATTCTGAAGTAAAAGTACGTATCATTGCTAAAGATGGAATGTCTAAGCCCC
AGTTTGGTTATGTTCGATGGAAATTTCTTGAGCCTGCGTTTTTGAAAGCTGTTCCTGCTA
AAGGAATTGAAACGATTGATACTTCGCATGTAGGTGTAGACTTTAAGTGGAAACTTGGTC
AAGCTATCAAGTTCATTGCTCCTTATGAGTTTGAATTTACCGAAGGTGGACAACCACTTC
CTCAGCGTACTCGCGCTATGTGTGCATACATTACTGATCAATGGGTAGAAGATGGCGTTA
AGTTATACAACGCGGTATTTTTAGGAACATACAAAGTCATTCCTGAAAGTTGGATTAAAC
ACTACAGCAAAGCTCGCTATGCATAAAGTTTAAAATTTTTTCATAAAACTATATACATCA
GTAGTTGATTATGGTACTATATCAATATCAACTACTGATATAGAAAATAATTTGGAGAAT
AAAATGGAAAATTTGCCAAAGGTGCTGCTACTCTTCTGAAACGCATCGCTCCAATGTTCA
ATTAACGAGGAAATTGTAATGAAACGTAAAATTGTTCAGAACTGCACTAATGACGAATTT
GAAGATGTGTTATTCGATCCAGATTTGGTAGTAGTTCAAAAGGAACACACTGCTAAGTTT
ACTCACTTGACTTCGGTTTATGTGTATGAAAAGGTTGGGGATAAACAACCAATTTACGGT
GTATTTCGTGAAATCACTGAAGATGGTACAACTTACTGGAAGGAAATTTATTAATGGCTA
TTAAATTTGAAGTTAATAAATGGTATCAGTTTAAAAATAAACAAGCTCAAGAAAATTTTA
TTAAAGACCATACTGATAACGGAATCTATGCACGCCGTTTAGGTATGCATCCTTTTAAAA
TTTTAGATGTGGATGCTCTTGGGCGTCCTATTAAAATTATGTCATTTGCTGGAAATTTAG
TACTATCTTCTGGTAAAGATATTTTGGATGAAGATTTTATTTGGCTTTCATCGAATGAAG
CTGAATTCTTTAATGAAGTTGAAAATCCATACCAGGCAGCTGAAGAGCAGGAAGAATCTG
CACCGATAACTGATCAATCTAAATTCCCTGTAATGAAAGTTACTATTGAAAATGATGAAC
AGGCATGGTCCTTGTATCAGATGTTGAAAGCTCACTTTAAGGAATAATTATGCCGCTTTA
TGATTATAAATGTCAATCAAAAGACTGCGCAAAAGAATACGAAAAAATCAAGAAAATTTC
TGAAAGAGATACTGATGTATGTCCTGATTGTCATCGGATTGCTATTCGGTTAGTCTCTGC
CCCTAAGCATGTGAATGGCGGATTTTACGACTTACTTAAAGGGTAATTATGTTTAAAATC
GGTAAGAAATATCGCATTCGCGAAGGTGAAGAAAAGAAATATCTATTTTCTGCTATTTAT
AGGAATGGTTCTATTAATGCTGTAATATCTACAAGCGAATTTATCGTTGAAGATATGAAA
GGTAATAATGTTACAATGATTAGTACAGCATCTGGAAATGACGGAAAAATTCTTCACAGT
TTTCAGAGTAATGTTCTAATTTATGATGAAGAATTTGACTTCTTCGAAGAAGTTCCCGAA
GGTTTTGCTTTTGAATGCACTATCACTATGAAATCTGGTGACCCTCTTTCTTTTACAGTT
AAAGATGAAGGAAGTCGCTTGAGAATTATTAGTCTTCTTCAAGCCATTAAATTTAAGTGA
AAATTATGAAATATATTAATCGTTCTATCGCAGCATTAGTATTAGCAGTGTCTTTAATAG
GATGTACTGATGCTGATAATGCAACCAAAGTTTTGTCTTCAAGTGGTTTTACTAATATTG
AAATCACTGGATATAATTGGTTCGGTTGCTCTGAAAATGATTTCCAGCATACTGGATTTC
GTGCTATTGGACCTACTGGGCAGAAAGTAGAAGGAACAGTATGTTCTGGACTATTCTTCA
AGGATTCGACTATTCGTTTTAAATAAAAGGCCTTCGGGCCTTTAGCTTTATGATTACCGG
AGTATAATATTCCCGAAACCAAACGAGGATAAGTGATGATTAAGAATGAAATTAAAATTC
TGAGCGATATTGAACATATCAAAAAGCGTAGCGGCATGTATATTGGCTCTTCTGCTAATG
AAATGCATGAGCGCTTTCTGTTTGGTAAATGGGAAAGTGTTCAGTATGTACCTGGTCTTG
TTAAGCTTATTGATGAAATTATCGATAACTCAGTAGATGAAGGTATTCGTACTAAGTTTA
AATTCGCAAATAAAATTAATATTACTATTAAAAACAATCAAGTAACAGTTGAAGATAACG
GTCGCGGTATTCCACAAGCGATGGTCAAAACACCTACTGGTGAAGAAATTCCTGGTCCTG
TTGCTGCCTGGACTATTCCAAAAGCAGGTGGTAACTTCGGTGATGATAAAGAACGCGTCA
CCGGTGGTATGAATGGCGTTGGTTCTAGTTTGACAAACATTTTTTCTGTGATGTTTGTCG
GTGAAACTGGTGATGGTCAAAATAATATTGTAGTTCGTTGTTCAAATGGCATGGAAAATA
AATCATGGGAAACTATTCCAGGAAAATGGAAAGGAACTCGCGTTACTTTCATTCCTGATT
TTATGTCATTTGAAACTAATGAGCTGTCCCAAGTTTATCTTGACATTACACTAGATCGTC
TCCAGACACTTGCAGTAGTTTATCCTGATATTCAATTTACCTTTAATGGTAAAAAGGTTC
AGGGCAATTTTAAGAAATATGCACGCCAATATGATGAGCATGCTATCGTTCAAGAACAAG
AAAATTGCTCTATTGCGGTTGGTCGTTCACCGGATGGTTTTCGTCAATTAACTTATGTGA
ATAACATTCACACTAAGAATGGTGGCCATCACATTGACTGTGTTATGGATGATATTTGTG
AAGACCTTATTCCACAAATCAAACGTAAGTTCAAAATTGATGTGACTAAAGCACGCGTTA
AAGAATGTTTGACTATCGTTATGTTTGTCCGTGATATGAAAAACATGCGATTTGATTCTC
AAACTAAAGAGCGTTTGACTTCTCCATTTGGCGAAATTCGTAGTCATATTCAACTCGACG
CTAAAAAGATTTCACGCGCTATTCTAAATAATGAAGCAATTCTGATGCCGATTATTGAAG
CTGCACTAGCTCGTAAATTGGCGGCGGAAAAGGCAGCAGAAACTAAAGCAGCTAAAAAGG
CTTCTAAAGCTAAGGTTCATAAACATATTAAAGCGAATCTTTGTGGTAAAGATGCTGACA
CTACTCTTTTCTTGACTGAGGGTGATTCGGCTATCGGATATCTTATTGATGTTCGTGATA
AAGAACTTCACGGTGGTTATCCATTGCGCGGTAAAGTTCTCAACAGTTGGGGTATGTCTT
ATGCAGATATGCTTAAAAACAAAGAATTGTTTGATATTTGCGCAATCACTGGATTAGTTC
TCGGTGAAAAAGCTGAAAACTTGAATTATCATAATATTGCTATTATGACTGATGCTGACC
ATGATGGTCTAGGAAGCATTTATCCTTCTCTGCTTGGATTTTTTAGTAATTGGCCAGAAT
TGTTTGAGCAAGGACGAATTCGCTTTGTCAAAACTCCTGTAATCATCGCTCAGGTCGGTA
AAAAACAAGAATGGTTTTATACAGTCGCTGAATATGAGAGTGCCAAAGATGCTCTACCTA
AACATAGCATCCGTTATATTAAAGGACTTGGCTCTTTGGAAAAATCTGAATATCGTGAGA
TGATTCAAAACCCAGTATATGATGTTGTTAAACTTCCTGAGAATTGGAAAGAGCTTTTTG
AAATGCTCATGGGGGATAATGCTGACCTTCGCAAAGAATGGATGAGTCAGTAGTTTACTT
TACCACAAGGATGTGGTATAATTAATTGAGTAAATGAGGATATTGAAATGAAATCATATA
AAGTAAATTTAGAACTTTTTGATAAAGCAGTTCATCGAGAATATAGAATCATTCAACGCT
TTTTCGATATGGGAGAAGCCGAAGAATTTAAAAACCACTTTAAAGATATTAGAGATAAAA
TTCAATCCGACACCGCAACTAAAGATGAGCTACTAGAAGTTGCTGAAGTTATTAAGCGTA
ATATGAATTAATGAGGAAATTATGATTATCACCACTGAAAAAGAAACAATTCTTGGCAAT
GGTTCTAAATCAAAAGCATTTAGCATCACAGCATCTCCTAAAGTATTTAAAATTCTGTCA
TCTGATTTATATACAAACAAGATTCGCGCAGTAGTCCGTGAATTGATTACTAACATGATT
GATGCTCATGCACTTAATGGAAATCCAGAGAAATTTATCATACAAGTTCCTGGACGTTTA
GACCCACGATTTGTTTGTCGAGATTTTGGTCCGGGTATGAGTGATTTTGATATTCAAGGT
GATGATAATTCTCCTGGGTTGTATAATTCATACTTCAGTTCATCTAAAGCTGAATCTAAT
GACTTTATTGGCGGATTTGGTTTAGGTTCTAAATCTCCGTTTAGTTATACTGATACGTTT
AGTATTACTTCTTATCATAAAGGTGAAATTCGTGGTTATGTAGCTTACATGGATGGTGAT
GGTCCACAGATTAAACCTACATTCGTAAAAGAAATGGGTCCAGATGATAAAACTGGTATT
GAAATCGTAGTTCCAGTTGAAGAAAAAGACTTTAGAAACTTTGCTTATGAAGTTTCTTAT
ATCATGCGACCATTCAAAGATTTGGCTATCATTAATGGTCTTGACCGCGAAATTGATTAT
TTTCCGGATTTTGATGACTATTACGGTGTAAATCCAGAAAGATACTGGCCTGATCGTGGT
GGATTATATGCTATCTATGGCGGTATTGTTTATCCTATCGATGGTGTTATTAGAGACCGT
AACTGGCTAAGCATTCGCAATGAAGTGAATTACATTAAGTTTCCAATGGGTTCACTTGAT
ATTGCTCCATCACGCGAGGCTCTTTCACTGGATGATCGTACTCGTAAAAATATTATTGAA
CGAGTTAAAGAACTCAGTGAGAAAGCATTTAATGAAGATGTAAAACGATTTAAAGAATCT
ACATCTCCTCGTCACACGTATCGTGAATTGATGAAGATGGGATATTCTGCTCGAGATTAT
ATGATTAGTAATTCAGTCAAATTCACGACTAAAAATCTGTCATATAAGAAGATGCAAAGC
ATGTTTGAACCTGATAGTAAGTTATGCAATGCAGGAGTTGTGTATGAAGTAAATCTTGAC
CCTCGACTGAAGCGCATTAAGCAAAGTCATGAAACTTCAGCCGTTGCATCAAGTTATCGT
CTGTTTGGTATTAATGCAACAAAAATTAATATCGTTATTGATAATATTAAAAATCGTGTT
AATATTGTCCGTGGATTAGCACATGCGTTAGATGATAGTGAATTTAATAACACTTTGAAT
ATTCATCACAACGAACGCCTTCTGTTTATTAATCCAGAAGTAGAATCGCAGATTGATTTG
CTTCCTGATATTATGGCGATGTTTGAAAGTGATGAAGTTAACATTCATTATTTGTCAGAA
ATTGAAGCTTTAGTTAAAAGCTATATTCCAAAGGTAGTTAAAAGTAAAGCTCCTCGTCCT
AAAGCTGCTACAGCATTTAAGTTTGAAATTAAAGACGGGCGCTGGGAAAAAGAGGAATTA
TTTACGCTCACATCAGAAGCAGATGAAATTACTGGGTATGTAGCGTATATGCATCGTTCT
GATATTTTCTCTATGGATGGTACTACATCTCTTTGTCATCCATCTATGAATATTTTGATT
CGTATGGCTAATCTTATTGGCATTAATGAGTTTTATGTTATTCGTCCGCTTTTGCAGAAA
AAGGTAAAAGAACTCGGTCAGTGCCAATGTATTTTTGAAACTCTGCGTGATTTATATGTA
GATGCTTTTGATGATGTAGATTATGATAAGTACGTAGGTTATTCAAGTTCAGCTCAACGA
TATATTGATAAAATTATCAAGTATCCTGAACTAGATTTTATGATGAAGTACTTCAGTACA
GATGAAGTTTCTGAAGAATATACACGACTCGCTAATATAGTTAGTTCATTGCGCGGTGTA
TATTTCAACGGTGGAAAAGATACCATCGGTCATGATATCTGGACAGTAACTAATCTTTTT
GATGTATTATCAAATAATGCTTCAAAAAACAGTGATAAAATGGTTGCTGAGTTTACCAAG
AAATTCCGTATTGTTTCCGACTTCATCGGATATCGCAACTCTTTAAGTGATGATGAAGTT
TCTCAAATCGCTAAAACTATGAAGGCCCTTGCGGCCTAATAAGGAAAATTATGTACAATA
TTAAATGCCTGACCAAAAACGAACAAGCTGAAATTGTTAAGCTGTATTCAAGTGGTAATT
ACACCCAACAGGAATTGGCTGATTGGCAAGGTGTATCGGTTGACACAATCCGTCGTGTTT
TGAAAAATGCTGAAGAAGCTAAACGCTCTAAAGTTACTATTAGCGGTGATATTACAGTTA
AAGTTAATAGCGATGTAGTTATTGCTCCAGTTGCTAAATCTGACATTATTTGGAATGCAT
CTAAAAAATTCATTTCAATTACTGTTGACGGTGTAACTTATAACGCAACTCCTAATACTC
ATTCAAACTTCCAGGAAATTCTTAATCTGCTTGTAGCGGATAAGTTGGAAGAAGCGGCAC
AAAAAATTAATGTTCGTCGCGCTGTTGAAAAATATATTTCCGGTGATGTTCGAATTGAAG
GCGGAAGCTTGTTCTATCAAAATATCGAATTACGGTCTGGTTTAGTTGATCGTATTCTCG
ATTCGATGGAAAAAGGCGAAAACTTTGAATTTTATTTTCCATTCTTGGAAAATTTGTTGG
AAAACCCAAGCCAAAAAGCGGTATCTCGACTCTTTGATTTCTTGGTAGCAAACGATATTG
AAATTACAGAAGATGGTTACTTCTATGCTTGGAAAGTAGTTCGCAGTAATTACTTTGACT
GTCATTCAAATACTTTTGATAACAGTCCTGGTAAAGTAGTTAAAATGCCACGTACTCGTG
TGAATGACGATGATACACAAACTTGTTCTCGTGGTCTGCATGTGTGTTCTAAATCTTATA
TTCGTCACTTTGGTAGTTCAACCAGTCGAGTTGTAAAAGTTAAAGTGCATCCGCGTGATG
TAGTATCAATTCCGATTGATTACAACGACGCTAAAATGCGTACCTGCCAATACGAAGTAG
TTGAAGACGTTACTGAACAATTCAAATAAGGGCTTCGGCCCTTATCATATTAAGGAAAAT
TATGTTAGGTTATCAAGCACGAGTAAAAGAAGAATACGATCAATTAATGCTCAAAATTAA
TGCATTGAGCAAATTTTTAGAAAGTACAAAGTTTCTAACGATTAATGAAGTTGAGCAAGA
ATTACTGCTTTCACAGTTCATCTCAATGAAATCTTATGCAGATTGTTTAGAAAAAAGAAT
TGCGCAATTCAAATAAATAAGGGGCTTCGGCCCTTTTGTTTTAAGGAAAATTATGATTTA
TTGTATGAATATCGGTGATTCCGACATAAAAGAGATTAAACTGCACGGAAATCATCACGC
TAATATTGTGTACTGCAATAAATTTGAGTTTGGTCACGAAAAACTTGGGTTTCTTTACTG
CAATGATGTTATAGTCATGGACAAAAAGAATCTCGATGAACTTGATCGTAATTCTTTAGA
TGAAAATGATCGAATTTACTATGGTACTCTTAAAGTGTATAACGCTTATCTTAGTGGTAA
AAAGGAAAGTTTAAATGCAGAAAACGAATCCGGGGTTACAGAGACTATTTCAGATTCCGA
CATTTACCCTATCGAACAGTGACTTGACTAGTGAAATGAAGGTCAAAATTGTTGATACTG
CAAGATACTCTTTAAAACAAAACCCAAATCAGGATAAGGCAGAAGTTATCGAAAGATGCC
GTATCGCTGTGTACGCAGAGTTTTTTGTAGCAGATTGGCTGAGCGGGTATGTTAACAAAG
GTCAAGAAGATGTCGATGATCCGTACACATATGCATGGGATGTATTGGCGCATCCAAGAT
ACTGCGGGCTTCGTGTAGAAGTTAAGACACATCAAACTGACTCACGTTGGATTTCGGTGA
CAACAGGATGCAGCGGAGAGTATCCATATGGTTCTGGAATAAATCTAGGGCCCATTCTAA
ATCATCAAGTCGCGGACTGTATAATTATATTCAACACTAAAGAAATTCACCCAGGTGTCA
TCCAGTACACTCCGAAGTTCATCGGTGATAGAGAAGACCTTCGTAAGGTTGTAAGAAAAA
GCAACTACAACGGATGGTATCTTTCCATTTAAAAATTTTCACAAAACGGTTTACATACCA
CAAGGACCGTGGTACTATACAACTATCAACTGATACGGATTTGGAGAGTAAAATGAAATT
TAAATTTTATTATGCTAAGCATAAAATAACTGATGAGTTTGTGTCAGTTGAATATTCTAG
CGATGATGAAGGCATGATTTATACTCGCTTAGGATTATCGCATTGGGAGTCCGATCAGCC
TTATTTTTCAACTCCTGAAGAAATTACACGCTTAGTTAATGGTCATATGAATGACCACTG
GAATGTAATTCTTTCAGATAGTCTTAAAGCGGCTATTAACAGTAATGAAATGAAAATCGC
TGAGATTGAACTATGAGTTCACTATGGTGGTGTTTTGTTTGGTTAATTAGTATTCCAGTA
ATTTGTTTAACATTTACTTTTGTGATGAGGTTATTATGAAAATTTTTAATTCTGTACTTA
TTGCTTGTGCGTGGTGGGTTGCACAAGTTTCGGCAGTAGTGATTGGTATTCACATTTATT
ACGAATATTTTTAAAAAAGTTGTTTACAAGACTGTTCTTCCGTGGTACTATTACCCTATC
AACTACGGAGGAACAGAAAATGAAAAAGATTGTTAAAGCTATATGGAATGTAGTTATAAT
ACTAATAGTTTTGAGTATATTCCCAATCGTTTTAATGATTGATGTATTAAACGCTTACTT
TGGATTTATGTGAGGAAAATATGAAGCGTAAACGCAGTGCTTTTACATTTATTGAATGGT
TTTTCGATAATATTTTTCCGGCTTTATTCATTTTCATGCTGATTTTTGCCTTAGGTTCAG
TTGTAGTTGGAATCTATTTGATGGCGGTAGTTGGAATGGACATTCATCAAAATGGTTTAA
AATCCGTGGTTGAAACAATTTGGAATGGTGTAAAATGATGAATTTGCTGAGCGGTTGGTT
TTATATTCTTATGTTTTACATTGGCGCAAATTTCCCATATTGGATGGGATGGTCAACAAC
TGCGTTTGGATTTTATACTCCTTGAGGTGAATTATGAAAATCTTTAAAGATGTAAAAGTT
GGTGAAATTTTTTGTTTAGATAATGGTAATCAGTTAATTCGTATTTCACCTCTTAAGAGC
ACTAGCGAGAAACCGACAGTTAATGCTACTTTAGCAAATAACAGTAATGAACGTTTCTGT
ATTGAAAATGATACTGAAACTTATACCGTAGAAGAGTTTTGGGAATTGAGCGTCGACTGC
GACGATTAATTTAATGGCCGCGTGTATTCATGCGGCCTTGGAGTAGAAAATAATTTAGAG
GAAATTAATATGAAATATATGACTGCTACTGATCTGAATAATGCGGGCGCTACCGTTATT
GGTACAATCAAGAACGGTGAATGGTTTTTGGGAACTCCGCATAAAGACTTTTTATCTAAA
CCTGGATTTTACTTTTTAGTAAGTAAATTAGATGGTCGTCCATTTAGTAATCCATGTGTG
TCTGCACGATTTTATGTAGGTAATCAGCGTTCTAAGCAAGGATTCAGTGCAGTTCTAAGT
CATATTCGTCAACGTCGGTCTCAGCTTGCACGTACTATTGCAAATAACAATATGGTATAC
ACAGTATTTTATCTGCCTGCTTCTAAGATGAAACCTCTGACGACAGGATTTGGTAAAGGT
CAGTTAGCTTTGGCGTTTACCCGTAATCATCATTCCGAGTATCAAACACTTGAAGAAATG
AACCGTATGTTGGCTGATAACTTTAAATTCGTTTTGCAGGCATATTAATGAGTAATTTCC
ACAACGAACACGTGATGCAGTTCTATCGTAATAATCTTAAAACTAAAGGCGTCTTCGGAC
GCCAGTGAGGAAAATATGAATATTGCAAAATTATTAGGAGTTATTTCATTTATTTGTTGG
ATAGTAGCATGTGTTTTAACTATCTGTATTGATGCCAGCAGTGTGTTTTCGCAAGCTTTA
GCTCAGGGTATGTGTGCATATTTAACATTTGTGTTGTTATCTACTAATGATTAAGAAAAT
CTTGGGCTATTCATTAGCCCTTGCTATTTTATTACGGAATAATGTTCGGATTAATTCAAG
TCGTGCTTTTCATTTCTGATGTTATTATGGCACTACATTCACTAGTATGGTAAATTTATG
CAACTGAATAATCGTGATTTAAAAAGTATCATTGATAATGAAGCATTGGCTTATGCTATG
TACACGGTTGAAAATCGTGCTATCCCAAATATGATTGATGGATTTAAGCCAGTTCAACGA
TTTGTTATTGCTCGAGCTCTTGATTTGGCACGAGGAAATAAAGATAAGTTTCACAAACTC
GCTTCTATTGCAGGTGGTGTAGCAGACCTTGGATATCATCATGGTGAAAACTCTGCACAA
GACGCAGGTGCTTTGATGGCTAATACTTGGAATAATAACTTTCCTCTGTTAGATGGTCAA
GGAAACTTTGGTTCTCGTACCGTTCAAAAAGCAGCGGCAAGTCGTTATATTTTTGCTCGT
GTAAGTAAAAATTTCTATAGCGTATATAAAGATACTGAATATGCTCCGGTACATCAAGAT
AAAGAACACATTCCGCCTGCTTTCTATTTGCCTATTATTCCTACTGTTCTTCTTAATGGT
GTTTCCGGTATTGCAACTGGTTATGCAACTTATATTCTTCCTCATAGTGTTTCTTCTGTC
AAGAAAGCTGTATTGCAAGCTCTTCAAGGAAAGAAAGTAACTAAACCGAAGGTAGAATTT
CCAGAATTTCGCGGTGAAGTCGTTGAAATTGACGGTCAATATGAAATTCATGGAACGTAC
AAGTTTACTTCACGAACTCAAATGCATATCACTGAGATTCCGTATAAGTATGATCGTGAA
ACTTACGTGAGCAAAATTTTAGACCCGCTTGAAGATAAAGGCTTTATTACGTGGGATGAT
GCTTGCGGTGAGCATGGGTTTGGCTTTAAAGTTAAATTCCGTAAAGAATACTCTTTGAGC
GATAACGAAGAAGAACGCCATGCAAAAATTATGAAAGACTTCGGGTTGATTGAGCGTCGT
TCCCAGAATATTACCGTCATTAATGAGAAAGGAAAGCTGCAAGTTTACGATAATGTAGTT
GATTTAATCAAAGACTTCGTTGAAGTTCGTAAAACTTATGTCCAAAAACGAATTGATAAC
AAAATCAAAGAAACTGAATCAGCATTTCGTTTAGCTTTTGCCAAGGCACATTTCATTAAG
AAAGTAATTTCAGGTGAAATTGTTGTACAAGGTAAAACTCGCAAAGAACTGACCGAAGAA
CTTTCTAAAATTGATATGTATTCTTCTTATGTTGATAAACTAGTTGGAATGAACATTTTT
CATATGACTTCCGACGAAGCAAAGAAACTTGCTGAAGAAGCTAAAACCAAAAAAGAAGAA
AACGAATATTGGAAAACTACTGATGTAGTTACAGAATACACCAAAGATTTAGAGGAAATC
AAATGAGTCCATTCATTGGTATCACAAGCGCTGCATTAGTATCTGGTGGCATTTTACTGG
CGGGTTTAGGTGTTGTTCCTGCCGTAGCAGGAGGTCTTCTTGCGTTCGGAATTCAACGTG
TTATCATGACAGTTATCACAGTCATGCAGTAATTTTAGGGAGAGCCTCGGCTCTCCCTTT
TTTATTTTAAAATTTTTTCACAAAACGGTTTACAACCAAAGCATACTGTGGTACTATACA
ACTATCAAATAAATGAACTGAAACAAACAACCCGGAGATACAAAAAAAAAAATGAAATTT
AAAATCGAAAACGAAATCGTTAAAGCTAAAAATGCTCTGACTGCTAACAAACTGGTTGTA
GATGGTATTGAATATGATATCTGTGGAGTTCGTGAAGAAAAACCTGGTGTTCTGACTTTC
TTCACAATGATTTTTAAATTTAAAGGTGACACAGAATTCAAACAGTTTGATTTTGCCCAT
GAAGACGAAATCGAAGTTCGTAATCTGAACATTAAGTAAGTACTTTATTAGAGCTCTTGA
AAAAGAGTGCAAAAAAGTGTTTACTTCTGCTTTAAACATGATACTATAGACCTATCAAAT
AAATGAACTGAAACGGAGATTAAAATGTCTAAAGTAACTTACATCATCAAAGCTTCTAAC
GATGTTCTGAATGAAAAAACTGCTGCGATTTTAATTACCATTGCTAAGAAAGATTTCATT
ACAGCCGCAGAAGTTCGTGAGGTGCATCCAGATTTAGGTAACGCAGTAGTTAATAGTAAT
ATTGGGGTATTGATTAAAAAAGGCCTGGTGGAGAAATCTGGTGATGGATTAATCATTACT
GGTGAAGCTCAGGATATTATTTCAAATGCGGCAACTTTATATGCACAGGAAAATGCTCCT
GAACTACTGAAAAAACGAGCAACTCGTAAAGCTCGTGAGATTACTTCCGATATGGAAGAA
GATAAAGACCTTATGCTAAAACTTTTAGATGAAAATGGATTTGTTCTTAAAAAGGTTGAA
ACTTACCGCAGTAACTATCTTGCTATTTTAGAAAAACGCACTCACGGAATTCGTAATTTT
GAAATTAATAACAATGGAAATATGCGAATTTTTGGATACAAAATGATGGAACACCATATT
CAGAAATTTACTGATATTGGAATGTCATGTAAAATCGCTAAAAACGGCAATGTGTATCTT
GACATTAAACGCTCGGCAGAAAACATTGAAGCAGTAATCACCGTAGCATCTGAACTGTGA
GGAATAAATAATGAACAAGTTAGAAATTGTTAATGAACTTCGTCGTTGTGCAGAACCCAC
TCAAGAGGGGTGGGATATCTGGTATCATGGAGCTTATCTTGGAACTATCGTAAAGATTAA
GACTGGTAAATACATGATTATTCGTGAAAGTAAAGATGCTCCAGTAGGTATTCGCAATAA
TTTTATGGCGGCGATAAGTTCATTTACGGATGCAGCTTACGAAATTTACCTTGCTGATTA
TAAAGAATTCCAGGAATCTCAACCAGTTATTCGCTCAATTGGTGTTAACAAAGCTCAACA
GAAAACTTTGTGGCAGCGTATTAAAGGATGGTTTAAATGAACCCATTTATTAATCGTTTA
AAAATGCTGAATGTTCCTTTATGTCGTGAAACTCCAGAAAGTCTTGTTGAAAAATTTAAA
GCGCATGGTTATAAATGCACAGAAGAAGATATTCTAAAAGAAGTTCCTGAAATCTGTTGG
CAGACCGCATACTGGGATGAAAACCAAAAGTATCAACGACGAATTGTTTGCGCAGCCAAC
CGTTTTAAATTAAAAGATGGACGAACTCTTGTTATTCCAGGTGCTCGTCATTATTCTAAA
GATATGGCAGCAGTTTTAGATGTAGTTAAACCTCAATTAGTTACTCAACAAGTTTGTGAT
GATGACCAAGGGTTTATTGACCAATATAGTAATTATTGGACACGTGAAGAAGCAATGATT
ATTGCAACTTACGCCGGACAAGTACGTATTGAACGCGGTGGTAGTGAAAAAGAACTTTAT
TCTGAGGACCTTTACTAATGAATATTAAAAAGTTTCAAATTGATGGAATTAAGAATCAAA
TCCAGGCACTAGAATATGCCAATAAAATGATGTCAACTAATTGGGGAATTTATGCCAATG
AACCGGCATTTCAGTTCTGTGATATGGAATTCACTAAAAAGCTCGTAGGAAAAAATTATG
TATGTCCATTTAGTTCTCCAGTAAATGGAATGCTAAAACCTGCTTTACGCGATCTTTATA
TTGCGATGAACGAAGAAATGATAAAAGAATTAAAACGTCAACTGAAGGTGATTCAATTTG
GCCAGGGAAATTAATTCAAAATCCGATTATTTTAATTCTCTCAATGATAAAGATAAAAAT
TTAATAAGACATTTTATCGTTGAGATGGGATATACTGACACGCATGATTTAAGAGAACAT
ATATTTGAATGTGGTGTAGCTAAAAAGTTTTCATTCACATGCAAATGTCTAAGAGAGGTA
ATTCAGCACTATGAACAATTTAGTCGCAAAACATAATTTTAATAAAGCTTCTGTCCATAA
AGATAAGAAGAAAGCGTTTAAAGAATCTAATCGCAAACAGAAACATAAGGGGAAGGTCTA
TGATTATTGATTCTCAGTCTGTGGTTCAATACACAATCAAAATTGATATTCTAGAAAAGC
TATACAAGTTTCTACCAAATTTATACCATTCAATTGTCAATGAATTAGTTGAAGAACTAC
ATCTTGAGAATAACGATTTCTTGATTGGAACTTATAAAGACCTCTCAAAAGCAGGATATT
TTTACGTAATTCCGGCTCCAGGAAAAAGTATTGATGATATATTAAAAACTATAATGATTT
ATGTCCATGATTACGAAATTGAAGATTATTTCGAATGAGTCATAATCTTGAAAAGGTAAT
CGAGCATAATGTAGCTCAGGAACGTGAGTCGTTCAAGGAATTCGTAGAAAAAATTTTTGA
AGAAAATAACACAGACCAGTTTACAAATCAAGCGTCTGATGATATTATAACAAAGTCAAC
TAATTGAGTGGTATAGTTAATGAATAAAAACATTGATACAGTTCGTGAAATTATTACTGT
TGCATCTATTTTGATTAAATTTTCCAGAGAAGATATTGTTGAAAATCGTGCTAATTTTAT
TGCATTTCTGAATGAGATTGGAGTAACGCATGAAGGTAGAAAATTAAATCAGAATTCATT
CCGTAAAATTGTTTCTGAATTAACCCAAGAAGATAAGAAAACCCTCATCGACGAATTCAA
CGAGGGTTTTGAGAGTGTATATCGATATTTAGAGATGTATACGAACAAATAATTATTTAG
CCCTTCCTAATATTCTGGCCGCCTGAGCACATATTGATTCAAGGCGGTCATTACTTATAT
GATCATTTCTATACCAGTACATGGTTATCGTTCCAGCATAGATATTATCCAAATTAAAAT
ATGGACAACTGTACATGTAGTTTATTTCGGGAGTAGGCTTTTTAGTTGGTAAAAAAGCAA
ATTTTGAGTCAGAATAATAATGACGTCCATTTAAATGAACTGTATATTCATCCATAGTTT
TATCAACAGGATATCCTCCAAGTGATTTTTCACTTATTGTTGAAGGTAATTTTCCTTCGT
ATGCTATAATATCAACAAAATAGTTTAAGTTTTTAGGGCGGAAAGAATACACCGCACTAA
AGTCTGCCTCAGATGATATATGAACTATCTGGAGTTGTTCCAGGGCGACAGATTCAAAGC
GTGCATTTCTTTCCTTTTCAATAATTTCACTGTATGTTTCATACTTTGATTGCTTATAGT
ACTCAAAGAAACTATCTCCCCTATACCAAACAATCGCCATCATAAATAAAAGAATTACGA
CAGCTACCCGGGAAGCAAGAACTTTCCCGGTAGCGTTATCTTTGAACAAGCGATCTAGAA
CACCAAACAGAATATCAGAGGGCGAAAATGATATTCTAGGTGCTGCCATAGACCCTCCTT
TTAAGGATATTTATTCAAAATTATACCCTTGGACCATATATTACTCCAACATTTTGCCAT
GTTGGAGCTGATCCTATAACAGCATATCCGGCAGCGCCACCAGCTCCAACTTTTAGAACT
TTACCGCCATCATACCAGGCATTTTGTCCATTTGCGCCAGCATCACCACCCTGGCCAGAG
TGAGCATTACCATAATTATAACCACCTCCTGGGCCATCATAAGAAGCTGCGCCGCCGGAA
TAACCTCCGCCTCCTCCTGGGCCAAATGGTCTTCCTCCACCACCACCAATATCTTGCCAA
TTTGCACCAGAGTGAGGACGATAAGCGATACCACCTCCACCTCCACCTCCACCACAAATT
ACTCCACCGTTATTAATTCTTAATCGTCCACCGATGTCATTTTGAATACAATGACCACCT
TGTTGACCATTACCATCTCCGCCGGAATGAGTCCATCCACCTTGTCCACCTCTACCCCAC
ATATGGACGCCGCCACCAATATTCAACTGAACATATTCATTAGGTGTATCTCCGTACATG
AAGAATAAAGGAACGTCTCTAGAATATGATACCAAATTTCCGGTAATATTAAACACTATA
GGTGCACTACCTGCCTCAAAACATCTATCTCGGAACCATTGACCATTAAAGTTATGGTCC
GCTCCAAGGGTGTGAATTACTTCAACAGATCGACCTATCATATTACTCATCCAAAACGGA
ATTCCCATTCTCAATCTCTGCGCGGCACCACCCATCCAAGGGTCTCCAGTTTGTACCCTC
GCAGACCATCCTACCCACGGTCCTTCAACTGCCATATAAACCTCCAAGGGGCCGAAGCCC
CTCATTTTATTTTAACAATGATTTAACTAATTTTTTAAGCTCTTCAATCTCTGACTTAAG
TTCTGCAATTTCTGCAGTATGCTCATTGATTGCAGCTGTATTTAAACCAATTACACCGTT
ATAGTTCAAACGAAGTAAAGCTTCACTATCCTGATCGCCTTCAACCAATTCAGGTAAAAT
AGCTTGAACTTCTTGAGCAATTAACCCAGCGTTTGGTTCCCATTTCTGATTACCTTCTTC
ATCTAGGCCTCGCTTCTGCATATAAGTGTAACCATTAATTTTTGAAAGCTTCTCAGAAGC
ATTTTCAAATTTAACTAGGTCCTTTTTAACACGAATATCAGAGCGGACATAAACATCGCG
GACATACGTTGAATAGCTGTCATTCGCCTGAACTAAATGGCCATGAGAAATAATTGCTTT
GCCAACTTCTGTCCAAAAAGCTCCATTTGAATCCCAAAGGCCTGGATGAGATTGATACAT
CGTGCCCCATGATGCTATATGCTGCGCGTTAGCATACATATTAATTCGACCATCGCCGCC
ATGAACTAAACCGGTATCATCATCCCCGATGGCGATAGATGCTCCACCCCATACTGGAAT
TGTGCCGACGCCCAAGTTAACACCAGCACGAAGGCCAGCCGGAGCTTTAAAATCACCATT
AGCCTGAAACACAAATATTGCATTAGGATGGCTGCTATCTCCGCTTTCCGCAGAACCAAC
ACGAATTACTGCATTTCCCCAAGTAGCATTTCCACCCAATCGAATAATACCAAAATCTGC
CTTTGTGGCATATCCTTCGTTAATGATTTGGCTTCTTCCTTTAATTATAGGCATATAACT
ATCTTTCGGAACAGATTCACCAAAGTCAACGAAGAATGGGGCTTCTGTTTGCCATTGATT
ATTATAGCCGTGACCTTGTGTAGCTGTCCATTGTCTTCCATTTAAATATAAACGATAAAA
ATTTAATGAAGCTGCAGTAGCTTGATTTTTGACGTTAAAATCAATATCACCAACACTATT
AAGAGTAATTCCTGCGGTAGTTTTGAAATTATAAAATGAAGCAGTGTCATCTGCTCCTCC
TTTACCGATGTACCATGAATTCGCTCCACCCGATGTTCCAAGTAAATAGCAAGAATCATT
TTCATCGGCAGCAATGTTAATAGCGTCAGAGCCTCTTCTAACGATTAATTTGCCAGTCAT
CGTATCACCGCCTTTACCTACGCGAGTATTCAAGGCAGCATCTAAATTTGTCGCATTGTT
ATATTTCTTCCAGATTGAACCGGCAATATTACCATCTGTATTAAGGAACGCATCACCGAC
ATATACACGCCCTGGAGATTTAAAATAACCTGACGGCATGAAAGTCCATTGTTTTAACCC
ATCTGCTGTTCCATTAGCGGATAAATCACCCTGAGCAATGATCTTATATTCGGATGTACC
TATAGCCATACCAGTGGCAAAGGTGATATTACTTACAGTATTTTTCTGTTTAACAATTGG
CGCAAACTGGTTTTTATTTGAATCGTCAATGGCCTGATATAATGGTGCAATGGTAGTATT
CTGATTCGCGTAAGTATTAGAACCAGAACCGCTAGCAGGGGCTTGAATATATGCTCCTGG
AGCAAGTGAAATTTTCTGATTAGCACCAAGATTAACAGCAGCAGTGATATTCAACAATCC
CCTAAAGTTTTGTTGAGCAGTCCAAGTATGTGATCCGTCTTCAAGAACAACACGGCGAAC
TGTGCAAGTTCTATTTCCAGAATTACCGAACACACGAACGACAAAATAACGGTAGTTTGT
CTGGGATACAGTACCACGCCAAACCTGAACAGTACGTCCTGTGCTGGTGTGTTCGCTAGG
ACCGACAGAAAACATAACCAAGTTTCCGTCAATCGTCCCCCAATCCATATTTGCTGGCAT
ATTCTTTATTTTGTTCAAAGGAACGCTAAACATACTACCAGGGACAAAATCAAAGGTTTG
CCAATCTAACTCCGCTAATTGAGCTTTAATACCACCCATACCCAAAGTAATTGGCAGAGA
ATAAGATGTATATACTTCGTTCCATGCACCCCACGCACCACCAGTATATGCACGCTCAAA
AATACGATCGCGAGTAGTTGCACCCGTTCCTGCGGTAGTGAAACGTTGGAAAATAGCACC
GCCAGAAGCACGCTGTTTAACTTCCAGCAAACCAACAATAACAGTCGGCAAACCTTCACC
TGTAGGACAGTTAATAACGGCATCAGTGCCTAAAATATTATATAACCCGGGAGTTTTAAA
ATCATTCAGATCTCCATCATAGAAAGTCGCTGGTGTGCCATGACCAACCTGCTTCCATTC
CTCCCACTTAGGTGCACTAGCATCCCATGCAGCAGCGAGACAACGAGTATAAACCATACC
CATGCGGGTAGTATAACGCTGAGTTCTCGCGTATAAACCACCTTCAAATATTTCTAAAAA
TCCTTGTGCGGCTGATCCTTCTTCTGGATAATGGCGATCAAATGATGCGATTGCGCTTGA
ACTGTTTCGCCATAAGCCACAATGTTCTAATTCTCCCAAGCTATCAAGGTCAATCGTTTG
TGAAAGTGGACGAGTTGACGCTTGAACATTACGCCACACACCCCATGGACCATCGACGCC
ATTCCATTTAGCAGATAAGGAACGAATATAGACGTTACCAGATCTTACAGTATAACGCTG
AGTGCCAGCAAATTGGCCGGCCACAAATACTTCTAGAACACCTACAGCATTTTCTTCTGG
AAATTTATTTGCTGGTTGCGCATTTGTTGAAGTAGATTTCGACCAAACACCAAGATATTC
TTCAATGGGCCCATACGTATCTAAATTAGCATCAGTAGGTAATTCGCCATTATTTTTTAT
AAATGTTGTGCTATTGACATTTATGTCAGATGGAGTTAAGGTAATGTCCTTTGACCCATC
AAAAGATATACCATTAATTTTCCTAGGTGTTTGCAATTTAGTAGCTGTGCTAGAATTTCC
AATTAAAGTTCCAGTTATATTTTCTGTAACCTCTAAAGACCCATTTATAGTTCCTCCATA
TTTTAAACCTAATTCTATAACACTACCTGAGTCATCTTTTGTGAAAATTGTTTTATCTTT
TAAGTTTATAGCCAATTCACCTTCGGCTAATACTGAAGCAGCAGGACGTTGACCTGCAGT
TTTGCTTCTTTTAAATTGTATTTGTTTTAAAGTAGCCATAAGTCCTCTTAATAATAGCCG
AAATCTTGAACAGAATCCTTAATTACGATTTGGTCAAATCGTGGAACGTGTGAAGGTTGA
GATGCAGGATTCTGTGAAAAAAGGTTTGGCGCAGTTAAATTTCCTGTCATAGTGTCTCCA
GAGCGTAATACCCTAGAGTTTGCATTTGCTGTAACAGTATTTATTGCTCCATCAACATAA
TCTTTGCGAGTAACATCAGATGCTGCGGAAGGAGTAGATGTAACAGTTACTGATGGAGCC
GTTACAGCCCTGGTAAATGTTGTCAAACCTTCTGGCGTAATAGTAATTTGTCCAGTAGTG
ATTTCACTACCTGCAGGTCTAAAACTAATACCACCGGAAGAGCCGCCAACTACAAGAGTA
TTACCAGTGCCGCCACCAGAACGAATTCGGATAGGGGTTTCATTATTACTTAATTGAAGA
TAACTATTTACCCCGTAATTAATAGTAATTGGACCGGCGTAAGTACCACCATTAGCTTTA
GAAACGAAATCGTTATCAGCTGCCTGCGGTTTATTATATTCTGAATATATTTTAAATGAT
TTGTAGAGTACATCGTCACCGGCTGAATTCAATGGAAAATTTCCTTGATGCCAAATGACA
GATCCACCCACAGTTGAACCTACTTTTAAATCAGCCATTATATGCCCCTTTATTTTAATA
TTATTTATAAAGAAAAAGGGAACCCGAAGGCTCCCTCAGTTTAAACTTCTCTAAATTCCT
GTCCAAACACTTTGCCAGTTTTAGAAGAGGCTTGTGTAGGAAGTACCATTATATCTGGAG
GTGAAGCCGATTCACAGACATAATTAACGCGAATACCGTTGACGCCAAATTCGGCAGGTT
TTGAAATGCCGCCATTTCTTGATACTTCAGAAAAACTTAAATTTCTCATGCCGCCTTGAC
CTGCTTGAGCAGTTCTTTGTGCATATATCGTAAATCCTACTGCATTTTCAGGAACAACTA
CATAATCTTCTTTTAATTCCCAAGACCCAGCTTGCCCAGTAAACTCAGCTTGGGTAGAGG
AAATATATCCATTTGATGCATCATAAAAACGAATGGATATGTTTGTAGTTCCAAGATCAA
GTAAATCAGCATCAGCATATAACTGTGCTTTAAGATAAAGAACATCACCAGGAATTAAAT
TATAGTCAGAAAGTTTACTTATAGCAGCTGAAGTTGGCAATCGCGCAATTTCATTATTAG
TTCCACCAACCGCAGACATAAATTGCTCAACGCTTTCGTATGTTCTTTTAGGAAATCCTG
TAGCTCCGACGTCTTCTAAACTATCAAATACAACATCTAACATAGTTTGATAGTCATCTG
TGCTTTTTCTATTACTTAGTTTAACATGCTCTAATGCGATAGCTCTTTTAGAAGAAGTGT
AAAAAGCAGCATATGATACGTCAAATCTTGACAATACTGAATCTGATGGAAAAACTGAAG
TTCCTGCTCCCCTTAACCAAGATACCACTTCAGGAGGAAAATTAACCTTTCCGCTAGTTA
ATATAGCAACAAGTCTATTGTTTGACAAAGAATTCATGAAACTGACAAAAGCGGCAGATG
TTGTATTGTTTGAAGCAGAAAAAGCATATGACTTGCTATCAACTAATGCTCCCGTAGAAG
GGTCAAAAACTCTTAAATGAAGACCTGCACTAAATGTTTGATTTCCAACGGGATTATCCT
GAAATTTAACATATGGTCCCGCAGTAGAAAGCGGGCAAGAACCCGCTATGCTTATTTTAT
ATCTTACTGAATTGCTTTCCGATAAAAATGGCGTTTGGACATATCCTTGTCCAAACTCTG
CCATAAATTTTTCCATAATACCTCTTATTCAATCCACTCAAATTTAACAGTTTTATTCAC
TGGGTCAGGAATAATGCGAACATTACCAATTCGCAAGAAATCGCGAATAGTAAGATTACC
TATTATTCCATTATCAGATGGGATCGCTCCTATATCTGAAGGTTGAGGAGGGTTACCTCC
GTCAAATACCTGAACAAAACTTGACCAAGAGTTTTTGGTTTTCTGCCATGTACGTGTCCA
GCGAGTGGTACGTGCTTCTGGGGTCGTTGGATAAGTAATCCAATCTTGGTAAAGTGAATC
AAGTGTGTTACCAAACTGAGTCAATGTACCAGGAGATTTAACTTCTTCACCACGTTCTAA
GTATGGAAGTCCAGTCACTTCATTAGTTTTTTCAACCATCTTAAAATAACCCGGGAACTG
GTTATAAGTGGCTGAATCATTAATATCGATTGACCAGAATCCTACAGTATCAGATGTTGG
AGCACGGGTATATAAATCAGAGGTTTTAGTACCCTGAGAACGAATTCTCGAGTTAACAGT
TAAACCACCTGAACTTATAGTAGCACCTTTGGCAATGATTAAGCTTTCACCAATCGTTAC
TTGACCAGATGCATTATTAATAGTTAAAGGACGTAATCCATTAAATCCACCGGTCTGATC
GCCAGATGCAGTAAGCATAAAATAGGTGTTAGCACCATCATTACGAATAAAGAATCCATA
ATCACCGTTTATTGCTCTAAAAGCATTCGATGATTTACTGATAAATTCGCCATTAGCAGT
AACTGAACTACCGAATGTTGCAACGCCATTCGCATTCAATGTTCCTGAAGCATTCACATT
TATCGGCGTTACTGTACCGTTGATATTAAATGTTATATTTCCAGCTTTATTACGCTGAGA
ATAAAAATGACTAGACGTTTCATCACTAACTTCAAATACGGTAGAACGTGTTGTGTCTGA
TTCCCCACTAAATTGATTTCCCCACACTCTGACTGTCATCGTTTGAGCTGGGTTTGTTCC
AGTTTGAGGTCCTTTCTCAAAAATCAGACGAGTTGCCGTTCCAGTATTAGAAATAGTTAA
TGTACTATTTGCTGAAACTGATCCACCGAATGTAGCAGTACTAGATGATACAAGAGGGGC
ACTCAGATTCGTTTGTTGGGTTAAGGTTAGTGAACCATTAACTGTTTGTGCAATGTCCCT
ACGAATGAACTGGAGCGAATCTAGACCATCTAATAAATTACTGTCTACAGCTTTTGCTTT
TAATGGCAAATAATTTGCTAATACGCGATTTAATTCATATGGTGATACTGCATAACCATT
TTTCTCATATGATTCTAATGGCTGTGTTGAACCTACCGTATCATTACCAACGAATGTAAT
TGAACCAGATGAAGTTTTAACAAAACCTCTTATTGCAGTAGTAGCTGCCCAAGTAGGTTC
ACTCTGCACAATCCATTTTAAATTTTTTGGAGATACAGCAGTATTTGCTGACGTTCCAGC
CACAGTTTCAGACTGAGTTGCAACTTTAATGACACCTTCCTGTGCTTCAGTAGATTTAGT
ACCTAAAAGCTTTTTAGGAGTTATTAAAACATTATCTAATGTTCCTGCAGCAGCTTCAAC
TTGTGTAGCTACACGAAGTGTACCACGCTGTGTCTCATTTGCTTCAAGAATATTAAGGGT
ATAATGGTCCCAGAGAGTTCCTGATTCAACTAATCCAGATAGAGCAACAACAGAAGTACG
ATCAGTACTATTAAATCTGGTTTTAATTTTTAATGGTGTAGAGATACGAGTATCGTCGAC
GCCTGCGTCGAATTCAACCTGTGTAGCAATTTCAGCTATACCACTTAAACTTTCAGTTGC
TTTACGGTCATTTAAAGTTTTAGGAGTGACTGCGCGAGTATAATCAGTTCCTGTATTAAC
TTCACTTTGCGTAGCAATTTCAATTAAACCAATTCTTGCATCAGTTGATGTCTTTTTATG
TAACGTTTCTGGCGTTACAACCGCATTTGCCCATCCTTCTTGGCTTTGTCCAGCAATTAC
TTCACTTTCAACTGCTAAAATTACTGCGCCTTGTTGCGTTGGAGTAGCTTTATACTGATC
CAAAGCTTTAGGTGAAACAACTAAATTATTAGTGTTTTTATTATAAACATTCGTACCATT
TAATTCACGACTAGAAGCTGGAGTAGCTCCTGCGGTAGATACAAAAGTTACAATACCAGA
TAATGATTCAGAACCTTGACGAGCTTGAAGCTTTTTAGGAGTGATGATTGTAGTATCATC
AGTACCTGTATTAGTTTCCTGCTGCGTAGCAATTTCAGCGACACCTCTACGAGTTTCTGT
AGCAGTTCTTTCATTCAGCTTTTTAGGAGTGATGATAAGGTCATCTGCAAAAGAGAATGT
GGTGTTCTGATTTACTTGAGCAGTAGTTGCTATTCTTGCAATACCTCTGCGAGTTTCAGT
AGCAGTACGATTAGCTAACGTTTCTGGAGTAATTGCCAATTCTTTTTGCGGAGAATTTTC
TAAATCAGCATTTGCTTGAGCTTGTGTAGCTAAAGCAATTACGCCTAATCTTGCTCTAGT
AGAATTATTTAAAGAATCGACTCTTTCAACTGTTGGAACGTTTTGCTGTACAACCCAGTA
TTTTCCATCAGAATCTTCTATATAAGCAAGTTGCAAAACTGGTACATAATTAGTTTCACC
ATTAAAAACTAATTCTTGAACTGTTACCCATTCAGCTTCAGGCGGATATTCTGAACGTTT
TGGGAATTGCAGCAATTGAACTGAAGAAGCAATTTTATCTTCACCGGCAGCTTTGATTTT
AACTGTTTGTCCTTTTCTCATGTAATTCATGGAAATTTTAACAGTATCACCAACAGAAAT
ATCAGTCGGAAGCTGAAGCTCAATTGTTTGAGTTGTTCCATTATTCGCACCAAATACCAT
AACTTCTTCATTTGGACGAATGTTTGAATTAGTCGTTATAATGCGTAAACGTGCTTTACT
ATCCCCGTCAAACAATCTCCACAATTTCTCATTATCATCAAACATCAAGAAACCGTCAAT
CGATGTACGGCCTTCAATGGAATGAGTTCCAACTTCTTGCACTGACGTTGTTTCATCATA
TGTCGTAACAATTGTATGATAAAGTGGATTTAATTTATCTAAATCAACGAAATTAATGAT
ATCTCCATGATTGGCAAATCTTGGAAGTTTAACATTAATCGGTGCGGCAGAAGTAAATCT
ACGTACGATAAAATCATTAGATTGTGCTTGATATGCAGTCGATGGAGTAACAATTGCAGC
TTCTCTGCTATAATCAGCAATATACATTTGCCACAAACGGTTATTAAAAATGAATACCAT
CTGTGACTTTGGATGAGTCATTAAAACTGAACGTACCTGTTCACCTCTAAAATTGACAAT
ACTCCGATTTGAAGAATTTATTTTAACCTGATTTATGCCAGGTTTTCCACCGATATCTTG
AATTATTACGGTTTCTCCATCAAGCGGAGAAGGTGGTAAAGTAAACTCAATGTCATTGCC
AACTGATGTATCTACTGAAATTGCTTCTCCGGATTTTAATTGATATGGTCCAGATGATAC
GGTTGTATATACGGCATCAGTACGTAATGCTTTCCAACGAATTCTATTAAAATTTCCAGC
AGGTTTTGGAATATTATCCGTTGCTGCCCAAAAACGATTATTATAAATGATTACAAAATC
TTTTAAATATCCACGAGTTGGATCATATTGCTGAACTGTGTTTTCTTGAATTAAGTAATC
AACGTTAACACCGTCAGTTCCTACGGTACGGTCAGCTAAAGCTACGTTGATTATTTTATC
GCCACCTGCGTCCAGACCATCTTCTGCTCTGAACTTTCTTTTAATCTCGGCCATTCTCCC
GGGCTCCTATTGTGTTTTCAATAATAAGTATTTATACCTGTTTACTTTAAGATTTAGATA
GTATATAATAGAAATCTCACTAATTGAACGAGGTTCATATGGATTTAGAAATGATGCTGG
ATGAAGATTACAAAGAAGGAATTTGCTTTATTGACTTTAGTCAAATTGCTCTTTCAACTG
CTCTGGTAAACTTCCCAGATAAAGAAAAAATTAATTTATCGATGGTTCGTCATTTGATAT
TGAACTCAATTAAGTTTAATGTCAAAAAAGCAAAAACGCTTGGATACACTAAAATTGTAC
TGTGTATTGATAACGCGAAATCTGGATATTGGCGTCGTGATTTCGCGTATTATTACAAGA
AAAACCGTGGAAAAGCACGAGAAGAATCTACTTGGGACTGGGAAGGTTATTTTGAATCCA
GTCATAAAGTTATAGATGAATTGAAAGCTTATATGCCATACATTGTTATGGATATTGATA
AGTATGAAGCAGATGACCACATTGCTGTTCTTGTTAAAAAGTTCTCTTTAGAAGGACATA
AGATTTTAATCATTTCATCGGACGGTGACTTTACTCAACTTCACAAATATCCAAATGTTA
AGCAATGGTCACCGATGCATAAGAAATGGGTTAAAATTAAAAGCGGTTCTGCTGAAATTG
ATTGTATGACTAAAATTCTTAAGGGTGACAAAAAGGATAATGTTGCTTCAGTTAAAGTAC
GATCTGACTTTTGGTTTACCAGAGTTGAAGGTGAACGAACTCCTTCAATGAAAACTTCAA
TCGTTGAAGCTATTGCTAATGACCGTGAGCAAGCTAAGGTGCTTCTCACAGAATCTGAAT
ATAATCGCTATAAAGAAAATTTAGTTCTAATTGATTTTGATTATATTCCTGATAATATTG
CTTCAAACATTGTGAATTACTATAATTCATATAAATTACCACCGCGTGGCAAAATTTATT
CATATTTTGTAAAAGCGGGTCTTTCTAAATTAACTAATAGCATTAATGAATTTTGAGGTG
AATAATGGCTAAAAAAGAAATGGTTGAATTTGATGAAGCTATCCATGGCGAAGACTTGGC
TAAATTTATTAAAGAAGCATCTGACCATAAACTGAAAATTTCCGGTTATAATGAACTGAT
TAAAGATATTCGAATTCGTGCCAAAGATGAACTTGGCGTTGATGGTAAGATGTTTAATCG
TCTATTAGCTTTGTATCATAAAGATAATCGTGATGTGTTTGAAGCTGAAACTGAAGAGGT
AGTTGAACTTTATGACACAGTTTTCTCTAAATGATATTCGTCCGGTCGATGAGACCGGTC
TTTCAGAAAAAGAACTTTCAATCAAGAAAGAAAAGGATGAAATAGCAAAGCTTCTTGATC
GTCAAGAAAACGGATTTATTATTGAAAAAATGATAGAAGAGTTTGGAATGAGTTATCTTG
AAGCTACAACAGCATTCTTGGAAGAAAACTCTATTCCTGAAACTCAATTTGCTAAATTTA
TTCCTTCGGGTATAATTGAAAAAATTCAGTCAGAAGCCATTGACGAAAATCTTTTACGTC
CTTCTGTTGTTCGTTGTGAAAAAACTAATACATTAGATTTTCTACTATGATTAAACTCCG
CATGCCTGCTGGTGGTGAAAGATACATTGATGGTAAATCAGTTTATAAATTATACTTAAT
GATAAAACAACATATGAATGGAAAGTATGATGTTATTAAGTATAATTGGTGCATGCGGGT
GTCTGATGCCGCTTATCAAAAGCGAAGGGATAAGTATTTTTTCCAAAAGCTATCAGAAAA
GTATAAATTAAAAGAATTAACTTTAATTTTTATTAGCAATCTTGTAGCTAACCAAGATGC
TTGGATTGGTGATATCTCTGACGCTGATGCATTAGTATTTTATCGTGAATATATCGGACG
CTTAAAGCAAATTAAATTTAAGTTTGAAGAAGATATTAGGAATATCTATTATTTTAGTAA
AAAAGTTGAAGTTTCTGCTTTTAAAGAAATCTTTGAGTATAATCCAAAAGTTCAGTCGAG
TTATATTTTTAAACTACTTCAATCGAATATAATTTCGTTTGAGACGTTTATCTTGCTTGA
TTCGTTTTTAAATATAATCGATAAACATGATGAACAGACTGATAATTTAGTTTGGAACAA
TTATTCTATAAAGTTAAAAGCTTATAGAAAAATTTTAAATATTGATTCACAGAAAGCTAA
AAATGTTTTCATTGAAACTGTGAAATCTTGCAAGTATTAATTGCTTATTATAAATAGATT
ATAATTATCTCACTGACCAGCTATGAGGTCATACATCGTCATAGCACCAACTGTTAATTA
AATTAAAAAGGAAATAAAAATGTTTAAACGTAAATCTACTGCTGAACTCGCTGCACAAAT
GGCTAAACTGGCTGGAAATAAAGGTGGTTTTTCTTCTGAAGATAAAGGCGAGTGGAAACT
GAAACTCGATAATGCGGGTAACGGTCAAGCAGTAATTCGTTTTCTTCCGTCTAAAAATGA
TGAACAAGCACCATTCGCAATTCTTGTAAATCACGGTTTCAAGAAAAACGGTAAATGGTA
TATCGAAAATTGCTCATCTACCCACGGTGATTACGATTCTTGCCCAGTATGTCAGTACAT
CAGTAAAAATGATCTGTACAACACTGACAATAAAGAGTACAGTCTTGTTAAACGTAAAAC
TTCTTACTGGGCTAACATTCTTGTTGTAAAAGACCCAGCTGCTCCAGAAAACGAAGGTAA
AGTATTTAAATATCGTTTCGGTAAGAAAATCTGGGATAAAATCAATGCAATGATTGCAGT
TGATGTTGAAATGGGTGAAACTCCGGTTGATGTAACTTGCCCGTGGGAAGGTGCTAACTT
TGTACTGAAAGTTAAACAAGTTTCTGGTTTTAGTAACTACGACGAATCTAAATTCCTGAA
TCAATCTGCGATTCCAAACATTGACGATGAATCTTTCCAGAAAGAACTGTTCGAACAAAT
GGTTGACCTTTCTGAAATGACTTCTAAAGATAAATTCAAATCATTTGAAGAACTGAGCAC
TAAGTTCAGTCAAGTTATGGGAACTGCTGCAATGGGTGGTGCCGCTGCAACTGCCGCTAA
GAAAGCTGATAAAGTTGCTGATGATTTGGATGCATTCAATGTTGATGACTTCAAAACAAA
AACTGAAGATGATTTTATGAGCTCAAGCTCTGGCAGTTCATCTAGTGCTGATGACACAGA
CCTGGATGACCTTTTGAATGACCTTTAATAGATTATATTACTAATTAATTGGGGACCCTA
GAGGTCCCCTTTTTTATTTCAAAAATTTTTTCACAAAACGGTTTACATCCTTGTCCTTCC
ATGGTACTATACAACTATCGGCAATACTGCTGATGATTAAAGAGGAAAATAATATGGCTA
AAGTTGATATTGACATCGTTGATTTTGAATATATTGAAGAAATTATTCGTAATCGTTATC
CTGAACTTAGTATCACAAGTATTCACGATGATCCCAATTATTGCAATTTTTCTATTGTCA
TTGAAGGTCCTCTTGAAGACCTCACCCGCTTTATGGCTAATGAATATTGTGATGGTATGG
ATTCTGAAGACGCAGAATTTTACATGGGATTGATTAAACAATAATTATCAAGGGGCTATT
ACAAGCCCCGTTAAAATGAGGAAAACATAATGTATATCGGTAAAAAGTATGAACTTGTTC
CAAGACTTATTGATACATTTATTAATTATCGCCCACGTTCTAATTCAGCAATAGTTAAAA
TTATTCAAGAAAATGGTGGATGGTTTGAAGTTAAAGAAGCTTTCTTTGTTGATGGATTTA
GAGTAATAAAACACATTGAATGCGCAAATGGAAAGCATTTTTACTTTAACGTTTGTGAAG
ACGAATTTCATTGTTTTCGTGAGTATAAAGAACCGACTTCTGAAGAAGATGGAGCCGAAG
ACATAGTTTCTGGCGTAACAAAAATTCACTGCATTGTTGACGAAAACAATGTAGATGAAA
TCATTGAACTTTTGCGAAAAACTTTCAAAAAGTAGTTTACAAAAGGGTAGTAGTGTGATA
CTATTACCCTATCAAAACTAATGGAGAAAAGAAAATGTTCGCACCTTATATTATGGCAGC
AGTTATGTTGGTCTGTTTATATCTTTTGATTAAAGCTTGCTAAGGAGAATAAAATGAGAT
TACAACGTCAGAGTATCAAAGATTCAGAAGTTAGAGGTAAATGGTATTTTAATATCATCG
GTAAAGATTCTGAACTTGTTGAAAAAGCTGAACACCTTTTACGTGGCATGGGATGGGAAG
ATGAATGTGATGGGTGTCCGCTTTATGAAGACGGTGAAAGCGCAGGATTTTGGATTTATC
ACTCTGACGTCGATCAGTTTAAAGCTGATTGGAAAATTGTGAAAAAGTCTATTTGAGGAA
AATATTATGTCTGACATTCATGTAATTGGAATTTCACAAGTAAATATTCGCTGCCAATTT
AAAACTGTACCCGGGGTGACTCATATTACTTTATCACACGACCCATATTCTCGTGGAAGA
CAGTTAACTGGTGTAATTAAGTTTTTCGGTGGAATTGGTGGTAATGAATTTACTGTAGGC
GATGAAGAAATTGTTGGCTGTAAATTAAAAGTTCAGAAGGGCGTGTTAGAACTTTTTAGT
GATGAAGTTTTTGATGAAATCTCACGAGCAGTTAACAAAGGAATGTTAACGTTAATTAAA
ATGATTAAAGCTAGCGGATATGTTCCTGATCCTTTTTAATAGGAGATAATATGATTTTTG
TATTTGAATTTATGAATGATGAATTTGATTATGCAATTTTTAACGCATTGCATAATCCTG
ATTTAAGTGAATTTAATGAAATGTTTTCTGATGCTTTGAGTATGTCAGAAGAATACTGTG
GAGAATGTCAACGTGTTTGTGTGACAGTTTTTGAAAACAAAGAAAAGACGTATGAAGAAT
TATTCTTTGATGCTAATAAAGCCACTGAATGGTTTATCGAAAGAGGATTTGCGTAATGAT
TAAATTGGTATTCGCTTATTCTCCAACTAAAACAGTTGAAGGCTTTGACGAATTAGCATT
TGGTTTAGGTGATGGTTTACCATGGGGACGAGTTAAAAAGGACCTCCAGAATTTTAAAGC
TCGTACCGAAGGTACAATTATGATTATGGGTGCTAAAACGTTCCAGTCATTATCTACATT
ACTTCCTGGTCGTAGTCATATTGTAGTGCGTGACCTTGCGCGTGATTATCCTGTAACTAA
AGACGGCGATTTAGCACATTTCTATATTACTTGGGAGCAATATATAACTTACATTTCTGG
CGGCGAAATTCAAGTTTCAAGTCCTAATGCACCATTCGAGACTATGCTTGATCAGAATTC
CAAAGTAAGTGTAATTGGCGGGCCTGCTCTGTTATATGCTGCGTTACCTTATGCGGATGA
AGTAGTTGTTTCCCGCATTGTTAAAAGGCATCGTGTTAATTCAACAGTTCAATTAGATGC
AACTTTTCTTGATGATATAAGCAAGCGTGAAATGATTGAAACGCATTGGTATAAAATAGA
TGAAGTAACAACCCTTACGGAATCAGTATATAAATGAAATAACGCGTGGCGGAAATATGA
ATTTTAATTATTACCCTATTCTATTAGAAAAAGACACGAAACAGCCAAAGTGGCAGGGTC
CTCAGTTTATTAAAGGTGTCTATCAATTAGTAGTTCCTAAAGACAAGATTTATAGCAGTT
GTTTCACTGAATCCGCTTGCAGTATTTTCGGTAATAGTTCACCGTATTGGAATTTTGACA
TAAAGCTGGATAGAAATATCGATATTTGGTTGAAAGCTATGGATATTGGTAATATCACGT
TTGATGAGAATAATTATCATATTATTGGTCGCTTTTCCAAACGCGGTAAAGAATTATATT
TCACGCCTGAAATTGAGAGAAAATTTGATGCTAAACCGTATTGATTATTTAGCTTCATAA
AATGTATTATAATTTATATAAGGTACTAAATGAAACAATACCAAGATTTAATTAAAGACA
TTTTTGAAAATGGCTATGAAACCGATGACCGAACAGGCACAGGAACAATTGCTTTGTTCG
GTACTAAATTACGTTGGGATTTAACTAAAGGTTTTCCTGCGGTAACAACTAAGAAGCTTG
CGTGGAATGCATGCATTGCTGAGCTTCTATGGTTTATTTCCGGTTCTACCAATGTTAATG
ATTTACGTCTTCGCACACATGGTAGTCTTATTCAAGGTAAAACTATTTGGGACGATAACT
ATGAAAACCAGGCTAAAGACCTAGGATATCATAGTGGTGAACTTGGTCCTATATACGGTA
AACAATGGCGTGATTTCGGCGGTGTGGATCAATTAGTTGAAACTATTGATCGTATTAAAA
AATTACCAAATGATAGGCGTCAAATTGTTTCAGCATGGAATCCAGCTGAACTCAAGCAGA
TGGCATTACCGCCTTGTCATATGTTCTATCAGTTTAATGTGCGTAATGGCTATTTGGATT
TGCAGTGGTATCAACGATCAGTAGATGTTTTCTTGGGTTAATTGAGGCCTGAGTATAAGG
TGACTTATACTTGTAATCTATCTAAACGGGGAACCTCTCTAGTAGACAATCCCGTGCTAA
ATTGTAGGACTGCCCTTTAATAAATACTTCTATATTTAAAGAGGTATTTATGAAAAGCGG
AATTTATCAGATTAAAAATACTTTAAACAATAAAGTATATGTAGGAAGTGCTAAAGATTT
TGAAAAGAGATGGAAGAGGCATTTTAAAGATTTAGAAAAAGGATGCCATTCTTCTATAAA
GCTTCAGAGGTCTTTTAACAAACATGGTAATGTGTTTGAATGTTCTATTTTGGAAGAAAT
TCCATATGAGAAAGATTTGATTATTGAACGAGAAAATTTTTGGATTAAAGAGCTTAATTC
TAAAATTAATGGATACAATATTGCTGACGCAACGTTTGGTGATACATGTTCTACGCATCC
ATTAAAAGAAGAAATTATTAAGAAACGTTCTGAAACTGTTAAAGCTAAGATGCTTAAACT
TGGACCTGATGGTCGGAAAGCTCTTTACAGTAAACCCGGAAGTAAAAACGGGCGTTGGAA
TCCAGAAACCCATAAGTTTTGTAAGTGCGGTGTTCGCATACAAACTTCTGCTTATACTTG
TAGTAAATGCAGAAATCGTTCAGGTGAAAATAATTCATTCTTTAATCATAAGCATTCAGA
CATAACTAAATCTAAAATATCAGAAAAGATGAAAGGTAAAAAGCCTAGTAATATTAAAAA
GATTTCATGTGATGGGGTTATTTTTGATTGTGCAGCAGATGCAGCTAGACATTTTAAAAT
TTCGTCTGGATTAGTTACTTATCGTGTAAAATCTGATAAATGGAATTGGTTCTACATAAA
TGCCTAACGACTATCCCTTTGGGGAGTAGGGTCAAGTGACTCGAAACGATAGACAACTTG
CTTTAACAAGTTGGAGATATAGTCTGATCTGCATGGTGACATGCAGCTGGATATAATTCC
GGGGTAAGATTAACGACCTTATCTGAACATAATGCTTCCATTTAATATTGCATCATATGC
TACGTTAGTTCATATTGTAGCTAAGATGTGTAATCTTATTCCGGGAGATTTGATATTTTC
CGGTGGTAATACTCATATCTATATGAATCACGTAGAACAATGTAAAGAAATTTTGCGTCG
TGAACCTAAAGAGCTTTGTGAACTGGTAATAGGCGGATTGCCTTATAAATTCCGCTATCT
TTCTACTAAAGAACAATTGGAATACATTCTTAAACTCAGGCCTAAAGATTTCGTTCTCAA
AGATTATCAGTCCCACGGCGTCTTGAAAGGAAAAATGGCGGTGTAATTTTAATTTAATTG
TGAGGATTTATGATTTTACGATTTAAAGATACTTCTGACGTTGTTCTTTTTACACTTCCT
AATCCAAGTGAGCTAGAAGTTCCAGGACCAAATCAGCCTATTATCATTTATGGCAAAAAA
TATTATACTCATAAAATGACTCGTGAGTATTTTGATAATAAAATTTCCACAGTTAAAACT
TCTTCTGACTGTTACTACGATATTACTGTTTTAACGGAAAAACAATATGCCGAATTATCA
CCGCGCGGGCCGTCTATGTCGGGTAGTGAATAAATACAAATCCGACTTTGATGTTAATAT
TCACCGTGGTACATTTTGGGGAAATTACGTCGGTAAAGATGCTGGCAGCCGGGAGGCTGC
CATTGAATTATTCAAAAAAGATTTTATACGTCGAATTAAATCCGGAGAAATAACTAAAGC
ACATTTAGAGCCTTTACGTGGAATGAGGCTAGGATGCACATGTAAACCAAAGCCGTGTCA
TGGTGATATAATAGCTCATATAGTTAACCGATTGTTTAAAGACGATTTTCAAGTTGAGGA
CTTATGCAATTAATTAATGTTATCAAAAGTAGTGGTGTTTCTCAGAGCTTTGACCCGCAA
AAAATTATTAAAGTTTTATCTTGGGCAGCTGAGGGAACATCAGTAGATCCTTATGAATTA
TATGAAAATATTAAATCTTATCTCCGTGATGGAATGACAACTGATGATATTCAGACTATT
GTCATTAAGGCCGCTGCGAATTCTATTTCGGTTGAAGAGCCTGATTATCAATATGTAGCT
GCACGTTGTCTAATGTTCGCTCTTCGTAAGCATGTTTATGGGCAGTATGAACCACGTTCA
TTTATTGACCATATTTCTTACTGTGTAAATGAAGGTAAATATGACCCCGAATTATTGTCA
AAATATTCAGCAGAAGAAATTACATTTTTAGAATCAAAAATTAAGCACGAACGGGATATG
GAATTTACTTATTCCGGGGCGATGCAATTAAAAGAAAAATATCTAGTTAAAGATAAAACC
ACTGGTCAAATTTATGAAACTCCACAGTTTGCATTTATGACTATTGGAATGGCATTGCAT
CAAGATGAACCTGTTGATAGATTAAAACATGTTATCCGTTTTTATGAAGCGGTATCTACT
CGACAGATTTCATTACCAACTCCTATTATGGCTGGTTGCCGTACTCCAACTCGGCAGTTT
AGTTCATGCGTTGTTATTGAGGCAGGTGATTCATTAAAGTCTATCAATAAGGCTTCCGCT
TCAATTGTTGAATATATCTCTAAACGCGCTGGAATTGGTATTAACGTTGGTATGATTCGT
GCTGAAGGTTCTAAGATTGGCATGGGTGAAGTACGCCATACTGGTGTTATTCCTTTTTGG
AAACATTTTCAGACTGCTGTTAAATCATGCTCACAGGGTGGAATTCGTGGCGGCGCTGCT
ACTGCTTATTATCCTATTTGGCATTTGGAAGTTGAAAATCTTCTTGTTTTGAAAAATAAC
AAAGGCGTAGAAGAAAACCGCATTCGTCATATGGATTATGGTGTTCAACTGAATGATTTG
ATGATGGAACGTTTTGGAAAGAACGATTACATTACTTTGTTCAGTCCCCATGAAATGGGC
GGAGAGCTTTATTATTCTTATTTTAAAGACCAAGACCGTTTCCGTGAATTATACGAAGCA
GCAGAAAAAGACCCTAATATTCGTAAAAAGCGTATTAAAGCCCGTGAACTATTTGAATTG
CTCATGACTGAACGCTCAGGAACAGCAAGGATTTATGTACAGTTCATTGATAATACGAAT
AACTATACTCCGTTTATTCGTGAAAAGGCACCTATTCGTCAGAGTAACTTGTGCTGTGAA
ATTGCTATTCCAACAAATGATGTGAATAGTCCTGATGCTGAAATTGGATTGTGTACTCTC
TCTGCATTCGTACTGGATAATTTTGACTGGCAAGACCAAGATAAAATTAATGAATTGGCA
GAAGTCCAGGTTCGTGCTCTTGATAATCTTTTGGATTACCAAGGATATCCAGTTCCTGAA
GCAGAAAAAGCTAAAAAGCGTCGTAACCTCGGTGTAGGTGTTACCAACTATGCAGCTTGG
CTGGCAAGTAACTTTGCTTCTTATGAAGATGCTAACGATTTAACACATGAACTATTTGAG
AGATTACAGTATGGACTCATTAAAGCATCCATTAAGCTCGCCAAAGAAAAAGGACCTTGC
GAATATTATTCAGACACTCGTTGGTCTCGAGGCGAATTACCTATCGACTGGTACAATAAA
AAGATTGACCAAATCGCAGCTCCAAAATACGTTTGTGACTGGTCGTCGCTGCGGGAAGAC
CTTAAGCTCTTTGGCATCCGTAATAGCACATTATCAGCACTTATGCCATGTGAGTCATCT
TCCCAAGTTTCTAACAGTACAAACGGTATCGAGCCTCCACGTGGACCAGTCTCTGTTAAA
GAATCAAAAGAGGGTTCCTTTAATCAAGTCGTGCCCAATATTGAACATAACATAGACCTA
TATGATTATACATGGAAATTAGCTAAGAAAGGTAATAAACCTTATCTTACGCAGGTAGCT
ATTATGCTGAAATGGGTATGTCAATCAGCTTCAGCGAATACATATTATGACCCGCAGATT
TTTCCAAAAGGAAAGGTTCCAATGTCAATAATGATTGATGACCTTTTGTATTTTTGGTAT
TTTGGCGGAAAAAATTTCTATTATCATAATACCCGTGATGGTTCTGGTACTGATGATTAT
GAAATAGAAACTCCAAAAGCTGAAGATTGTTCATCCTGTAAATTATGATATAATTTGACT
CACGGACGAGTCACCAACTATTAACTAAGTGGAAAATTTATGAGCACAGTTTTTAATACA
AATCCAGTTGATGTTTTAAAAGAACCTATGTTTTTTGGTTCAGGTCTTGGTATTGCGCGT
TATGATATTCAACGTCATAAAGTTTTTGAAGATTTAACCGAAAAGCAGTTGTCATTTTTC
TGGCGTCCTGAAGAAGTAAACTTAATGATGGATGCTGCACAGTTTAATAAGCTTCCTCAA
TATCAGCAGAATATTTTTACTAATAATCTGAAGTATCAATCACTTCTAGATAGCATTCAG
GGTCGTGCACCGTCTGCTGTACTTATGTCATTGATTTCAGACCCAAGCCTTGATACATGG
GTTGCTACATGGACTTTTAGTGAAACCATTCACAGTCGTTCATACACTCATATTATGCGA
AATCTTTATACTGATCCGTCAAAGGTATTTGATGAGATTGTATTAGATAAAGCTATCATG
AAACGTGCTGAATCTATTGGTCGTTATTATGATGATGTTCTGGACAAGACACGTATTTGG
GAAAACGCCAAAGAAAACTTTAGTTATTTTGCTGAAAATGAATATGATTTAGAAGCATAT
TCAAACAGTCTCACTCATTTGGAAGAATGTAAACGAGACCTGATGAAGTCGCTTTATCTC
TGTCTGCACGTTATCAATGCTCTGGAAGCTATTCGTTTTTATGTATCCTTTGCATGTACT
TTCAACTTCCATAAGAACATGGAAATCATGGAAGGTAATGCGAAGATTATGAAATTTATT
GCACGTGATGAGCAGCTTCATCTTAAAGGTACACAATATATTATTCGTCAACTTCAATCC
GGTACTGATGGTGATGAATGGGTTAAAATTGCCAAAGAGTGTGAACAAGAAGCAGTTGAT
ATTTTCATGGAAGTTAACCGCCAAGAAAAAGATTGGGCAGTTCATTTATTTAAAGATGGC
GATGTTCCTGGATTAAATACAAATAGCATGTGGAGCTTTATTGATTACTTAACTGTATCT
CGTATGAAACAGTGTGGTCTTCCATGCCCGATTACCGGTGCTCCGGTTAAACATCCATAT
CCTTGGATTCGTGAATACCTTAATTCTGATAATGTTCAATCCGCGCCGCAAGAAGTAGAA
CTGTCATCTTATCTTGTTGCACAGATTGATAATGATGTTGATGATAAAGTTATGATGAGT
TTTAAAAAATATTTTTAAGGAGTGGGCCGCAAGGCCCATTTTATTATGAAAGAAATTGCA
ACAGAATATTCATTTATTAAATATACTGAGCTAGAATTAGACGACAACGGAAGTATAAAA
CAATTATCTATTCCAAACAAGTATAACGTAATTTATGCTATTGCTATAAATGATGAGCTT
GTTTATATTGGAAAAACTAAAAATTTACGTAAAAGAATAAATTATTATAGAACTGCTATT
AATCGTAAAGACAAAACGTCTGATTCTACTAAATCTGCATTAATTCATGCTGCGCTAAAG
GAAGGAAGCAAAGTTGAATTTTACGCCCGCCAATGTTTTAATCTTTCTATGACAAATGAG
TTAGGTACAATGACAATCGCAACGATTGACCTAGAGGAGCCGCTATTCATTAAACTGTTT
AACCCGCCTTGGAATATTCAACACAAGAAAAATGATGCTTCCACATGGAGTGTGGTACTA
TATTCAAAACACAAAAGAGGATACACAATGCAAGAACTTTTTAACAATTTAATGGAACTA
TGTAAGGATTCACAGCGTAAGTTTTTTTACTCGGATGATGTAAGTGCATCTGGAAGAACT
TACAGAATTTTCTCATATAATTATGCATCTTATTCTGATTGGTTACTTCCAGACGCATTG
GAATGTCGTGGAATCATGTTTGAAATGGATGGAGAAAAACCAGTAAGAATTGCTTCTCGT
CCTATGGAAAAGTTTTTTAACTTAAATGAAAATCCATTCACGATGAATATCGATTTAAAT
GATGTTGATTACATTCTGACAAAGGAAGATGGGTCTTTGGTATCAACTTATTTAGATGGT
GATGAAATTCTGTTCAAATCAAAGGGTTCAATCAAATCCGAACAGGCTTTAATGGCTAAT
GGTATTTTGATGAATATTAATCACCATCGGTTGCGTGATAGACTTAAAGAATTAGCTGAA
GATGGATTTACTGCTAACTTCGAATTCGTCGCTCCAACTAATAGAATCGTTCTTGCTTAT
CAAGAGATGAAAATCATTTTATTGAATATTCGTGAAAATGAAACAGGCGAATACATTTCA
TATGATGATATTTATAAAGATGCTGCTCTTCGTCCATATCTAGTTGAACGATACGAAATC
GATAGCCCTAAATGGGTAGAAGAAGCTAAAAATGCGGAAAACATCGAAGGCTATGTTGCT
GTGATGAAAGATGGTTCTCATTTTAAAATTAAGTCTGACTGGTATGTGTCTCTTCATAGC
ACAAAAAGTTCATTAGATAATCCAGAAAAATTGTTTAAGACTATTATTGATGGTGCATCA
GATGATCTTAAAGCAATGTATGCTGACGATGAATATTCATACAGAAAAATTGAAGCATTT
GAAACGACTTATCTGAAGTACTTAGACCGAGCTCTGTTTTTAGTTCTTGACTGTCATAAT
AAGCATTGTGGTAAGGATAGAAAGACTTATGCGATGGAAGCGCAAGGTGTTGCTAAAGGT
GCTGGAATGGATCACCTGTTCGGTATCATTATGAGCCTATATCAGGGGTACGATAGTCAA
GAAAAGGTCATGTGCGAAATCGAACAGAATTTTTTGAAAAATTATAAAAAATTTATCCCA
GAAGGATACTAAGCTGTTTACAAGTTCCTCATGTTGTGTTATAGTAGTCTTACTGACATA
ACATGAGGACTTTATGATGGATTTGCAGCTTATTACTACTGAAATGGTCGTTGAAGCATA
CGGTGATACTACAGATGGGATTTCTGTATTCAAAGGAAATCGTCGAGTTGGATATATCAC
CGATCTTAAGAAAGATTTAGCTAAGCAAGTCAAGCGGAAAACGACCATTAAAGAATATCG
AAATCGTCGTCTTGAGCAAGCCCGTGATATGCTTCCTGATGCGGTTGAGGAGATGAAAGT
CTTTTTAGAAAATCAACTCGCTAAGTATGATTGTGAAGTGTTTATTAATCAGACTCAACC
TAATGTTCATATCAATAGCTGCAAATGCTATATCATCGTTAATCCTTTGACAGGAAAGCA
TCGTCTTGGAATTAGTAATCCAAATCGTAGCGCATCGGATATGGCAGAAGATGTTGCGGC
GTGCTTTAAAATTTCTAAATCTCCGGCTGAACATCATATTTTAATTAACGGGCTTGCTCA
AGACGATATTATAGAGGTTATTAAAACTTTATGCATGTAAGTAATTTTACAGCTGGATTG
CTATTACTTGTAATAGCATTTGGCGGAACATCTATTATTTTAAAAAATAAGGTAGAAAGA
TTAGAAACGTCTGTTGTAGAAATTACAAAAACGGCCAATGAAAACGCCTTAGCATTAAAT
AATTTGCGAATTCAGTATAATTATATTGATGCGATGAATAATAAAAATCGTGAGGCGATT
GCTGCTATTGAGCGTGAAAATGAAAAACTGCGCAAAGATGCAAAGAAGGCGGATGTGGTG
GCTCGTAAGCCAGGATTGGTTGAAAAACAAATCAACAACTCCTTCAACAAGTTCGCAGAA
GACATCCAGGACCTTTCTAAATGATTAAATTATCTGCAGTAATATTATCTATTGGTCTTC
TAGTTGGTTGTTCGACAAAGCCTCTAGAAGTAAAGAAAGAAACAGTTCATCCTAATTGGC
CTGTGCAAATAAAGTCATATGACGAAGCTAAACTATCTTGGCAAGTTAAAGTTATTGATG
GTAAAGCTTGGGTAGGTATGCCATTTGAAGATTCTCAGGAATTTCGTATTTGGCTTAATG
ATGTAAAACGATATGTACATGACCAGAAAACTATGATATGTTATTATCGTCAAGAGCTAA
AAGAGGATAAATGTAAATGATTTCATGGTATCAATTTGAACATCTAAAAGGATTAATTTA
TGAATCCGAGATGGCTGCAATGATTTATGGACGACAGATTCAACGATTAGAATCTTTACC
TCCAACTAATGATGTTTTATTAGCTCAATCACGCGCTAATCTCAAAAATGAATATCAAAA
TAAGTGGGGTAAAGCATCTAAAGACCTGCATGATTATATTCAATCATTGGTTGAGAAAAA
TAAATGAAAACTCTGTTAGAACGTTATATTGAATGTTCAGACCGTTACATTGATGCATGC
CGTGAAAATGTATCAAGCATTAGCCAAGATATTGAACATGCTAAAGCTTTAGATGATGCT
GGTAAAGCCCTGCGAAAAGAAGCGAAAGCTCGTGGGCTTGATATGTATCAGCTTAAAAAT
CACATGATAAAATTTATTTCATCCAATGTTCAGAGTAAATCAGCGAATCAATCAACAGCT
GAATTGTACAAAGGACGGCGTGAGCATAATATTCGTATTCTTGAAGTTTTCTTAGGAATT
AAATGATGAAAAAGATTATTTTGACTGTAGGTTGTCCTGGTTCTGGTAAAAGCACTTGGG
CTCGTGAATTTATTGCTAAGAATCCTGGGTTTTATAATATTAATCGTGATGATTATCGCC
AGTCTGTTATGGCACACGAAGAACGTGATGAGTACAAATACACCAAGAAGAAAGAAAGCA
TCGTGACTTATATGCAACACGATGCGGCACATATGATTCTCTGCCAAGACGGAACGAAGG
GTGTAATTGTTTCAGATACTAATCTGAATCCTGAACGACGTAAGGTCTGGGAAGAGTTTG
CCAAAGAGCTTGGGCATCAAATTGAATATAAAGTGTTTGATGTTCCTTGGACTGAATTGG
TTAAACGTAACTCAAAACGTGGAACTAAAGCAGTACCAATTGATGTTTTACGTTCAATGT
ATAAAAGCATGCGGGAATATCTCGGACTTCCGGTATATAAAGGGACTCCTGGTAAACCAA
AAGCAGTTATTTTTGATGTTGATGGCACATTAGCAAAAATGAATGGTCGTGGTCCTTATG
ACCTTGAAAAATGCGATACCGATATTATTAATCCAATGGTCGTTGAACTAGCTAAGATGT
ACGATAAGCAAGGATATTACATCGTAGTCGTTTCAGGCCGTGAAAGTGGAACTGAAGAAG
ACTCAACAAAATATTATCGTATGACCCGTAAATGGGTTGAGGACATTGCTGGCGTTCCAT
TAGTTATGCAATGTCAACGCGAACAAGGTGATACCCGTAAAGATGATGTAGTTAAAGAAG
AAATTTTTTGGAAACACATTGCACCACATTTTGATGTGAAATTAGCTATTGATGACCGAA
CTCAAGTAGTAGAAATGTGGCGACGCATCGGTGTTGAATGCTGGCAAGTCGCCTCGGGAG
ATTTTTAATGGCTTTGCACCATGAAACTTGGGCTATTGTTATTGTAAATAGCGGTTTAGT
TGGTACTAGTAATGGGCAATTTTGTGTATTTACTAGTGAAAATAGAGCATGGGAGGAATG
TCTTAAATTAAGAGAAAAGAATCCTGATGTTGAACTAACAGTAAAGAAAACTAAACTGCC
TTTACCATGGAAAACTTATGAATAACATAGAAAAGATTTATCGTCTTTGTGATAAAATTG
AAAAAGAAAAGAAATATCTATTTTGTTTATGGCCTATTGTTGATGGAAGAGTAGGTTTAG
ATGTTCTTGATTATGAAACAGAAGACAAAGTAGATGGTTCAACTTTTGATAATGCGTTGG
ATGTTATTGATTGGCTCGAAGAAAATTATGTGAGGTAAATATGTTTCCGACTTATTCTAA
AATTGTAGAAGTAGTGTTTAGTCAAATTATCGCTAATAATATGTTTGAAAAGCTTGATAA
CGCAGCCGAGCTTCGAATTCATGCTCAAGTGACTCATGTATTGAACACTTTGCTTCCAGA
CCAGGTGGATTCTGTTGCCATCACGTTGTATCCAGGTTCCGCGCATATCATTGTTGTATT
CGGTCTTGATGCTGAGCTAGTTATCAAAGGCGACATTCGTTTTGAATCACAGACATCAGA
ATTCAAAGCAATTTAATAGTTTACTTTACGGTAGAGTTGTGATATTATAGCTCTACCAAA
ACAAACGAGGAAATTGAAATGAGCGAATGGTTTGAAGAAGATAAGGTTTATCGCTTTAAA
ACTGGGTATAAAGATATTTTTAATGAAACTTGCGGGGCTAATAAACGAATTGCCCAGTTT
ATTGGGGAAAATTCATTTAAAGTAAAAATAGATCCTGCGAAAAATGTTATTAGCATTAAA
CGCGAAATTGATGACTGTTGGTATAAAGCTGTTGATGTAATGGGCGAATCCTATAAAGTT
AGCCCGTTATTTTCAATTGCTTATATGTTAGAATATTCTTTTTTCGAAGAAGTTCAAAAA
GATGATTCTGTCAGTAAATTTGAAATTAAAACTGATAAAGAAATTAAGTGGAAAGTAGTA
GGTATTACTGGTTGTATGTTCTATATCTATGCTCAAACTGATACGAAGGAAGAAGCTAAA
AACAAAGCTCTAGAATATCTTGAAGAGTATGAAGAAGGCCCGGTAATGATTACCCAAGAT
GCTGAATTAGTTTCTGTCAAATTAGTTAAAAACGTTGAAAGTAAGGAGCTAGGATCAACA
TGCTAAGCGAAAAACCAATTACTGTTAAAGAATTCCAAGAAAAAGTTAAACTATTTGCTC
AAGAATTGGTAAATAAGGTTTCTGAACGATTTCCAGAAACATCGGTTCGTGTTATTACAG
AAACTCCTCGTTCAGTATTAGTAATTGTGAATCCAGGTGATGGTGACCAAATAACACATC
TCAAATTGGATTTTGATGGATTAGTTGAAGCACAAAGGGTGTATGGCGTACTATGATGAA
TTTAACTGATATAATTGATAATTGTCTTGAAAATGATACTGGCGATCATAGAGCGCTTGA
CTCTGAAACAGCTCAGTTCATTAGAATAACTTTAATGAATGACACTCTAGTGAATAGTAT
TCATCCTTCTGTGTATGATGCTATTATTGTGACGAAGTATCCAGTTGAGCTTCACAAAAA
GATGGTTGGCGCAATTTTTATTGATAAGAAAAACCGCTTTAAAGATGGGCAGAATATAAT
TAGTTCTGTTATTAAAAGTATAACTAAACTTCGTCACGAAATTTATCGTGTTGAAACTGC
TAAATCTGCTTATCTGGTGATTATGAAATGAAAGCGAGTACAGTACTTCAAATTGCATAT
TTAGTATCACAAGAATCAAAATGTTGCTCCTGGAAGGTAGGAGCAGTAATTGAAAAGAAT
GGACGTATTATTTCTACCGGATATAATGGTTCACCTGCTGGTGGTGTGAACTGTTGTGAT
TATGCTGCTGAGCAAGGTTGGTTGCTGAATAAGCCTAAACATACTATCATTCAAGGTCAT
AAGCCTGAATGTGTATCGTTTGGTTCAACTGATCGTTTTGTCTTGGCGAAAGAACATCGT
AGCGCTCACTCTGAATGGTCGTCTAAAAATGAAATTCATGCTGAACTAAATGCAATTTTG
TTTGCTGCACGAAATGGTTCTTCTATTGAAGGTGCTACTATGTATGTAACACTTTCTCCT
TGTCCGGATTGTGCAAAAGCCATAGCTCAATCTGGAATTAAAAAACTGGTTTATTGCGAA
ACATATGATAAGAATAAACCTGGCTGGGATGATATTCTGCGAAATGCAGGTATTGAAGTG
TTTAATGTTCCTAAGAAAAACTTGAATAAGTTAAACTGGGAAAACATCAACGAATTCTGT
GGTGAATAATGAAATTTCGTTTGGTACAGCTCACAGCAATTAGTTCTTATTCTAACGAGA
ACATTTCATTTGCTGTAGAGTATAAGAAGTATTTTTTCTCTAAATGGAAACAGTATTATA
AGTCAGAATGGGTTTGTATTGATAGGCCGTATAGTTGGAAATCTGATTTAGAAAAATGCC
AAAAATTACTTTCCACCCTTAAAGAACGTGGAACAACTCATATTAAAACTGTAATAGGTA
AATAAATGAAATTGACGACTGAACAGAAAGTAGCAATTCGTGAAATTTTGAAAACTAAAT
TGTCCATGGGTATTTCAAACGTAGTTTTTGAAAAGTCTGATGGTACTATTCGTACTATGA
AAGGTACTCGCGATGCTGACTTTATGCCAACCATGCAAACTGGTAAATTGACTGAATCTG
CTCGGAAAGAATCTACTGATATGATTCCAGTATTTGATGTTGAGCTTGGCGAGTGGCGAG
GTTTTTCTATTGACAAATTGATTTCTGTTAATGGTATGAAAGTTGAGCATTTACTCCAAT
TTATTGGTAAATAAATGCTTTAAGAATTATTTGTTATTATTAATTCATCTGTTAACAAAA
AGGAAAAACGATGTCTGAAGTACAACAGCTACCAATTCGTGCTGTCGGTGAATATGTTAT
TTTAGTTTCTGAACCTGCACAAGCCGGTGATGAAGAAGTTACAGAATCAGGACTTATTAT
CGGTAAACGTGTTCAAGGTGAAGTTCCTGAACTATGTGTAGTTCACTCTGTCGGTCCTGA
TGTTCCTGAAGGTTTCTGCGAAGTTGGTGATTTGACTTCTCTTCCAGTTGGTCAAATTCG
AAACGTTCCGCATCCTTTTGTAGCTCTGGGTCTTAAGCAGCCAAAAGAAATTAAACAAAA
ATTCGTTACCTGTCACTATAAAGCTATTCCGTGTCTTTATAAGTGATATAAATAATAATA
TGAATTGGGTGTCGGAATAATAAGTTAACCGAACAATTCTATGTGGTAGTCTACAACTGA
GAGATCTGTCGAAAGAAGATGAAATTCAGAAGAACGTGACTACCGAGTTTTAATCTCTAA
CGAGAATTTTTAAATGATTAAACAATTACAACACGCTCTTGAACTGCAACGAAACGCATG
GAATAATGGTCACGAAAACTATGGCGCATCTATTGATGTTGAAGCCGAAGCTCTTGAAAT
CCTGCGTTATTTCAAACATCTGAATCCTGCTCAAACTGCATTAGCTGCTGAGCTTCAGGA
AAAAGATGAACTTAAATATGCTAAGCCTTTGGCTTCTGCTGCACGAAAAGCAGTTCGTCA
CTTTGTGGTAACACTGAAGTAATTCATTGGAGATTCACTGCCTTAGTGTGAGCTAAAATC
GAGGAGCCGTCGAACTGTCTGATTAATGATTTGCGAATCATTATAGTTTTAAGACCCCGG
CAGTTTTACGGTGTACCTCTTGAATGTTATTCTTATAGCGGCAAGTGCATGCTACCCCGA
GGTGATGGCCAATCGGGAGTACGCCTCAAGGCCTATATATCCATCAGTATATATATCTTA
TCCTCGAGAAATCGAACCCGGAACCTTTAAGCTAACGGTGTGCAACAGATAAGAGCTATA
AGGTATGATGACGGGTTTATGGTTATCCTGGTCGTTAAATATCCAAAAACCTATGTTCCC
CTTGAGGGCTTGCGCAGGCAATGCCAATAAGTCCTGCATTTTCATTTAAAAGAGAATTTA
TAATGGCAAAACAAGCTAAAGCAAAGAAAGCAGTTGAAAAGAAAGTTGGTGATTCTAAAC
GCGCTGGCTACAAGCGTGGGTCGAACTCTCGTATCAATCAAACTGTTGAGAAGATCATGC
GCCGAGCACGTGCGGTTCTTCGAGATGATGCTTCTCGTTTTGGTAAGCAGAAAGCATAAG
TTGAGGACTCCTTCGGGAGTCCTTTTTTATTTTCCAAAGATTGCATAAAGTTGTTTACAG
TATGGTTCCTTTGTGATAGTATTATCTTACACAAACAAAGGAGAATAAAATGAAAACGAT
TAATCTGAACGCTGCAGTTAAAACTAAATGCTTCAATGGTAAATATGATGAAACTATGTG
GTTCTTAATGGCAGTTGAAGGTGATATTATTGAAGTAGAAACAACAGAAGGTATGGGAAC
AGATTTCACCTTTACAATTCAAGTTCATAATTTCTTTACTGGTTGGATTTATGAATTGAA
TACAGTAATCGTTGGAAAAATTGAACAAAATGAATTAGGTGAATGGTATTATGTTACAGC
CCGTCAACGTGCCGAACGCTTAATTGAGAAGATGAAAAAAGTTGGTAAACTTGACATGCA
GCATTGGAAAGTAGTAAAATAATTGTTTACTTTGGTACAGGACATGATATTATATACCTG
TACCGCAATTAAACATCTTGGAGAATAAAATGAACTACATTAACTTTGAACGTAAATATG
TTTCTAATGGTATTGCAGGTTCTATTGATACTATTTGCCTTTGGAAACATCAAAATGGAT
CAGTATGCGAAATTGAACAGTATATGACTCCTAACTACGTTTATATGCGATTTGAAAATG
GCATCACGGTTTCAATCACAATGGAAGGTTCAAACTTCAAAATCGCTCTGGATGATGATT
TTCGTCAACGCGATTTAGGGACCCATCCTTGCTGGAATGGCGCTAATCGTAAGCTTCTGG
TTAAAACTTGGATTCGTCATATTCTGAGTAACAGAGCTAAACCTGAGCATCTTGAAGCAA
TCTTTGATGTAGTTCTTAACGAATTTGATATTTAAAATAAAATGAGGGGCTTCGGCCCCT
ATTGAGGAAAATATTATGTTTATGACTACTTATTTTGATACCCGCAAAAATTTCTGTGAA
GTTGTTTTCTCAAAGGCACCTAAAGACCTTCCTGCACATTTGCAACCTACTAGCGAATCG
ATTAAAAACTACGTTGATGTGGTTTGTCCTTTAGAATTCCGTACAGTAAATGGGCGTGAT
ACTCTAGCTATCGCTAAACTCAATCGTGAAATTGACATTGATCCCTCAATTGCACGCGAA
ATTAATAGTTCTGATATTAATGGCGGTAATGTTAAATCACATGGGTTTCAGATGAGGTTC
TAATGAAATTCTTTTTAGGTCAAACTGTTGAATTAAAGGGAGTTGGTATACCTGGATTAA
TTTCTAAGGTTTTACCCGCATTTAAATTGGGAGATGTTCAAGTAAAAGAGGCTTATATTG
TTTCCTGGGTAGATGGAAATGAAGACCTTCGTATGGGTGATGAATTATCTCCTATCTACG
GATTAAAGGAATTAGTATGAATATAATTAATAAGATTTTTGGAATTCAGTACATTAAGGT
CACATATAAAGTAACAGATAAAAATCCGTATACTGATGAACACGAAGAACCACAAGTTGA
GTCTATTATATTAGAAAAGGACCCTAACTGGCCAGTTGAATTTCGTCTTCCTTGCTATGG
TCATTGGGCTGATGTTGAAATTATAAGCATTGAAAATGTCTGAGTTAGAGATTAGAAGCA
ATTTTAGGTGGCCATCATGCGCATTAAGTAATTTCGCCCATTGGCCTTTCGTTATGGATG
GTATTCAATTTGGAGGTCTTGAAGGATTCCTCCAAGGATGCAAGGTGAAAAACGTTGAAC
AACAACGTCGTATATTTGGGTTATCTGGGCTTGCCGCCCAACAAGCTGGAAGGTCTTATG
CTAGAGCTCAGGACCGTGGGACCCTCTTCTGGCTTGGAGTTCCATTTTCAAGATACTCCC
CAGCGTGGAAAGAATTATACACAAATGCATATTTTGAAGCAGCGATCCAAAATAGGGGCT
TTCGCGATGCATTACAAGCCTCGAAAGGAAAAGTTTTGAAGCACAGCATGGCTAGTGGTC
TAACAAAAGATGATACAATACTAACCGAAGCTGAATTTATTGATGTGTTAAACCTATTAA
GAGACTCTCTATGAAGCCTACTATTTTAACTGATATTGATGGAGTATGTTTAAGCTGGCA
ATCAGGCCTTCCTTATTTTGCCCAGAAATATAACCTTCCGTTGGAACATATTTTAAAAAT
GATCCAAGATGAGAAATTTATTTCTCCAGGTAAACTTTTTAATTGTGATGAAGAACTTGG
CGTCAAGTTAATTGAAAAATACAATCGTTCGGATTTTATTCGTTACTTGTCTCCATATAA
AGATGCTCTGTGTGTAATTAACAAATTAAAAGAAGATTATAATTTTGTAGCTGTTACAGC
ACTGGGTGATTCTATTGACGCTCTGCTGAATCGTCAATTTAATTTGAATGCTCTTTTTCC
TGGTGCCTTCTCAGAAGTAATGATGTGTGGTCATGATTCTTCAAAAGAAGAGTTGTTCAA
AAAGGCAAAAGAGAAATATAACGTAATTTGTTATATTGACGATCTCGCTCACCACTGCGA
TCACGCGAGTGAAATATTAAATGTTCCTGTTTATTGGATGGCTCGAGGAGAGCGTGACAA
TATTTCAAAAACTGCTCAGCGAGTTTATACATGGAACGATGTAGAGAATAAGCTTTTTTC
ACCAAAGGAAAATAAAGAAAGCTTTGATAGTGAAAAAGCTATAAAAGATGCAATCGAGAA
GATGATCAAAAACGATTCTTTTCCTTGGAACACTACCTGGAGAACTCCTGGATTTAATCC
TTATAATCATCTATATCATCCATATCAGACACATCCGTTTCAGACATGGAACTATATTAA
ACCTGGTGGCATAGAGTATTTGTATAATAGACCTACTAGTGGTGATAATATTTTCCAAGG
AGCATTCTAATGTTTGTCGTTCACACTATTTATGAAAATGAAGGTAATACTACACGTGAT
TATGGTCACGTAAATCAATTTTTTAGATGCAATCCGGAATTCCGAGCTCAAAAAGACGAA
CGAATTTTTAAAAAATGTGTAGAGCAAGGTTTCATTTACGTCAAGCACTGGATGCAAGGA
AATAAAGTTAGAACTACATATCACAGGTCTTTGCCTGAGCTTAATGATGAATTGATTTAT
AATAGAAATGTAAATCAAACTCTGAAGGATGAACAATGATTCTTAAAATTCTGAATGAAA
TAGCATCTATTGGATCAACTAAGCAGAAGCAAGCAATTCTTGAAAAGAATAAAGATAATG
AATTGCTTAAACGAGTATATCGTCTGACTTATTCTCGTGGGTTACAGTATTATATCAAGA
AATGGCCTAAACCTGGTATTGCTACCCAGAGTTTTGGAATGCTGACTATTACCGATATGC
TTGACTTCATTGAATTCACGTTAGCTACTCGGAAATTGACTGGAAATGCTGCAATTGAGG
AATTAACTGGATATATCACTGATGGTAAAAAGGATGATGTTGAAGTTTTGCGTCGAGTGA
TGATGCGAGATCTTGAATGCGGTGCTTCAGTATCTATTGCAAATAAAGTTTGGCCAGGTT
TAATTCCTGAACAACCTCAAATGCTGGCAAGTTCTTATGATGAAAAAGGCATTAGTAAGA
ATATCAAATTTCCAGCCTTTGCACAGTTAAAAGCAGATGGAGCTCGGTGTTTTGCTGAAG
TCCGAGGCGATGAATTAGATGATGTTCGTCTTTTATCACGAGCTGGTAATGAATATCTAG
GATTAGATCTTCTTAAGGAAGAGTTAATCAAAATGACTGCAGAAGCCCGCCAGATTCATC
CAGAAGGCGTGTTAATTGATGGCGAATTGGTATATCATGAGCAAGTTGAAAAAGAGCCAG
AAGGTCTAGATTTTCTTTTTGATGCTCCTGAAATCAGTAAAGCTAAAGAGTTTGCCGAAG
TAGCTGAATCTCGTACTGCATCTAATGGCATCGCCAATAAATCTTTAAAGGGAACCATTT
CTGAAAAAGAAGCTCAATGCATGAAGTTTCAGGTCTGGGATTATGTCCCGTTAGTAGAAA
TATACGGTCTTCCGGCGTTTCGTTTAAAATATGATGTACGTTTTTCTAAACTAGAACAAA
TGACATCAGGATATGATAAAGTAATTTTAATTGAAAACCAAGTAGTAAATAACCTAGATG
AAGCTAAGGTAATTTATAAAAAGTATATTGACCAAGGTCTTGAAGGTATTATTCTCAAAA
ATACCGATGGATTATGGGAAAATGCTCGTTCAAAAAATCTCTATAAATTTAAAGAAGTAA
TTGATGTTGATTTAAAAATTGTAGGAATTTATCCTCACCGTAAAGACCCTACTAAAGCAG
GTGGATTTATTCTTGAGTCAGAGTGTGGAAAAATTAAAGTAAATGCTGGTTCAGGCTTAA
AAGATAAAGCCGGTGTAAAATCGCATGAACTTGACCGTACTCGCATTATGGAAAACCAAA
ATTATTATATTGGAAAAATTCTAGAGTGCGAATGCAACGGTTGGTTAAAATCTGATGGCC
GCACTGATTACGTTAAATTATTTCTTCCGATTGCGATTCGTTTACGTGAAGATAAAACTA
AAGCTAATACATTCGAGGATGTATTTGGTGATTTTCATGAGGTAACTGGTTTATGAAAGC
TTACTTAGAAACAATTGTCATTGCTCAAAAAGAAGGTGGAGATGTTTCTACTTCTGTATC
ACAAGTCATTCTCGAATTTGTAGATGCATACGCTTATAATAAATTTACAGAAACATTTGA
TGCCTATGAAAAAGGACCAAAGTTTGAAATATATCGTACTCTCTTACCACTAGATTACTA
AAGGCCTTCGGGCCTTTAATTTTATAAATAGAATAAACACTAGAGAGGCTATGATGGAAC
TTATTACAGAATTATTTGACGAAGATACTACTCTTCCGATTACAAACTTAAATCCAAAGA
AGAAAATACCGCAAATTTTTTCAGTTCATGTTGATGATGCAATTGAACAACCAGGCTTTC
GTTTATGTACCTATACATCTGGAGGTGATACTAATCGCGATTTAAAAATGGGCGATAAAA
TGATGCATATTGTTCCTTTTACATTAACTGCTAAAGGTTCAATTGCTAAATTAAAAGGTC
TTGGTCCAAGCCCAATTAATTATATCAATTCAGTTTTTACTGTTGCAATGCAAACAATGC
GTCAGTATAAAATTGATGCTTGTATGCTTCGTATTCTTAAGTCTAAAACCGCTGGTCAAG
CTCGACAAATTCAAGTTATTGCTGATAGACTTATCCGTAGTCGTTCAGGTGGCAGATACG
TCCTTCTTAAGGAACTCTGGGATTATGATAAAAAGTATGCATATATTCTTATACATCGCA
AAAATGTATCACTAGAAGACATTCCAGGAGTTCCGGAAATTAGTACCGAGCTCTTTACTA
AAGTTGAATCGAAGGTCGGTGATGTTTATATCAATAAAGATACCGGAGCTCAAGTAACCA
AAAATGAGGCAATTGCAGCATCTATTGCACAAGAAAATGATAAACGTTCTGACCAAGCTG
TAATCGTTAAAGTTAAAATTTCCCGTAGAGCAATTGCACAAAGTCAGTCATTGGAATCTT
CTAGATTTGAAACACCGATGTTTCAAAAATTTGAGGCTTCAGCGGCAGAATTAAATAAAC
CAGCGGACGCGCCTTTAATTTCTGATTCTAATGAATTAACGGTAATTTCTACTTCAGGAT
TTGCACTAGAGAATGCTCTTAGCAGTGTTACAGCTGGGATGGCATTCAGAGAAGCTTCTA
TAATTCCTGAAGATAAAGAATCCATTATTAATGCAGAAATAAAAAATAAAGCTTTAGAAA
AATTACGAAAAGAATCTATTACTTCAATAAAAACTTTAGAAACTATTGCTTCTATCGTCG
ATGATACTTTAGAAAAATATAAAGGTGCTTGGTTTGAAAGAAATATTAACAAACATTCGC
ATTTAAACCAAGATGCTGCAAATGAGTTAGTACAAAATTCTTGGAATGCAATAAAAACAA
AGATTATTCGAAGAGAATTACGTGGATATGCTCTTACAGCTGGATGGTCATTACATCCTA
TAGTCGAAAATAAAGATTCATCTAAATACACACCAGCACAAAAACGCGGAATTCGTGAAT
ACGTAGGTTCAGGATATGTAGACATAAATAATGCTCTTTTGGGATTATATAATCCAGATG
AGCGTACAAGTATTTTGACAGCATCTGACATAGAAAAAGCTATTGATAATTTAGATTCAG
CCTTTAAAAATGGTGATCGATTGCCAAAAGGTATTACTTTATATCGTTCACAGCGAATGT
TACCTTCAATATATGAAGCATTGGTAAAAAATCGAGTTTTTTATTTTAGAAATTTTGTAT
CAACATCATTATATCCAAACATTTTTGGTACTTGGATGACTGATTCAGCTGTTGGTGTTT
TACCAGATGAAAAGCGTCTAAACATTTCTATCGATAAAAATGATGAAGGGCTTGTTAATT
CTAGCGATAATTTAGTCGGAATTGGATGGGTTATTACTGGGGCTGATAAAGTCAATGTTG
TTTTACCCGGTGGAAGTTTAGCGCCTTCAAATGAAATGGAAGTTATTTTGCCACGTGGAT
TAATGGTCAAAGTTAATAAAATAACTGATGCATCTTACAATGATGGAACAGTTAAAACTA
ACAACAAGCTTATTCAAGCTGAAGTTATGACCACGGAAGAGCTCACCGAATCGGTAATCT
ATGACGGAGACCATTTAATGGAAACTGGTGAATTGGTTGCAATGACAGGTGATATTGAAG
TAGAAGACAGAGTTGACTTTGCATCATTTGTTTCATCAAATGTTAAACAGAAAGTAGAAT
CATCTCTTGGAATTATTGCGTCTTGTATAGATATTGCAAACATGCCTTACAAGTTCGTTC
AAGGATAAATCATGGAACTTATTACAGAATTATTTGACGGCGCTTCGGCGCCGGTTGTTA
ACTTAAATCCTAAGCATAAAATACCACAAATTTTTGCTATTCAAGCCGGCGAAGAAAGCG
TGCTTCCTGGATTTAGATTTTGTACATACACCTCTGGCGGTGATACGAATAAAAACGTTA
AGCCAGGTGACAAAATGATGCATATCGTAATGATAGGTGTCAATGAGAAACTATCATTAG
TTAAACTTAAAAACTTGGGTGGAAATCCAATTGGTGTCATTAATGCGGTTTTTGATACTG
CTCTTCAAACAATGAAACAGTATAAAATTGACGCATGCCTATTTCGCGTACTAAAAAGTA
AAACAAATGGCGCAGCTCGTCAAATGCAAGTTATTGCTGACCGTTTAGTACGTACTAAAG
GAGCAGGTCGATATGTTCTTTTAAAAGAAATCTGGGATTATGATAAAAAGTATGCATATA
TTATGGTTTACCGTAAAAATGCCAATTTAGAAGACATTCCAGGTGTACCTCCTATTTCAA
CTGAGTTATTCACAAAAGTTGAATCAAAGGTTGGTGATGTTTATGTAGATGTTAAAACAG
GTAATGCTGTTCCTAAAGCTGTCGCTGTTGCTGCTTCTATTGCTTTAGAAAATGATAAGC
GCACGGATCAAGCTGTTATTCAAAAAACTAAAATTAGTCGTCGATTAGCAGCACAAGCTC
AATATTCTACTGTTGATGCTTCACTTCAGGGTGATAGCTTCGCTGCTAAGAAATATCAAG
AGTTTGAATCTAAAGTTCCGGTGTATAAAGCAGAAGGACCAATGAACTCTGGCGTTATTC
AAATTGGTTCAAACTTCAGCAAAGGAGCTATAGGCGGTATGAGAAGCGCTTCTCGTTTTA
AATCTAGTGATTATGAACTCGAAAGCTTCCGAAATCATATTGCATTAGCCCATGCACGTT
TACGTGATCCATCTATCAAGTTACAGAGCGATATAACATATCAAGGTTCTCAAGAATATT
TAAAGAATAAAGAATTCTTTGATTATAAGACTGATAAAATTTTAAGCGATCTTGCTGATA
TTAATATTTCTAATAGCTTTGATGTTATTAAGAAAATTATCAATGATTTGGTTAAAGGTT
CTAAAGCTACGCCAGATGAAAAGACAGCTATTATTCAATTTGTCATGAATGGCATTTATA
AATTGATTAATGAATCTGCTGCTCAGGCATATGAATACGCAAGCACTGAAGTAACTCCAA
AAGGATTAACTCAAGCTGAATCTGATGTAATTGAAGATTATTGTGCAGATTCATATGTTG
AAATGAACTCGTTCCTTTTGGGTAAACCAGATTCTACCCGTGAAGAATATATGGAACGAG
CTATTAAACATATTGAGACGCTTGATTCTGCATTCGCTAAAGGTTCAGTTCTTCCTCCAG
GAACTACACTTTACCGTGGACAAGAAGTTACCTTTAAAACTTTGCGTCATAACATTGAAA
ATAAAATGTTCTATTTCAAGAACTTCGTATCCACATCGCTTAAACCAAATATCTTCGGTG
AGCATGGTAAAAACTATATGGCTCTAGATGATTCCGGCGCAGTATTTTCTGGTGAAGGAG
AAGGTTCCGTTGATGCAGAAGATTTGATGCATATGGGTAGTCATTCTACATATGCTAATG
AAGATGCTGAAACTAGCGTGGGTATGGTAATTAAAGGAGCTGAGCGAATCAAAGTTATCG
TTCCGGGTCATTTATCAGGATTTCCGTCAGAAGCTGAAGTTATTCTACCACGTGGAATTT
TACTGAAGATTAATAAAGTAAGTACTTACTTTATGAAAGAAACTGCTTATAACAAGTATC
TAATCGAAGGTACAATCGTTCCTCCTTCTGAACAATTAGAAGAATCAGTATATGATGGCG
ACCATCTAATGGAAACTGGTGAAGTTCGTCCAATGGCTGGATTTAATCAATTCCTTGTAG
AAGAATCAAAAGAAGAGGAAAGCGAAGTTTCTCAAATCTTAGCTTCTTTGGTTAACATCA
ACGGAATGTCTAAAAAGTTCAAAATGTAGTTTACAAGTCCCTCGTGTTGTGTTATAGTAG
TCTTACTGACATAACATGAGGAACACAAAATGAAATCTTCTTTACGCTTTTTAGGTCAAG
AACTTGTAGTTGAAGGCGTTATTCCTGCTGATAACGCTTTTAATGAAGCAGTTTATGATG
AATTTATCAAAATTTTTGGAACAGATAAAAAGTTCGGAATTTTTCCTTCTGAAAATTTTT
CAAAGCCAGAACAGACTGAAAGTATTTTCCAAGGTGTAGTAACAGGTAAATTTGAGTCAG
AAGCTCCGGTAAAAATTGAGGTTTATATTGAAGAAACCTCTGTTGCTTCAGTTGCTGCTT
TTATTTCATTCCGTAAATAAAATATGGGGACCTTTCGGTCCCCATTGTTATATTGCTCCT
AATATTTTACTTTGCGAATTGACAATTCCTGTCATAGTATTAATATTTGAAATGCTTCCT
GCAGTTCCCCCTAATCTACTAAGTCGTGAAAGCGAATTAGATAGTCCAGTAACACCTCCA
CTATTTCCGAGAACGCTTTGAATACCATTTATAGTAGCAGATTCAAGCCATTCAATGGCA
GCTTGTCTATCAACTGCTCCAGCCTGCATCACTCTATACGCAAAAGTAACATCAAATGTA
GTTATTTGGTTATCTCCATCATATGATAACTCAGGAGCGCTTACGGACACTGGAATGCAT
CCAGTGAACATCACCGCAGTATGTGGTAATCCATTGCGAGAATGAAGATTAACCTGAATA
TCCGCCTCGACATCTTGCGGCAAAGCACGCAATCCGGTTACTGGGTCTTGAACAGCGTTA
ACCCAGTCTTGCATTGCACGATAGTTACAAGCTTCTGAATCCATTCTGAATGAAATAACC
AAAGGGTCTAATTCTCTCCCAGTTATACGAATATTAGGAGAATTATAGTTCCAGTCAGTT
TCATAGGATAATCTATTCTCTGGCATTTTTACAGAGTATATCATCAATCCAGATGAGTTA
TATGCCACGTTAAAGAAGTCAATTAAATATGTACCAACTGTAAATGAGCCTAATAAACTT
TGAACTGTACGTTGACTCATGGCACCAATAAGATATTTACTAACCCCTGATTTTCTTATC
AGTTTTTGTGTGCCAGCAGTAATTAGCGTGGTAATTCCCTGATTAATATCACCTTGAGAC
AATCCTAACCAGTCTGAATTTAGACCCAAGTTATTATAAGAAAAGTTGCTAATTGAACTT
ATCAACGAAGAGCTTTTAGTTGATGGAGTTGTCGCAAAAACGCAGCTAAACATATTATTA
CGTTGAAAATCTGCGTTTATTGCTTGATTATTAAATTCCTCTAAAGAATACATTAGAAAG
TCCCCGTATATAAAGAAGCACGGTTTAACGTGATAATCTCTCTCATAGTAATCTCGAGTG
TAAAAGAACTTGGAAGGTTAGGAGCAATAGCTAATCCGTTAAAATTACCATTCGGAGTTT
TATCAAATCTAATACTTTGAATTTGACACGGTCCAAACACTTCTGTTTTTCCGTCAAATT
TAGAAGTTGCGCCAAAGTTTTTAACCATCCAAATTGTCGGGTTTGAAACTACAAGAACGT
TAGTTAAACTCGATGTCATTTTCTCAAATAACGTCTTATTTTTAACTGCATCTTCTGGAG
TTAATGGCTCAATAAAAGTAGAGCGATACCACTCATCTAGATATCCTTTTATTTCAGCAG
CATATTGAGATTTACCCGTTTCACCATAAGAAAAATAGTTAAAATATTGATAGATATTAA
TAATAGCCATTAAATCTTCTGTGGAACGCGGAGTCAAATCCCAAGTGAACACTTTAGTTC
TATTCTCAGCACCACCATACATACTTCTGGCTATCGTATAAATCTGTTCATTATTATCAG
CCATTATACCTTGTGTTATACTTTCCAGTGCTCCAAATACTGCAGTTGAAGCCATATTGC
TTAACACGCCAGTAGCAGTACCTCCACCTTTTGTAATAAGACTATCTTGAACATCGTTAA
ATCTATGTGATGATGTATCAACATCGGATTTAGATCTCGGTAAAAGAATATTTGCAACAG
GAACTTTACTTATTGTTCCTGAATTATTATCTGATATTAATCCATTTGATAGTTTTGATA
CTGTACTACTAATAGTGTTTCTGGCTGTACGTAAAATACTAGAAGATGAAGAAGAGTAGT
TAGATCTCATCGTTCTGAGACTTCCAGAATCCCTAGATGACATATTGTATGCAGTAAATA
ATAATCCATTCTTATATAGATCTGTTACCTGGAAGTCCCCTGTAGTGTCATTCCCACTAG
CACGCCCAGTTGGAAACTGGGCTGTGTATGTTTTAGTTCCTACTTCTGATTTAGTACTCT
GTCCGGCTGAAATTTTCTCACCGGACTTTTTAATTAAATCAGCAGTTATTTCTTTAACAA
TTGCCATATTATTCCTTAATTAACTCCCGTCGCACCAAATACACCAGGAGCAGTTGTGCT
TGTGACAGGTGTCATATTATGAACGACAGTATTTTTCTTAATAACATTATTAGTATTATT
GATTGAAGGAGATGCTTGTTGAACAGGAGCTTGCTGTGCTTTGTTCTTTTCTATTACCTG
GACTTGTTTTGCTTCTGGCGATTTAGCAGAAGTTTCAGGTTTGGCCTCAGGTTGATTTTT
CTTAAGCTCTTGATAAGTAGCATCAATTTTAGCAAATCTAGAAGCAAGCTCCTTTTTAAC
TGCAGGTGAATTATTTAAATCCGGGTCATTCATCCGTTTTTTAAGGTCTTCATGAGCGGC
TTCAATTGATTTAACTGTTGAGTCTTTACTCATATCAGCTGAATCAGCATATTTTTCAAA
ACGAATCATCGCGGCACGGGCTTCATTAGCCTTCATTAAAGCGTTTTTTCTTTCTTCTGG
TGAAAGTTGCTTTAATTTTTCTTCTTCTGCTGCGCGTTCTTCATCAGTTGTCAATGCTTC
TTTATTATCAACACCACGAATCCAGTTAGATGCACGGGTTTTCCAATTAGCAATTTTATC
TAATCCTTTTGCTATTGGACCAAGATCGTCATTCATTCGTTTATCTTGATAATTTGCTAC
TTTTTCTTGGTCTTCTTTATTGAGAGATGCTCCAGTAGAATTTTGGAAATTTTCTAATGC
TCTTCCTTCTACTTCATCAGCGGTATCCTTCATACCAGGAATAACTCGAAGAATTGCTGC
TGATAATTTAGCCATTCCAAGTTGAATAAGTTCTCCTAAATTATAAAGAACACTTCCAAG
TCCTTCCACAATAGCTACTGTCAATCCACCCCAGTCTCCAGCTTCCCAGAACTTTTTAAT
TTCATCAATAGATTCAAAGATGCTCTGTAATAAAGGACCCCAAGTTCCGGTTTCGCTTGA
AAAAGTTTTAAAATCAGTGCTAAACAAATCCCAGGCTTTTGAAAATTTATCTGACCAATA
TTTAAAATGAACCATCAGTAGGTCTATTCCAATAACAACAGCCATTATTAATGCAACCAT
TTTAGCAGCTTCAATAGCAGCACTGACAGTATACTTAAATAGCATGCTTGATATTTTATC
AGTAATTGAAATAGATTTCTTAAATCCGAAATCAACTGTCTTTGTTAATTTATCTAAAGC
ATTAGATATTTTTAAGTTAAATGCGTCTCTTTTTTGCTTCTCTTCTGGAGACTCTTGTTT
TGGTTCAATTGGCTGAGGAGTAGGGAAAAAATCAGCATCAGGATCATTATTAACTGCTTC
AGGAGCCGGTAATAAAGGACCCACAGATTCAGCTGTATCATCCTCGACGACTTTAACAGG
AATAGCATTTTCGACTACTGCTAAACTCGTTCCAGTTTGCTGAATTCCAGCTGTCTGAAT
TTTTTGTTCCAGTAAACTTGTTAATTTATCTAATTTGCTTCCGAGCGATTCACCGATTTC
TTTATTAATATTGTTTCCAATTTCAACAGTTTCAGCAATTAACTCAGAACCGGCAGTAGT
ATCACTTACTGCGCTTTCTACATTGTCAATTGCTCCAATTATTTCATTCGATTTTTCTTC
GACAGTTTGAGCAATTAATTCAGAAGCAGCTTGAGCATCATCCAATTTCGTAGATATATC
GTTAAGTCCAGATAAAGTATTGGAAGCGGATTTAGCCGCTTCCTGAACTGGTTTATTATC
TGAAATAACTTTTCTACGCATCGTTTGCATTTCTTGTGGCTTTTTCATTCAAATAATCCA
ATAATATTGCCAATTCCAGTTATTGAACCATTAGGGCCAGGAATTGCTAAAGTTGTAGAA
ATATCATTTGCCCATTTTAATACAAATGCTGGCATCTCAAGAAAATTAATTTCTTTAACT
TCATCATTGACCTTAAGCAAGCATTTGGATAACATATCGCTTACAGTTAAAAATTGTTCA
AATTTTCCAGGAGGTCTAAAATAAAATGTATTTCCTTGGTATTGAAATTCCAATCTTTGG
CATACATAAACGTCATTAATATCATAAGTATAACCATCTATTTCTTTACGAGATTTAATC
TTTCCATTAAATTCTAGCAAATGAATAGAAACGAAATCAACTTCTGCCGGTGATAAATTT
GGACAAATAGAATCAATAAGAAGCTTTAAATTTTCATCAGGACCTTTAACATCTTTTAAA
ATGTTATAATGTTTAAGACCCATCTTAGGAATAGAAACTTCTTTATTACTTATCGGAAGA
ACTACTTTCTTCAGTGGTAGTATCAGTTTTAAATTCATTTTTAACCTTAACTGGGTCGAT
TGTTTCCAGTTTCGTTGCATTAGTGAACATATAAAGATGAGTTACGGAATTATTATTTGA
TAATTCGTGAATAACTTCATCAACGTAAAATTCTGTTTTAAATTGGTTTTTACTATCATT
AAAAATAATTTTAACGCCAGGAGTCAAGTTAAAATTACCGACAGTAGAACATTTAGCGTA
ACCATCATACTGCGCCATAGTCTGAAGACGAATAGCTTCTTCATAGCCATTCCTATAAGT
CATTTCAGAATAAGCACCTGATCTGGACACTACAATAGAGTTTTCACCCTTTCCTGTAGT
AATCATTGGCAATGAAGAATCCAAAAACGAATGCGCATAGATAGTAGCATTTTTCATTGG
ATCGCGTTTGTGAGGATTCGATTTAGTCAACCAAACGAAATCATATGCTAATGGATATTT
TAATTCTTGGACAAATTGACCTATTAAAGTTGGCTCACCGACAATCATTGGATATGGTTC
TTGATTTATCATCATATCATAGTCCATCATGTTAACTCCCATGATGTCTTGCCATACAAA
TACGAACTTATCGCTTCCTACCGCTAGAGCAACTTCTCTTACATATGACAAATAGTTTTC
AAATGTGCTAGTCCATGGAATATCAGGAACATAAGCATTAATAGCATTTATCGCTGGAGT
TAATAATGTACGATCTTGATAAATTACGCCAAGCATTTCCTTTATAGATTCACCGGCATC
AGGGAAAAATGGTCTACCAAATTTAAGATTTTCTATAGAATGAATAGTTCCTAATTCAAT
AGCAATGATGTTATCGCCTTTTGAATCTACTGACACGGAAAAATGCTTGCACCCATAAAT
TCGGGTTTTAACATTATTAATATCGTTTGCATTAGCTACAGAAATCTGAATTATTTCATT
TCCATCCATTTTTGTATGAATGTTTTTAGAATCATAAAATTGTAGCATTCCTTCATTTCG
ACCATAAAGAGAGTCACGCATAGTTAATGTGGTAATAGTAGCAGCTAATTCAACAAATCT
ATTATTACTCCAAGCGTCATAACTCTCAAATAATTTAACGCTGAGATTTGGATATCCAGG
ACGTTGTAACATACTCATTGATGTTTATCCTTCTCAATCAGTTTTAATACGAATCCGCGC
TCGGCAGGAATCATTTTCATTATTGAATTTAAGCTATAATTACTTTTTACAAGCGTGTGA
TTAATTTGATAAAAAGTAAATATCTCATCTGGATTAACTAATAGCTTAAACACATCTACT
ATATCAGTGTATTTTTTAATGTACTTATCACAACACGACATGTGCAATGTTAAATTAATA
GGATTCATTGCATCGAGAATTTTTTCTAATGTTTCTATCTCGATGGCGTCAACAAGTTCT
ATTTGACTTGATTCACTAATTTCCTTCCAATCATACCACATTTCATCGACTTGAACAGAA
TGAATATTTTCAGTAATCATCTTTGCTTTATTTTCATAAAACTCAGAAGGAAAATTTAAT
TTAATTTTAACATTAGCTACATCAAAAATAGGTTCCTTTAATTCTTTTTGATATATTTCA
AATGGAACTGTCTTTTCTTTTTTACATTTTGGACATACAAATGTGACTGGTACTTTAGTT
TTACCTATTGACCCTACAAATACCTGCAAAAATATAAATGGTTGCCAAGTCTTTGGATAG
TCTCCAAAATAATCAGCAATTAAATCAGCAATTACTTCTTTTTGTTCTTGTGGTGACCGA
TGTTCTATATCGTTTCGAACTAACAAAAAATCTCGATAATCTTCTACCGTAAATGGTTTA
AAACGATGAACACCATCTGGTAATTTACAACGAATAATGTTTGCCATAGATGCTCCTTTT
ATTCTATTTATAAATATGATAAATAAAGGAGCTAAATATGTATGAATACAAATTTGACGT
GAGAGTTGGTTCTAAAATAATCAACTGTCGCGCATTTACTCTTAAAGAATATCTAGAACT
TATTACTGCTAAAAAGAATGGTTCAGTAGAAGAGATTGTTAAAAAGCTAATCAAAGACTG
TACAAATGCAAAAGATTTAAACCGCCAAGAATCAGAACTATTACTGATTCATTTATGGGC
GCATTCTCTTGGAGAAGTTAATCACGAAAACTCCTGGAAGTGCACCTGTGGAACTGAAAT
ACCAACCCATATAAATCTATTACATACACAAATAGATGCACCAGAAGACCTCTGGTATAC
ACTGGGTGACATTAAAATTAAATTCCATTACCCTAAAATTTTTGATGATAAAAATATAGC
CCACATGATAGTATCATGTATAGAAACGATTCATGCTAACGGTGAAAGCATTCCAGTTGA
AGACTTAAATGAAAAAGAATTGGAAGATTTATATTCTATCATCACAGAGTCAGATATTGT
AGCTATAAAAGATATGCTTTTAAAGCCTACTGTTTATTTGGCTGTTCCAATTAAGTGTCC
AGAGTGTGGAAAAACCCACGCTCATGTAATAAGAGGACTCAAAGAATTCTTTGAGCTATT
GTAATGGCAAATATTAATAAGCTTTATTCTGATATTGACCCAGAGATGAAAATGGATTGG
AACAAAGACGTTTCAAGATCACTTGGATTAAGGTCAATTAAAAATAGTCTTTTAGGAATT
ATTACAACAAGAAAAGGTTCAAGACCGTTTGACCCTGAATTTGGATGCGATTTATCTGAC
CAACTTTTTGAGAATATGACTCCTCTTACTGCTGACACGGTTGAGCGTAATATCGAAAGC
GCAGTAAGAAACTATGAGCCACGTATTGATAAATTAGCAGTTAATGTAATACCGGTTTAT
GATGATTATACTTTGATAGTAGAAATACGCTTTTCAGTCATCGATAACCCTGATGATATT
GAGCAGATAAAACTACAGCTGGCTTCCAGTAATAGAGTATAATGCTTCACGTATAAACGT
GGTATAATGAATCTAAGTCCATCCAAAATTGAATAGAGAACAATATGAGATTAGAAGATC
TTCAAGAAGAATTGAAGAAAGATGTGTTTATAGATTCGACTAAATTACAGTATGAAGCAG
CTAATAATGTGATGTTATATAGTAAATGGCTTAATAAGCATTCAAGTATTAAAAAGGAAA
TGCTTAGAATTGATGCACAGAAAAAAGTTGCTCTTAAAGCTAAATTAGACTACTACTCGG
GACGAGGAGATGGTGATGAATTTAGTATGGATCGTTACGAGAAATCAGAAATGAAGACAG
TTCTATCAGCTGATAAGGATGTTTTAAAGGTTGATACCTCGTTACAGTATTGGGGGATTT
TATTGGATTTCTGTAGCGGAGCTCTTGATGCTATCAAATCACGCGGATTTGCTATTAAGC
ATATTCAAGACATGCGAGCATTTGAGGCTGGAAAATAATGAGATATAGCATTGATGATGC
TTTTAATTATGAAGAAGAATTTGAAACGGAAATTCAATTCTTAATGAAAAAGCATAATCT
TAAGCGTCAGGATATTCGTATCCTGGCCGACCACCCGTGTGGTGAAGATGTCCTTTATAT
TAAAGGAAAATTTGCCGGATATCTTGATGAATATTTTTATTCTAAAGATATGGGCATTGA
CATGCATATGAGAGTTGTATAAATAGATATATAATTCAGAGGAGACAATCATGTCAGATA
AGATTTGTGTTGTCTGTAAAACTCCAATCGATTCTGCATTGGTTGTTGAAACAGACAAAG
GTCCTGTACATCCTGGGCCTTGCTATAATTACATTAAAGAACTACCAGTTTCAGAAAGTT
CGGAAGAACAATTAAATGAAACACAACTTTTGCTATAGTGTGACCTTTAGTCTATAGTTT
TGGCCCTTCCTTTTTGGTTGGGCCTTTTTTAATTTAAAAGCTTTCTTCTACATCATCGTC
TGAATCTTCTAATTCAGCTCTTTTTCCTGCCAAAGCATCTCTCACAGAGATGTCATCAGT
ATCTTTTAATTCAGTTTCTTTAACTCTTTTCTTATAATAAGCTTCAAGTTCTTCTAGACC
TTCTAATGTTTGGCAAGAGGCAATTTTACCCATAAATTCATCAATAGAAGCTTCATAAAG
AAATTGTTTAAATTCTAGTAACATCTTTTTCTCCAAAGGGCCGAAGCCCTTATAAATTAA
CTGTTTTCATTACGTAATTAAATTTTTCATCTGCGTAGCGCTGAATACGATCAATGCCGT
GTTTTAAAAGATAGTTCAAATGAACATATTTCTTTTTCGTATTAGCAGATTTTGGCTTAA
CACCACAATCATCTATGAGGTCCCAGACTGTTGCTATTGTCTTAGAACCATGCTTACGTA
ATACACGACCGATTGTTTGTAATACAATGATTTTTGATTTAACACCGTGCGCTAAAACAA
CGTGATGCAGATTTTTAACTGAAATACCAGTAGAAAATACACCATAACTAGCTACTATAA
TTATTCCTTTACCATTTTCAGCTAAGGTTTTCATTATATTGCGGGTTTCGGTATCAACTT
CCCCTGATACGTAATAAACTTTATCGTATTCATTTTTAATTAAATCGAAAATAGCTTTAC
CATGTGATACATGTTTAAACATGACAAAAGCGTTTTCATCTTTTTGCGCAAGCTTAATAG
CTAATTTAGCGATCCATTTATTTCTTTTACTAAGCCCCGTAATAATTTTTATTTCTTCTT
GATAAGTTTTTCCCTTTAATTTAGTAGTGAACTCATCGGGATAGCGAAGAAAAATACTAT
TAATTTTTAGCTCAGTTACTTGTCCATCTTCCATTAACTTAGAAGTCGTTACTGGCTTAA
ATATTTCACCAAACATTCCAACATACTGCATGATATTGGCTTTGCCATCACGTAATGAAC
CAGATAGACCAAATTTGAACATGCAGTTATTTAAACCTGATATGATAGATGAAATACTTT
TTCCTGTAGCAAGATGACATTCATCATTCATCATCATTCCAAACTGTGAGAACCATTCTT
TTGGTTGTTTAACTACAGTTTGCCATGTACCAACAACGACTGGTGCATCATTTTTATATT
TATCATCTTTTGATGCTCCGCCACCAATTTTCTTTATCATTGCATGACTGAATAAACGAT
AGTCAACGAAGTCATCAGCCATCTGAGTTGTTAGAGCAGTTGTTGGAACAATGATAAGAA
TTTTACCTTCGTAATTTTCCAAATAATACCGAGCGAGCAGAGCCTGAATTAAAGATTTAC
CAGCGGATGTTGGAAGATTAAGAATTCTACGACGATTAACTAATCCTTCGAACACTGCAT
CTTTTTGATACCAGTGTGGTTCAATTCTTTTATTTCCTGAATAGATTTCTAATTTAGAAA
GCCATTCATCAAAATCTTTTCTTGATAATTCTTCTTTTTCGTTAATTTGTGGGTCAATCC
AGGCTTTATAGCCAAAGTTATCACAGAACTTTTTAATTTGCCCGACTAAGCCGAATGGAA
GAAGACGATTATAATCTAAAAGACGGATTCGTCCATCCCAGTGGCCATATTTGTATTTCG
GATTAAAACGATACCCATCAGCTTCGAAGCTAAAGAAATCACGGAGTTCATGAAATGTAC
TTTCTTCACAATCAATTCTCACGTGACTAAAATCATAAAAATGTACTTTAATGTCAGTCA
TGTCTAAATACCATGTAATAAATATATCTATATTTATACTGAGGAAATATTATGATAGAT
AAAGATTATATTGCAGAGTTAAAGGCTCTTGATGATAATAAAGAAGCTAAAGCTAAATTA
GCTGAATATGCTGAGCAATTTGGTATAAAGGTCAAAAAGAATAAATCTTTTGATAATATC
GTTGTTGATATTGAAGAAGCCCTCCAGAAGCTCGCTAGTGAACCTATGCCAGAGACTGAT
GGGTTATCTATTAAAGACTTAATTGATGCTGCTGATGCTGCAGAGGGATTAAAATATGAC
GATGAAGAAGTTAATCCAGAAGCAGCACTTCTGATTGATTCTCCAGTTAAATCTGATATT
AAAATTGAAGTGGTAGAAACGGATAAAATTCCTGAAAATACTGATGTTTTGATTGAAGAC
ACTCCTTTTGTTGAAGAAAAGTTTGAACAAGCTGTAGATAAGATTATTGAATCTGAAAAG
CCGTCTGTATTTACTCTTCCGGAAAACTTTAGCCCGAATCTTCAGCTGATTGGAAAAAAT
CCAGGATTCTGCACTGTTCCTTGGTGGATTTACCAATGGATTGCTGAAACTCCAGATTGG
AAATCTCGCCCAACCAGTTTTGAACATGCGTCTGCGCATCAAACTTTGTTTAGCTTAATT
TACTACATTAATCGTGACGGATCAGTTCTAATTCGTGAAACACGCAATTCTTCTTTCGTA
ACATTAAAATAAGGATAACTTATGACTTTTACAGTTGATATAACTCCTAAAACCCCAACA
GGAGTTATTGATGAAATCAAGCAGTTTACTGCTACACCCAGTGGTCAAACTGAAGGTGGA
ACTATTACCTATGCTTGGAGTGTAGATAATGTTCCACAGAATGGAGCTGAAGCAACTTTT
AGTTATGTACTAAAAGGACCTGCCGGTCAAAAGACTATTAAAGTAGTTGCAACAAATACA
GTTCCAGAATCTGAATCTGAACCTGAACCTGAAACAGCAGAAGCTACGACAACTATCACA
GTTCAAAATAAGACACAGACTACTACAATAACAGTAACTCCTGATAGTCCTTCGGAAGGA
GTAATCGGAACAGCTGTTCAATTTACCGCTGCCTTAGCTTCTCAACCTGATGGAGCGTCT
GCTACGTATCAATGGCACGTCGACGGTTCTCAAATTGGTGGAGAAACTAACTCTACATTT
AACTATACTCCTGCCACAAGCGGAGTTAAAAAAATTAAGTGTGTAGCTCAAGTAACTGCT
GAAAATTACAATGAAAAGGAAGTTACTTCCAATGAAGTATCATTAACGGTTAATAAGAAG
ACAATGAATCCACAGGTTACATTGACTCCTCCTTCTATTAACGTTCAGCAAGATGCTTCG
GCTACATTTACTGCTAATGTCACTGATGCTCCAGAAGAAGCGCAAATTACTTATTCATGG
AAGAAAGATTCTTCTCCTGTAGAAGGGTCAACTAATGTATACACCGTTGATACCTCATCT
ATTGGAAGTCAAACTATTGAAGTTACTGCTGTCGTTACAGCAACCGACTATGATAGTAAA
ACAGTTAAAACAACAGGTCAAGTTCAGGTAACTGATAAAGTTGCTCCGGAACCAGAAGGT
GAATTGCCTTATGTTCATCCTCTTCCACACCGTAGCTCAGCTTACATCTGGTGCGGTTGG
TGGGTTATGGATGAAATTCAAAAAATGACTGAAGAAGGTAAAGATTGGAAAACTGAAGAC
CCAGATAGTAAATACTACCTGCATCGTTACACTCTTCAGAAGATGATGAAAGACTATCCA
GAAGTTGATGTCCAAGAATCACGTAATGGATACATCATTCATAAAACTGCTTTAGAAACT
GGTATCATCTATACCTATCCATAATCATAAGGGGCTTCGGCCCCTTTCTTCATTTTGAAA
GCACACAAAACACAATCAGAAAATGATGTATATAATGGCAACAACTCGATAACATGAGAT
TGATTATGAGAACTGAGGTTGTGGTGTTTACTCTTCATGAGTCTGGAAAGTCATTCATTG
AAATTGCTCGTGAATTAAACTTACAGGCAAAAGAAGTTGCTGTATTATGGGCTCGAGCTA
TGACTGCTAAGAATAAATTTGAAACTCGAGAAAAAGTTGTCTATAGAAAAAGACATATCA
ATAAAAAGGTGAAAAATGGAACAGTATGATCTTTATGAAAATGAATCTTTTGCTAATCAA
TTACGCGAAAAAGCATTAAAAAGTAAACAGTTTAAGCTAGAGTGTTTTATTAAAGATTTT
TCAGAACTTGCTAATAAAGCAGCTGAACAAGGTAAAACATATTTTAGTTATTATTGTACT
GCTCGCGATAAATTGATTACTGAAGAAATTGGTGATTGGCTGAGAAAAGAAGGATTCAGC
TTTAAAGTTAATAGTGATCAGCGTGATGGTGATTGGTTAGAAATTACATTTTGAGGATTA
ATTATGTTTAAAAAGTATAGCAGTCTTGAAAATCATTATAACTCTAAATTTATTGAAAAA
CTTTATAGCTTGGGATTGACTGGTGGGGAGTGGGTAGCTCGTGAAAAGATTCATGGTACA
AATTTCTCATTGATTATTGAGCGTGATAAAGTAACTTGCGCTAAACGTACTGGCCCTATT
CTTCCAGCAGAAGATTTTTATGGCTATGAAATAGTACTCAAAAAGTATGATAAAGCTATT
AAAGGCGTTCAAGAAGTCATGGACAGTATTTCAACTTCAGTGCCGGTGACATATCAAGTC
TTTGGTGAATTCGCTGGTGGTGGAATTCAGAAAGGTGTTGACTACGGTGAAAAAGATTTC
TATGTATTCGATATCATCATAAACACGGAAAGCGGTGATACTTATTACATGAGTGATTAC
GAAATGCAAGATTTCTGTAATACGTTTGGTTTTAAAATGGCACCAATGCTTGGACGTGGA
ACATTTGATGCTCTTATCATGATTCCAAACGACCTTGATTCCGTCTTAGCCGCTTATAAC
GTTACGGCATCGGAAGACCTTGTCGAAGCAAATAATTGTGTATTTGATGCTAATGTTATT
GGTGATAATACTGCAGAAGGTTATGTTCTGAAGCCTTGTTTCCCTAAATGGCTGCCAAAC
GGTGCTCGTGTAGCGATTAAATGCAAGAACTCTAAATTTAGTGAAAAGAAAAAGTCTGAT
AAGCCTATTAAAGCTAAAGTTGAGCTATCAGAAGCTGATAACAAATTGGTTGGAATTTTA
GCTTGTTACGTTACACTAAACCGCGTAAATAACGTTATTTCTAAAATTGGCGAAATTGGT
CCAAAGGATTTTGGAAAGGTGATGGGGCTAACTGTTCAAGATATTTTGGAAGAAACTTCT
CGTGAAGGTATTACTCTAACTCAAGCAGATAATCCTTCTTTAATTAAAAAGGAATTAGTT
AAAATGGTACAAGATGTACTTCGTCCAGCTTGGATTGAGTTGGTGAGCTAAATAAAAAGG
GACCTTTCGGTCCCTTTGTTTTATTCATCAATAATAATTTTTGGTAATTTAACACCTAAT
AAAACAGACAAATCTGAACGACCCGCCATTTTATCCATGTCTCCACCGTCAATTATTCTT
GCTTCTTTTTCATCTTTTGCTACGGTATAAGGATTTGCTGATAAAGCATATCTAACTAAT
AAACCGATAGACGGTTGTAAGCTTTCTGGATCAACAACAACTTTAAATGCACCTACATGT
TCAGGGTCATCTAAGTCAAGACCTTCTGTATACGGAGCATAGAAAATTGATCCAACAATT
TCTTTTTCACCGATATTTTCTACTACGCCAACGATTACATAATCTAATGGGCTGTTAGTA
TCGCAATAAAGCGGTAAACCATTAGCTAAGAACCCGTAGGCATTTTGTGAAAGATATTTG
TCATCTTCTGGTTTATGTTTTAACCAACCTGATGCAGCAAGAATCGCAGCGGCACGAGCT
GAAGCAACACAGAACGTTGCTGTATAAGTTGATTCTTTTTGGATATGTGAAACCATTTCA
CATACCATTCGATATAATGAACGACCAGCTTCAGGTGCAGATGCATAACTCAAATCGATG
AATCCACTATCAGTAATTCCTGTAACTTTATAGCGTTTTGACACTGTAATCAAAGACTGC
AGAATATCTTTATTGATTTCATCTGCCATTTCAGTTGCAAGCAAATCTTCCAAGAAATTA
GGAGCATCGAATCCATTTGCTTCTAAATCTTGCGCTAATTCAACTGTGATGCCAGTTTTA
AGTTTACGAGATTTAACCGCGGTTTGCCATTTATTAATCTGAAATCTAGCATCCGCAATT
TCGCTATCAGAGCTTTCAAATTTGCTTGTTGACGCTGCGTCAGAAAATAGACGAACCTTT
AAAAGAACAATTGCAATCTGAAGAGCTAACTCTAAGTCGCTTTCTTCAATATCAGCGAAT
GGAGTATCTTCTAATACTTTATAAACGATGTTATTATATTTGAATAAATCGCCTTTATTG
AGAGTTAATTTAGACTCTTCTGTTAATTCTGTGATTTGTTCTCGGTCTACATATCCAGCT
TCGCCAGCGTAAGTAGCACCAGTTTTAAATGTAAATTCATTGTCTGGGTTAAGGTATTTG
ATACCATAAAAAGCAGCAACAGGTTGATTAGTTCTTTGCGTTGCTACAATGTCAGAATAT
ATTAATTTAGTGGTAGCGCGAGTCAAAGCAACGAGATTTGGGCGACCGATTGAGTTGCTA
TTCGTTGTGGTTGATTCGCGCAGAAGTTCGTTGATTTTAGCCATTGCGCTTTCCTTTTGG
TTTATATGATTTATTTATACCATAAAAACAACTAAAGGGACCCGAAGGTCCCTTAAATCG
TCAAAGATTAGATACCTTTAACATATACACGTCTAAAGTAAGCGTTTTTACCAAGGCTAT
TCAGAATAGAAGGCATACCGCTCTGGATGCGAGAAGCCGGAGCCTGAGCAGCGGATTCTG
CAAATGGGTTGATACCGATACCGTAACGAGTTTTGAATCCCATTACCGGTTGGAAGTTCT
TCGGATCGGAACCACGCAGCGGAGTCAGAGCTACATATGGAGCATAGTAAATACCAGCAT
CCATTTCGTTCGGACCTTTATAACCTACAGTGAAATAATCCTGCTTAGCATACTGGTCGA
TATATACACGGTATTTACCACCCAGAACACCAGCAAATACTGACTTGGTAGTATCAGTGT
TAAAGCCGGTAGCCAGACCCTGTGCAGCATAAGAAATGCCGGTATCAACTGAAGCCAGAA
CGTTAACTACGTTACGGGAAGCGATAATGAAGTTACCTTCACCACGACCGGTCTGACGAG
CAATTTCAACTGCTTCTTTGTCAATCTGGAACAACAGAGCTTTAAAGGATTCACCTGCCC
AGCGAGCACCACGAATATCGATTGGGTCCTGGAAGTCAAATACACCAGCTTTAGAACCCG
GAGTCAGGGTCATACCAGATTTACCAACCTGAGCTGAGTAGTTAATCCAATCAACAACTT
CACGGTTGATTTCCAGCATAATTTCTGTAGCCAGAATACCAGACAGTTCAGCATCAGCAT
CCATACCGTGAACAGCGCGGAGGTCCTGTGCTAATTCGATAGAGTAAGCAGCTTTCAGCT
GACGAGATTTAGCTTCGATAACTTGCTTATCGATACGGAAGCCCATTTCATTCCATGGGT
TATCGGTAGAACCATTGAAACCTTCCTGAAGTTCAGCGATAGAAGTAGCCATACCTTCAG
CGATTTCTACCAGTGCACCAGCTTCCATTTGTTTCTTAATTTCAGCATCTAATTTAGCTG
CATCATCGGCACTTGAACTAATTGTTACTTGAGCAGAAGCTTGCAGATATACAGTACCAG
TTTCCTGGAAGAAGTGAGTATAGATATCACCTACTGTGGTTTGTGTGCTAACAGCCAGAG
CTGGGAATTTCTTAGCAGCACCCTGACCAGAGAACATTGCATCTGGACCATACATTGGGT
GGAATGCTTCTTTAGCGCCGGAAGCGATTGGGTCTTTACCATATACTGCGCGCAGTGCGA
ATACCTGGCCAGTCGGGCTGTTCATCGGCTGAACACCACAAATATCGAAAGCAATCAGGT
TAGGAATAGCACGACGTACCATACCCATAACAGCTGGGCCAATCTGAGTTACTGCGCCAG
AAGTCTGACCTGCAGCGATGTTAGTAGCATTGTAATCATGGTCACCACCGATTTCAGCTT
CTGTTAAGAAAGAACCGAATGCCTGAGCAATTTTTTCGTCTTTATATTCCGGAGCTGTCT
GGAAATCTTTTTCCTGGTTTTCAAAGATTTTAGCGATAATCGCTTGTTTGCTATTAGCAA
TTTCCGGTAAACCTTCACCTTCCAGTAATGGCTTCCATTTGTTCAAAAGTTCAGCTTTAG
TTTTGATAGTCATTTGTGTTAACCTTTAAAATTAGAAACGAGATGCGACTTTCGCATATA
CACTTACAATATCTTCTGCACCTTGTGCAGATTTATCTTCTACAGCTTCAGTGACGAAAT
TCAGTCCGGCTGCTTCAGTATCAGGAGTATTTATACTCTCAGTAATAGTGCTTTCATCTT
TATTAGATTTCTTCACCATTTCTACGATGGCACTCAATTTGCTTGAGAATGCATCTGAAT
AATCAATACCTTCGACTAGAGCAGAGACTTTTTCTTTTTGAGACTCAGTCAGATCTTTAG
TACTTTCGCTCAATGCCACTTCACGCTGCACATAATTGATATATGCGTCACGCTTATTGA
GTTCTTCGAACAGACGAGCTGATTCTTCTTTATGTTCTTGCAGTTCTTCTTCCATTTCAG
CTACAACATCAACTGATTCTTCTGGAACAACAACGTTGTGTTCAACGAAGAGCTCTTTCA
ATCCACCAAGCATGGATTCAAACAGTTCGGCTTTGATACCTTTATCTACTGCTAATTTAT
TTTCAGTGAGCCATTCTTTTGCAAGATGGTCAAGGAATTTAGAAGCTTGCTCAGCGATTT
TCTTCTCAGCTTTTTCTTCTGCTTCTTCTTTATTTTTTTCTACTTCTTCTTCTGCTTTTT
CAGCAATTTTAGCGATATGAGATTCAGCTAATTTAACGGCGTGCTGCTTGACGGTAGCTT
CGAATACAGTGCCGAAAGTTTCTTTTGCTTCCGGAGAAATATTAACTGATTCGAAAATAC
TATCAAGAGCAACGGAAGCATCAATTTTCTGCGCTTCGGCAATCAGTTGTTCTTTAAGCA
TTTTGTAGTCCTGTTGTTTAGATAATAATATTTATAACGCTTTTTTCATGGCCTCTGCGA
GAGCCATATAGGCGTCATCGGCACTTGTATCGGCTTCCGCCGTCTGTGATTCGGTAATTT
CCTTAGGAGTTACCCATGCATCTGGAGCACTTGGACCCCATACTGCATCAACACCTACAG
TTAATTTGAATCCTTCGTTTACGATACGATAACCTTTATTTGTGTCAGTCAATGAACCTA
ATCCACGAGAAGAAACTCCTGGAATCCATCCGGCACGAATATTAGCTGCTAATTTATCTC
CAGGACCGTGGTCACCTTCAATAACACGAGCTCGTCCGTATACGTCATTTCCTTTCCACC
ACATATCTTCTATAATGATAGCGGCTTGCATCGGGTCAACATTAGCGCGTGGAGGATGAT
TTAATTCTCCGAGAGCTTGTTTAGTTAAAACTTGCTCATTAATATAGTCTTTTACCGCTT
TTTCTAATATACGTTTTGGATAAAGACGTTTATTTCTATTGACGACTTCCGCTTGCATGA
ATATTCCTTCGATGTATAAACCCGGTTTTAAACCTAAGTCTTTTCCATCATGAGATTCAA
GCATTGGTACGCCATCAATAATTTCGCCAGGTTGACCCCAAGTTTCAATTAGTAATTGGG
GTTCATTCATTAGCTTAATCCTAATGCTTTACGGCGTTTAAGAGCTTTTTTACGCTTACG
CTGAGCACGAGATTGACCTGCTGGATTGGCAATCTTCGTTTTGGTAGCTTTACGAGCAAT
TTGTCTACGTTTTGCTTTAGACAACCCGGTAGTTTGAAATGCATTACGTTCGCGGGTTTT
GCGATCTTTAGTGCGAGTAATTTCACCACGGGCAGAAACATGTTTAACGATAAATTCATT
TAACGGCATATTTTCATTAATAGAAGCTAATGCAACCGCTAAATCAGTTTCATCATCAAG
CATATTCTCGACAATTGTATTTATATCGTCTTTATTTAAAGCAGAAGACAATTCGTCAAA
GCGACCCTGTGCTTCAGGAATAAGTGCTTCGACATTCTCGAGAACTAATTCATGAGTTTC
AGGGATCAGAAGCATTATTCATCATCCTCGTCTTCGTCAGAGTCTTTGTCTTTTTTGTCG
TCTTTATCATCACTATCTTCGTCTTCGTCATCATCCTCGTCATCAGGTTCTTCACCTTCG
ATTAAGAAATTACGAGCGATAGCGATTTTTTCTTCTTTAATTAAATCAGTCGTTCTTGCA
GCCATGGCTTCAGCAAATAATTTACGAGCGGCTACGAGGTCGTTTGATTTAATAGCTTCA
ATTAAACCTTCCATTAAAAATCCTCTTGTTCTTGGTCGGGGTCTTGGAAACGAGCCTCTT
TAGACTCTTCTTCAATTTGCTTGGCTTCTTGTTCTATTTCTTCATCAGTCATCTGCAAAA
TATCTTTCATAGCAGTTCTGTGAGAAATATATTTACCAATAAATGGTTCTGCCATGGTTA
GCATATTAATTCTTCGTTCCAAAATTTCTGCTTCTTTGAGCTCAGCAAAGTAGCTATCCC
GATGAAATTCTATCTTAATATTATTTATTTCATCATTCCACTCATCTTCTGTGATTATAC
CTTTAAGCAAAAGATTTGTTTTAAGTGGATCTAGGAAAACTTCTTCAAACTTGTGCTGTA
ACTCACGAATAAATTTAGCAAACGTTAATTCATCACGTGTAATGCTAGTTCCAGAATCAA
ACATCACACCGCCTTGTTGGTCTTGTGGAATGCGTGAAAGAGGAACACGTAATGCCATGT
AAAGAGCTTGTCTAAACCAACGAATATCTTCCATATTGCCAGTATTATCAGCGCCAGGAA
GAGTATCAACTTCTGTCACAGCTTTACCATCACGGCGCTGCAACCAATAGTCTTCGGTCA
TAGACATATTATGTTGTTGATTTTTTATTTTACCTGTTGATGCATCATATACTACACGGT
TTTTCATCGTGTTCATAACATGTTGCATGTGCTCAGCAGCTTTACGAGCAGGCATATTAC
CTGTGTCTACATACCAAACACGACGGTCAGGAGCACGAGTAATGCGATAAATGACTACAG
CATCTTCTAATAATTTTAATTGGTTAGCAGGTTTAACAGCACGATGTAAATACCCGATGA
TATTTTTGCCACAGCAATCGACTAATCCAGAATGGGCATAAACAACAGCAGCTTTTGGAA
TTTTTATTTTTGTGCCAGCTTCATACATTCTACCATCACATGCATATGACTCATGGGCAG
TATCATATATAAAATATTCTTTGTAACCTTTAACTATTTTTGTGCCAGCTTCAGTTTCTG
TTATAATTTCGCGAACATACTGAACTTGGCGAGGGTCTAATCTACGTAATTCTTTTATGC
CTTCTTTTGGACGTTTTGGATCAATGATTTTATGAAAGAAAATTCTTGAATCAACATACC
AACGTCTAAAATGATCAGAACCTTTTCGTTGAAACGATAGATGATTTAATACATCACTAA
ATTCATCTAACATCATATTTTTAATTTTTGGACTAAATTTAGATTTATCCAAATTTAACG
CTACGACTTCAGTATCATCTTCGTAGACGATAGCATCTGAAACGATTTCTGAAACTGCAT
TATCTACTTCATAGTTATTCATGAGATTACGATATGTATCAATAAGCTCACGAGTAGTTT
TCATTCCTGGTTCATATGAACCAAAAATTGTTTGGAATGCAGCATTATAAGGAGAAGCAG
CTTCATTCGAGCTTACTTCAAATTCTCTTGCTCCATCATCAAGCTTTGGGGCTGTAATGG
AAACAAGATCTTCTTTTTCTTGGTCTTTAAAATTTCGTTCGTCCATTTTAGCCCATGGAG
CAAACAAACTTAATACATTAAATTTCATTGTATTCTCCAAATGGGAATTATAGTTATATT
TATAATGGACTTCTCTGCTTTAAGCAGGATGGGGATTTCTCCCCATTCATTTTATTCCCA
ATAATCGAGAGCAAGAGTTACTTCAAAGGTTTGGATTTCATTGTTTGAATCCCAATCTAA
TTGAAGTTCACCCACGTTAGTAGGCCACAGACCTTTAATTTCAATTTCTTTTGTTACTGT
TTTAGCATCACGAGCATATTGACGAACAATAGCGCTCTTTTTATACTCTGCAGGTTTTCC
ACCAGTAATTTCGTTTCCTTGACCAGCAGCAATGCTTTGCCAATCAACAAACTTCTGGCG
AGCATCATGAGCTTCATCGTTCATTACTGTAACAGTCCAGTCATCGAATGTACGATCGCC
TGCTACGTTAATTTTACGGTTCATAAATCCGACTGGAATTTTTTCTACAATACCAGCTGG
TAAAGCAGTGGCTTTACATTGGAATGTAAAATTTTGTCCAAGATAAGAAATTTCTACTTG
GAATAAGTTAGGTCGAGCAAAATCACCAGATTCAAACGCTCGTGTTACATCATCTACAAA
CATATTAGCCTCTGTAGTATTTATATCCCTATGTTTAACCTAGGGCATATAGAATTAAAG
AATTAAGGATATAGTGTATTTATATGGCCTGCCGAAACAGGCCTTTAGAATGCACCGTAT
TAACCAGCAAGACCAGTTAACTCATCGAAATCTGCACCAGTAGCAGTTGCTACGAAGTTC
AAGGTAATGTAGTTAATGCTTCTAGCCGGTTGAATGTAGAATGTTGCAACAAACTCATTT
CTATCAATTACTGACGGAGTGTTATTTGTTGTATCGCAAACTACACGATATTCATAAATT
CCACCGAGAGCTTTAATTCCCTGTAAGTACTGGGCAGTTTCTGTGCGGAATGATGAACGA
GTAAACGCGTTGTTTAATTCGAACAAACGATATTTTGAACTACGTCCGATGTTCGTTTTC
AACATATTAAACAGACGACGAACGTTAATACGATCAAATGGAGAAGGAACAGAAGTAGCT
GTTTTATCACCATATAATACGTAACCATCACCACCTGTACCAGTCACTGGGTTGATAGCT
TCTTGGTATAAACGGTCGCGCTGAGCTTGGCGAGTTTCAATAGCAAGTTTAATAACGTTA
AGAATCTGGCCGCGATTATAACCAGCTGGAGACATCCAAGTCTGAGATACGTTATCAGTT
CTTGCGCATAAACCGGCAATATCAGCTGCTAATGGAACCCAACGATTCACATCATTATAT
TTGTCATACTGATATTTGTAGTTACCATCAATTGCTGCGTAGGTTGAACTGATATTAAAG
TTATTATCAGTGTATGAACCTGCTGCAGTTCTCCAGTTAACTAAATTATCTACTGCACGA
GTTACAGGAATTCCAACTACAGTTTCACGCGGAGGTGAGCACAATACTAAGCAATCTTGA
CGAGCATCACCAATTGAAACAACATGTTTTTGGACAGTAGATGCTGTTTCAAGAGATTCA
CCGGCACAAGAACCCGCAATAAACAACTGAACGTCAACAGATTCGCGGTCAGCAAAGAAG
TCCCAAGCTTCCATCAAATCTCCTGCTGTTACTTCAGCATTTGATGATAATCCACCAGAC
AGAGTTAAAATTCCAGAGAAGCCTTCTGGCCAGTTTTGCGCAGTTGCGAAAATATATTCT
GAACCACCTTTTGCGAAAAAGTCATCAATATAGATGTTACTATCGTAAATATCTTTTTCA
CCACGCTTAGTTGAAAGAACAATGCTTTGAACAATAGCATCATTGCGACGAACTATAATA
GCGTACTGTGAATCAGTTTGCGGTCCATATCCAAACACTGCTTTGGCAGTAGATGCACGA
GTACCACCACCTGGATAAATTGGGAGTAATGCAGAAGCTCCTTTTGCATAGTCAGCTTTA
GATACGATTTCAATTTCAATTTTATCGCCTAATTCGCCTGGATAAAGAGCTACTACTCCT
GGAATTCCGTATTTTTTAAGATTTGCTTGAAAGTCAACCGCTGTCATAGCAGCTTCAGCA
TTTTCAATTTCAGCTAATAAAATACCAGAATCAGTAATAATTTTTCCAAGAGTTATTACT
GCAGCTAAACCAGAGGAAGATGAAGAAATTTCCGCAGTCCAGTTAGAACCTAATTCCGGG
TATTCACCGACTTCTTTTGCTTTAGCGATAATTTTTGCAGTAGGAATATTAATTTTCTTA
ATTTTTCCATCTGCGTCTACTTCAGTAATTTTACCTTCAGTTTCAATATCATCTGAAACA
TATTTGACCGTGATTTTATCTCCAACCGCATAGTTACTACCTGGGGTAGAAATTGTGTAT
TCAATATTACCAGCAATTGGCGATGAGTTTTTAGCGGTATCTCTATCAACAGCACGAACT
ACTCGTAAGTCATTTCCGTACTGCAAGAAATTCATCGCAGACATAAAATAGTCAGCAGTT
TCAGCGGTTGGTTGACCAAAAGTATTAACTAAATCTACTTCGTTTGTAACCTGTTTAATC
TGAAAAGCAGGACCCCACTGGAATTTACCGGCCAAAGCTGCTGTACCAGTAGAGTTATTA
ACCACGGTGCTTTGAACCGTAGTTTCTTTGAGCTCAATGCCCGGAGATAATAAAGTCATT
TTTAATCCTCTTTAATATGCTTTAATATATTTATACCATTGACATACCATGAGATACTGG
AACATACTCAGCAGAATGAACCGAATCAACAAATATAACTGGAGCGTATTCATCCCCCAT
ATCTTGAAGCTCTTTTGAAAACACTTCAGATGCTAATCGCATGTCATCTTTGTCGGCATA
ATCAATAAATTTTGATTGTGTTGATAACCATCCAAAAATTACTAAAGACATTACTAAATC
GTCATGATAACCTTCTTCAGCCGCCCAAGACACGCCTTTTTCACTAAACGTTCTAAATTC
TTGAATAGTTGCACGGTGATGAATAATAAGCTTATCTTTTTCAATAAGGTCTTTTAATGT
AGAGCATCCGACTGCTTTCGTTCGTTTAGTTTGCTTCATTCCTAAATCAGTATATGAATC
GCAAATAACGCCTTCGTATTCTAAATCCATATAAAGTGATTTAGCAACTGACACACCAGT
ACTATTTAATTCAATATAAACTGGGCATTCATTATATTCTACTAAATAACGCATAACGAT
GTCAGGTAGAATTAAATGAGAAATAGTGTTTGAGTGTAAAACACCAACTTGTTCCCACAC
ATCATCGGTAACATCAATAATATGTAAAGCGTGGTAATCTTGCCCACGACCTTCTGAGCA
GTCTAGAGTTGCAATATATTTTCTATCTGGTTCAGGGCTTTTAAATCGATGAAAACCGTG
ATCATCTGGAGTTACTTCAATGAAATCCATAACAGCTAATTTCATTCCTGAAATTAATGT
ACCGGAAGTCCCTTCAAATGCTGCGGTGTGTTCTTGACGAAATTGAGCTAAAGTAGAACC
ATTAATGGTTTGTATACTCCATTGCCATCCATCGTCAAAAATATCTTCATCATTATAAAG
ACGTTCTTTAACTGAATTCCAAATAGCAGTGTATGGTTCAAATCCTGATTTACCTTCAAC
AGCAGCAGTCCAAATATCATAAAAATGATTTAATCCATTAGGAGTCGTAGTAATAATAAT
TTTTGAACGACGACCAGATGAAATAACTGGTTGAATAGCAAGCCAGGAATCATGGAAGTT
TGGAATAAATGCGCATTCGTCAATATAAATCATTGCGAACGAGTTACCACGAACTGCGTC
TGGAGAGGAAGCATAGGCTCCGATTGAGGAACCATTATCTAGTTCAATTGAACCCTTATT
CCATTCAACTATACCAGGCTGCAAAAAGTCAGGAAGCAGTTCAATTGCTTGCTTAGTACG
GTCTAAAACTTCCGCGGACATTGAGCCTTTATGCGCAAGAATACCTACAGCTTTATCCTT
GTTAAAACATACAAAGTGTGCAAGGAAAATAGCTACTACCGTTGTTTTACCGAGCTGGCG
TGATAGATTACAAACAGTCATACGTTTAGATGACATTATTTTGAGCATATCACGCTGATA
GTCACGTAATTGAACCTTTATGACACCATAGTCGATATGAGTAATGGCGCAGTATGTTTC
TGCAAAATATACAATATCATCTCGGCATTTTTTCCACTCCTCAACCATTTCACGAGTCCA
TTGTGTTTTAATATTAGCTCGTTTCAAGTTAGGAAGACCCATATACCGAGATCTTTTATT
ATTCTTATCTTTATAAGTTTGAAATAATTCAGGCTTATCAGAGTTGTTTGGAATTTTTAC
TATTTTATGTAGACGAAGGTAATCACTGAATTTTTCAGGATACCATTTTCCATCCCACTG
AGATTTTATCCAATGAATTCCATCTTCATCTTTTCTTTCCGCTAAGCTTGGGTGTTTTAT
TAAAATTTTTCCAGCTTCATTTAACGGATGGAAATCATTTAATGCATTAATCGGTTGTTC
CATTTATCACCTTCTCACGAGCTTCTTGAGCCTCGTAAGCATCACCAATTTCGTCCATTA
ATTCTGTTGGTGAACCCATGAATACTGTCGCATTCTGAATATTCATTTGACCTGTAGGAA
CAGCACCTTTAGTGCCAACCTGCTCAGATGTAATGTCTTTCATATCTTTATGAAGCTTCA
GTATTTCTCTGTTCGTCGTAGTCATTTGCCCCATAAGAGTTGCAAATACTTCCATGTGAC
GAGGAGAATCAGCATTCTTTGCTGTCTCAAGAAAAATCTTGGCTGCATCCATTAGCATTT
GTTGCTGAAAATGCATATTTCGACGAACTACTCCATAATCATCTTCTAAGTCAGGAGTGC
GGTTTTGTGGATTGCTTTTAACTTCTACTAATTGCAGAGGTTCATATACTTTAATTTCCT
CCCCGTCAATTCCGGGGAGATCAGAAATATCTAAAAGTTTGTTTATATCAAGACCTTCCA
TAATAACCTCTATGTTCTTGGGCCAGGAGGTTCTGGCGGTGTTGGTCTATTTACATTACT
AGTGAAAGTTTGTTTTACTGTTCCATCCCAGTCTTCTGGGTTAATATCTCGAGGAACAAC
TTCGCTATCGACAGATTCAAAAACACCTTCGCCATCAGGCAAATCTCTTGTATTGGCGTG
AAAATCTGTATAAGTAGTACGAATTAATCCTTCTGCATCATCTACTGGAGGATACATCCA
TCCATTTACTTCAAATGTTAATGACCATTCAATTCTACGACGAGATAAATTATCCCCATC
TATAGCTTCGTCTATAGCAGCAGACATTAATACAATTTTGATATCCCTTTTAAATGGAAT
ATCATTTCCAAACTGCTCGTACATAGTTGTATTAAAATGAGGTTGAAAATATGGAAGAAT
TTGTTCAACTATTTGAAACATATCATCTTCGTAGCGAGTAAAGATACTCAATTCATAAAT
CATTTTAATAGGAGATGGATTATACTGCGATACTACAGAAGTTGCACCTTTTTGCAGTAA
ATTCTGATTTAAAATGTTTGTTTTAAATGGAGCATTATAACTAAAATCAACTAAATGTAA
ATTTATACGAGGTAGAATGGTTTCAACCTTGGCCACATCTTCTTGTGAATTTATCGATGT
CCATTTATTCAATTTCATCATAAAGTGTTCCTTTGACGCATATGTAATAGGAACACGTAT
AAACTTATCACCAGATTCTAACTGACGTTTGATTTGGATATTTGAAAACAAATCGCCCAT
CAAGGTAGCATATCGTCTAAAAGACGAATTATAAAAATAACCAAACATGATTTCTCCTAA
TCTGGGCTTTAATTAGTTTATAATATTTATTAATCCATGAAATCATTATCAAATGGGCTA
GATTCGAAAGATTTGCCTCTATTATTGACAACAACATAAGGTTCAACATATTCTTTAGCT
TCAGAATTAATTTGATCTACTTCAGCATACTGATCAATATTAATATCATGAATACCGTTA
AGATTGCGAACAGGATTTAGTTCTAATTCACTAAATTCTGGAATGTTAATTCCTTCATTT
TTCTGTAGAACTGGATTAATTTCTTCTCCGGAATAAATGAATTTACCTGCCGTAATTTTA
CGAATAGCGTTTTGGCCTAATTGATAAAATGGATCATATGGTTCAACCCAGTTAATTTCA
AATAAGCTGTTATCCATAGGAAAATATATCAAATCGCCTTCTTTCGGTTCTTTTCCATTT
ACTTGGTGTTTAAACAAGTTTGGATTAATGGACAAAGTAACTTCATCCTGTACTTGCATA
CCAAAGTTACCAAAGAACGATTTAGCTCCTTCATATCCTTCAAATGAATTTAAATATGCA
GCAAATTTCCAAGCTTTAGTAAATTTATTTTTTAAGTCTTCGCCGAATACCAAATCAGGG
GAAACATACTCTCTTGGAACATAATAGCATTCTACACCTCGCATTTGAATGCTTTCAGCT
ACTAATACATCAGCTAATATTTGGCTGTTTTTATAATGATTGAAATTTACATAAGGATTT
AATATTTCAGTTTCATTGGTCTGAGAATAACCCGTGCGGTTTTCCAATTTAGCAAAAAGA
TTTTTATCGTAAGTAGCCATATTAACCTACCAAAATTCCAAATGGAGGGTCAAGTAAGTA
TAATTCTTCACGTAATGTTTCTTTTTCTAATCGAGCTTCTTCTATTAAACGCTGCCCATC
GATTGTAACACCGCCAGGAAGCATCATACCTTGGTGGCGTGCTAAAATTTGACCATTCAA
TTCTTTAGCTAAAGCTGTAGCATAGTCTTTCACCCAACGATTATTGTAAGCACCTTGCTT
AACATTTGGGTCTTGACCAACAACACGACCTACTAAATTGTGGTCTGGATTATTATATCG
TTCAGATAATGACCAGCTATCTTGTGGACCGACTGTTCCATATCCTACTGTATTTCCAAC
CATTTTATTAGTATCAATGTATGATTTAGTCCAGCTTTCTACGATAATTAAATCATATTT
TTGGAAGTTTCCCATGACTTTGAGTTGTTCATTTGCTGAATTAAACCAAAAGTCTGGAAT
AGGAGAGAGCATATCTTGCATCATTCCCATATAACTGGTAAGTTGAGTAAAATATCCTAA
ATCAGCTCCAAAGGCATTTGGTCCATAAAATCTATTACAAGACGTTCCCATTCCGCCATT
AATACCAGCCATTCCTAAAAGAAAGTCAGTAAACCACGGATATGTAGCATTTCCATCCAT
AGATGTTATTGACCCAATATTTGTGCGTAAAATGCGAGTTACTGCAAATACGTTGGAACC
TCTTAAATCGAAGACTCCGGTTTTGTACTTTTCTTCGTCATCCCCTACATAAAAAACATG
AAAACCTTTATTGAGTCCATCAAAATGGTATTCACCATATAATTCTAGGGCACGCTGGAT
GCAATCGTAGATTTGATCGGGTGTTAACTCAACATTAATAATCGGAGCCCCTAAACGTCT
TAGAATGACATCTTTGAGTTCCTTTGGATTCTGAGAATTATATCCTGACATTTAAAATCC
TTTGGGGCCTTGCGGCCCCATGTTATGCTGGTGATAAAAAGGTAGAAAGCAATACCCATT
CGCCGTCTTTACGAACGTATGCTTGCCCATCTCTTGGAGCTTCAGGAATATAACCCGCTT
CTTGTAGAGATTGAACGCTGCTCTGTAAAGAGGATATATCGTCTTTAGCTGTATTTACTT
CCTGCGTGACTGCCGCAATATTAGTTTCATTCGTTTTTATAGAATTAGTTAATCCTCGTT
CTTCAACAGTTGATCCGTCAGGATTATTTCCATTTATAAGTGAAGTAAGTTCAATAACTT
GACCTTTAATTCCTGTTCTATTATTTCCTATTTCAACTTGTATATTTTGAACATTATTGT
TTAAAACTGAAACTTCTCCTTCAAGCACTGAAACTTTATTTAATAGAGATCCAGAAGGAG
ACGGTTGTCCTCCGCTAGAGTCAGTTCCAACAATTTGATTTAACCACGAAACATTCGCTC
TTAAACCAGACGAAGTGTTTTCACCAACAATTCCGTTTAAAGACTCAATAGAAGTTGTGT
GATTTTTAATTTTTCCTTTAATACTAGAAGGAATATCATCTGAACCAATAGAAGTTTCAA
TAGATGTTAAGCGTTGTTTAACACCTTCACTCTGATTTAATTCATTATTAATAGCTTCAA
TGCTACTTTTGTTATTATTAATTTCTGTTATTATAGAAACATTTTCTGGGTATCCAATAG
AAGATTTAATTTCTGCTATATCAGAATTTATTAAAGTTTGTTTATCATCTATAGTGTTTA
ATCTATTATAAATATTTGGTCCAAAATCTACTGGTTTATTACCAAGTTCATCGCGTAATT
TACCAACTTCAACCGTCAATGATCCTACGTCAGATTCAGTAAATTTATTTTCTAATTCAC
TTAAACGAATGCCTTGTGAAGATAATAATGTACTATTTGTTATTATTCTATGTTTCATTC
CTGTGCTAGCATTACCAACAACAGGAAGACCGTTAATGTCTTGGCCAGAATATTGCCCTA
GTTCTTGTTTAATCCACAATAAATCATTTCTAATTGTTCTATAAACAGAGTTTTCTTCAT
CATTAAATGGACCTATATCAGCAATAATTTTGTCAACTGTATTATTAGTTCCAGTTAATA
TATCAGTGTGTTCATTAGTAAGTGTCTTTAAATTTGATATGTCATTTTTATTAACACTGA
TCTGCGATAGTGCTTCTATATCTCCTGATACATCTAAAACTCCTTGAATTGTTTTAATAT
CTTTCTGCGATGTTTCAATGGCAGTTTTAAGAATTCCCACATTTTCATCAAGAACCTCGA
CGTTTTTAAACACGGAAACAATTGGTCTATTCATTGATCCATCGTTTCCATACTTAGTGC
TAGCTCCTAGTATTTCTTCACCATTTTTAATCCATGAAATACGTTCCTGACCTTCGTCAG
GAACGCTATCAACAAAAGGTAAATCTTTTAATTCAATCATTTGTAATCCTTAGTAATGAA
CTTTAATAATATAGTTTAATGATATATTCCATGGTCTAGTTTCATAACCAATTAATCCTT
CACGATTAAGTGTACCAAGGGCATCTCTCGGTCCGCCTAATTCAAATCCATCATTAGTGA
AGTATGAAGCATTATCCCAGTCGGAATATTTTCTAGTTCCAAGATATCCTTGATAAACAG
ACGCGCCAAATGGGCCTTCACTTCTGTTATATTCCCCCCAACCACCGGCGTGTTTATGGT
ATGACATTTGTTGTGCTTGAACACCACCAACATGCATTCCGTCACATCCTACGCCAAGTC
TATCCTTTCCATAACCATCTTGTCCTCGTTGATTTAAAATATGACCGCCTGTGCCGGCTC
CTCTGACGAAAAGACCTCGCATATCAGGAACGCCAGGATTATTCCAATCGCCACCAAATC
TTGTTCCAACTACGTTTCTATAATCAGGAAATTGGTCACCTGACACGGTTCCACCATGAC
ACATAATCCAACCTGGAGGTGCTGAATCACCCGCAAACATCATAATAGTTCCAACCGGAA
CTCGTTCGGACGCATATCTTTCAGTGGCAACAGGTTGATCGCCATTTTTCCACATTCCAC
CGCGTGACCAAATTCCATTTGCTGTAAGATGGTCTAAATTTAAAGAACCATTAATAGTTT
GTCCACCACGAGTATTAATTACATCTGCGTTCCATGCTAATGCTCCAGAGCTATCACCTT
CAGGGGCAATACCGGCTTGCGTCGTTAATTTAACTACTCCACGCATAGAACCGGTAGCTC
CTCGACCATTTAGTGTTTCACCTGTTACTGCAACACCACCCAAATTATTATTAATTTCAG
TCTGCGTTCCTAGGCGTATAACACCCTTATATTCATGTGTTGCAACAGAATTCATAAAGG
TATACGGGGAAATTGCATATCCTTCGCGGAGAGTTCCTTGACGAATTTGTGCAACAGTAG
ATAATTGAACTACTCCTCTCACCGATTCTGTTGCAGTGTCTTCTGAAGGAGCTATTTGCG
AAATTAATTTTATTGCAAGTTTTTGGGTTTTTAGCGGAGTCATCGCAGTAGTATCATCAA
CTCCAGCCAAAGCTGCAGGTGTAGATGATATTTTAATAACCCCGTTTGATGACTCAGACG
AATATCTATTTTTGAACACATCGTCAGTGTGGTATTTCAGTTTTTGTGGTGTTATTGATG
AATTATTATCTGAGCCTTTTAATGTTTCTTCATTTGTTGAATAACGCGTTAAACCATATT
TAGTTTCAGTAGCATTTGGATACAATAATCTTGTTGCTAATGTAGCTGGTGTAACGATTT
TAGAATTATTAGTTCCATCTAAAACCTCTTGTTCTGACGCAATCATTGCTATTCCTTTAA
CTTCCATAGTTGCATCAGGAATACCATTTACGCCGATATTACTTATTTTTGATAATGCAG
ACTGTACTGTCGTAACAGTGCCAGGAAAATTCGATCCAGTAGGATCGAATTTAACATATT
TTGATTCATTTGATACGTGCTGATATGTATTGTTACTCATGCTACTCTCTCAAAATAATA
AAATACTGTAGGTTGTGTGTGACTATCTAGCGTAACAGTTTGCGCACCTAATAATTGCCA
AGTTCCATACCCAGGTTTAGAAGGAGAAATTATTTCCTGTTTGAAAGTAATTCCTTTATC
AGAGTATTGTTCTAAGATATGTTCTTGGTTATCTAAATACTTAACTTGTATTTTATTTCC
TATGGTAGGATGGTCTTCAAATGAATCAATTGCAATAAATTTTACAACCATTTCCTGTAG
AGCTATTCTAACGGCACTAGTAAATTCAATTGAAGTCATTCCATTAGTAGCTTTAACTGG
AATACCAAACATGTTAACAATAACTGGGTCACCTGATTTGACTGAAGTATCAGTAACAGT
TCCTTCAAATGACCAATAGTCGGTCTGTTGCACGCCAGTAGGAGATACGCCGCTTATATT
AACTAATACAGCTCCAACTGGTTGCTCTGCCATATTTCTAACGTCATTGATAGCAGATTC
TACATTTGAATCATAAAAACCTTTTGATATTTGTGAAATTGTTACAGCGCCTACTGGCTG
ATTATTCATAACCGAAATATCATTTTTCTTAGTTCTAAAACCAAGAAAATCTGCTAAGCG
GGAAATAACTCCCGCTTTATTATTAAGTAAACTCATTATGCAATCCTTATCCAACGGTAT
ACAGTAATAGAC

[0137] In another aspect, the invention provides an SF37B bacteriophage targeting a Shigella spp. bacteria. In certain embodiments, SF37B binds a molecule of OmpC. In certain embodiments, the SF37B bacteriophage has a genome comprising a nucleic acid sequence comprising SEQ ID NO: 9.

SF37B
(SEQ ID NO: 9)
TAAATCAGAATTTACTGCAAAAAGGTGCAACTTCTGTAGTATCGCAGTATAATCCATCTC
CTATTAAAATGATTTATGAATTGAGTATCTTTACTCGCTACGAAGATGATATGTTTCAAA
TAGTTGAGCAGATTCTTCCATATTTTCAACCTCATTTTAATACAACTATGTACGAGCAGT
TTGGAAATGATATTCCATTTAAAAGGGATATTAAAATTGTACTGATGTCTGCTGCTATAG
ACGAAGCTATAGATGGGGACAATTTATCTCGTCGTAGAATTGAATGGTCATTAACATTTG
AAGTAAATGGATGGATGTATCCTCCAGTAGATGATGCAGAAGGATTAATTCGTACTACTT
ATACAGATTTTCATGCTAATACCAGAGATTTGCCTGATGGCGAAGGCGTTTTTGAATCTG
TTGATAATGAAGTTGTTCCTCGAGATATTGACCCAGAAGACTGGGATGGAACAGTAAAAC
AAACTTTCACTAGTAATGTAAATAGACCAACACCGCCAGAACCTCCTGGCCCAAGAACAT
AGAGGTTATTATGGAAGGTCTTGATATAAACAAACTTTTAGATATTTCTGACCTCCCCGG
AATTGACGGGGAGGAAATTAAAGTATATGAACCTCTGCAATTAGTAGAAGTTAAAAGCAA
TCCACAAAACCGTACTCCAGATTTAGAAGATGATTATGGAGTAGTTCGTCGAAATATGCA
TTTTCAACAACAAATGCTAATGGACGCGGCCAAGATTTTTCTTGAGACAGCAAAGAATGC
TGATTCTCCTCGTCACATGGAAGTATTTGCAACTCTTATGGGGCAAATGACTACGACGAA
CAGAGAAATACTGAAGCTTCATAAAGATATGAAAGATATTACATCTGAGCAGGTTGGCAC
TAAAGGTGCTGTTCCTACCGGTCAAATGAATATTCAGAATGCGACAGTATTCATGGGTTC
ACCGACAGAATTAATGGACGAAATTGGTGATGCTTACGAGGCTCAAGAAGCTCGTGAGAA
GGTGATAAATGGAACAACCGATTAATGCATTAAATGATTTCCATCCATTAAATGAAGCTG
GAAAAATTTTAATAAAACACCCAAGCTTAGCAGAAAGAAAAGATGAAGATGGAATTCATT
GGATAAAATCTCAGTGGGATGGAAAATGGTATCCTGAAAAATTCAGTGATTACCTTCGTC
TACATAAAATAGTAAAAATTCCAAACAACTCTGATAAGCCTGAATTATTTCAAACTTATA
AAGATAAGAATAATAAAAGATCTCGGTATATGGGTCTTCCTAACTTGAAACGAGCTAATA
TTAAAACACAATGGACTCGTGAAATGGTTGAGGAATGGAAAAAATGCCGAGATGATATTG
TTTATTTTGCAGAAACATACTGTGCCATTACTCATATTGACTATGGTGTCATAAAAGTTC
AATTACGTGATTATCAGCGTGATATGCTCAAAATAATGTCATCTAAACGTATGACTGTTT
GTAATCTATCGCGCCAGCTCGGTAAAACAACTGTAGTAGCTATTTTCCTTGCACACTTTG
TATGTTTTAACAAGGATAAAGCTGTAGGTATTCTTGCGCACAAAGGCTCAATGTCTGCGG
AAGTTTTAGACCGTACTAAGCAAGCAATTGAATTGCTTCCTGACTTTTTACAACCAGGAA
TTGTTGAATGGAATAAGGGGTCAATTGAACTAGATAATGGTTCTTCAATTGGCGCTTATG
CTTCCTCTCCTGACGCAGTTCGTGGTAACTCGTTCGCAATGATTTACATTGACGAATGCG
CATTTATTCCAAACTTCCATGATTCCTGGCTTGCTATTCAGCCAGTAATTTCATCTGGTC
GTCGTTCGAAAATTATTATTACTACGACTCCTAATGGATTAAATCATTTTTATGATATTT
GGACTGCAGCCGTTGAAGGTAAATCTGGATTTGAACCATATACTGCTATTTGGAATTCAG
TTAAAGAACGTCTTTATAATGATGAAGATATTTTTGACGATGGATGGCAATGGAGCATAC
AAACCATTAATGGTTCTACTTTAGCTCAATTTCGTCAAGAACACACTGCAGCGTTTGAAG
GGACTTCTGGTACATTAATTTCAGGAATGAAATTAGCTATTATGGATTTCATTGAAGTAA
CTCCAGATGATCATGGTTTTCATCGATTTAAAAGCCCTGAACCAGATAGAAAATATATCG
CAACTCTAGACTGCTCAGAAGGTCGTGGGCAAGATTACCACGCTTTACATATTATTGATG
TTACCGATGATGTGTGGGAGCAGGTTGGTGTTTTACACTCAAACACTATTTCTCATTTAA
TTCTACCTGACATCGTTATGCGTTATTTAGTAGAATACAATGAATGCCCAGTTTATATTG
AATTAAATAGTACTGGTGTGTCAGTTGCGAAATCACTTTATATGGATTTAGAATACGAAG
GTGTTATCTGCGATTCATATACTGATTTAGGAATGAAGCAAACTAAACGAACGAAAGCAG
TAGGATGCTCTACATTAAAAGACCTTATTGAAAAAGATAAGCTTATTATTCATCACCGTG
CAACTATTCAAGAGTTTAGAACGTTTAGTGAAAAAGGCGTGTCTTGGGCGGCTGAAGAAG
GTTATCACGACGATTTAGTAATGTCTTTAGTAATTTTTGGATGGTTATCAACACAATCAA
AATTTATTGATTATGCTGACAAAGATGACATGCGACTAGCATCTGAAGTATTTTCAAAAG
AGCTTCAAGATATGGGTGATGAATACGCTCCAGTCATATTTGTTGATTCGGTTCATTCTG
CTGAGTATGTTCCAGTATCTCAAGGTATGTCAATGGTATAAATATATTAAAGCATATTAA
AGAGGATTAAAAATGACTTTATTATCTCCGGGCATTGAGCTCAAAGAAACTACGGTTCAA
AGCACCGTGGTTAATAACTCTACTGGTACAGCAGCTTTGGCCGGTAAATTCCAGTGGGGT
CCTGCTTTTCAGATTAAACAGGTTACAAATGAAGTAGATTTAGTTAATACTTTTGGTCAA
CCAACCGCTGAAACTGCTGACTATTTTATGTCTGCGATGAATTTCTTGCAGTACGGAAAT
GACTTACGAGTAGTTCGTGCTGTTGATAGAGATACCGCTAAAAACTCATCTCCGATTGCT
GGTAATATTGAATACACAATTTCTACCCCAGGTAGTAACTATGCAGTTGGAGATAAAATC
ACGGTCAAATATGTTTCAGATGATATTGAAACTGAAGGTAAAATTACTGAAGTAGACGCA
GATGGAAAAATTAAGAAAATTAATATTCCTACTGCAAAAATTATCGCTAAAGCTAAAGAA
GTCGGTGAATACCCAACATTAGGTTCTAACTGGACTGCAGAAATTTCTTCGTCTTTCTCT
GGTTTAGCCGCAGTAATAACTCTTGGAAAAATTATTACTGATTCTGGTATTTTATTAGCT
GAAATTGAAAATGCTGAAGCTGCTATGACAGCGGTTGACTTTCAAGCAAATCTCGAAAAA
TACGGAATTCCAGGAGTAGTAGCTCTTTATCCAGGCGAATTAGGCGATAAAATTGAAATT
GAAATCGTATCTAAAGCTGACTATGCAAAAGGAGCTTCTGCATTACTCCCAATTTATCCA
GGTGGTGGTACTCGTGCATCTACTGCTAAAGCAGTGTTTGGATATGGACCACAAACTGAT
TCACAGTACGCTATTATAGTTCGTCGTAATGATGCTATTGTTCAAAGTGTTGTTCTTTCA
ACTAAGCGCGGTGAAAAAGATATTTACGACAGTAACATCTATATCGATGACTTTTTCGCA
AAAGGTGGCTCAGAATATATTTTTGCAACTGCACAAAACTGGCCAGAAGGATTCTCTGGA
ATTTTAACTCTGTCTGGTGGATTATCATCAAATGCTGAAGTAACAGCAGGAGATTTGATG
GAAGCTTGGGACTTCTTTGCTGACCGTGAATCTGTTGACGTTCAACTGTTTATTGCGGGT
TCTTGTGCCGGTGAATCTTTAGAAACAGCATCTACTGTCCAAAAACACGTCGTTTCAATT
GGGGATGCTCGTCAAGATTGCTTAGTATTGTGCTCACCACCACGTGAAACTGTAGTTGGA
ATTCCTGTAACTCGTGCAGTAGATAATTTAGTTAACTGGAGAACTGCGGCAGGTTCATAC
ACTGATAATAACTTTAATATCAGTTCAACCTATGCAGCAATTGATGGTAACTACAAATAT
CAGTATGACAAATATAATGATGTGAATCGTTGGGTTCCATTAGCAGCTGATATTGCTGGT
TTATGCGCAAGAACTGATAACGTATCTCAGACTTGGATGTCTCCAGCTGGTTATAATCGT
GGCCAGATTCTTAACGTTATTAAACTTGCTATTGAAACTCGCCAGGCTCAGCGCGACCGT
TTATACCAAGAAGCTATCAACCCGGTAACTGGTACAGGTGGTGATGGTTACGTATTGTAT
GGTGATAAAACAGCTACTTCTGTTCCTTCTCCGTTTGATCGTATTAACGTTCGTCGTCTG
TTTAATATGTTGAAAACGAATATCGGACGTAGTTCAAAATATCGTTTGTTCGAATTAAAC
AACGCGTTTACTCGTTCATCATTCCGCACGGAAACTTCCCAGTACTTGCAGGGAATTAAA
GCTCTCGGTGGAATTTATGAATATCGTGTAGTTTGCGATACAACAAATAACACTCCGTCA
GTAATTGATAGAAATGAGTTTGTTGCAACATTCTACATCCAACCGGCGCGCAGTATAAAT
TATATTACTTTGAATTTCGTCGCAACTGCTACTGGTGCAGACTTCGATGAGTTAACTGGT
CTTGCAGGTTAATTGATTATGGGGCTTCGGCCCCTATTCTCGAGGAAACAAGTGATTATT
TCTAAGTTTGTTAAAGTGAAAATTGTACCATCAAATTTTAAACATTATCAATCAAAGGGT
TATAAATTAACACCTCTTGGAGCGGTTAAACATGGATTTAGGTATTATGAAATTGATGTT
AAAGTTGAAGACATTAAAGGTAGTACTGCGTATGTAAAATGCCGTTGCGATAAATGTGGA
ATTGAATATAACCAACGCATTGGAAGAAACACTGATATTTGTCGTGATTGCCGTCATAAA
GATAAAATGCGCAATAATTCATACGGTTCCGCGAATAAAGGAAAAACAGTAGAATGTATG
CATGGCGTAAATCATCCAAGATGGAACCCAAATAAATCTGAAATGCGTGAATATATTTCA
TTGGTATATAAAGAAACTCGTAAGCATAAGAAAATTTGGTCAAAATGGCCAAATGCTGAT
AAAATAGGAGTGTGTGGTACAAAAGGTGCTTACCAACTTGATCATAAGGTATCTATCAAA
TACGGTTTTGATAATTTAATTCCTGCTAAAATAATTGGCGGTATTAATAATTTAGAAATA
ATCACTTGGGAATCTAACCGAGAAAAATCAAAAAGAAATAGTGTAGATCTTTGGGATTTA
CTAGAATGATTCTAAAGGCCTGTTTCGGCAGGCCATATAAATACACTATATCCTTAATTC
TTTAATTCTATATGCCCTAGGTTAAACATAGGGATATAAATACTACAGAGGCTAATATGT
TTGTAGATGATGTAACACGAGCGTTTGAATCTGGTGATTTTGCTCGACCTAACTTATTCC
AAGTAGAAATTTCTTATCTTGGACAAAATTTTACGTTCCAATGTAAAGCTACTGCTCTAC
CAGCTGGTATTGTAGAAAAAATTCCAGTCGGATTTATGAACCGTAAAATTAACGTAGCAG
GTGATCGTACATTCGATGACTGGACTGTTACAGTAATGAACGATGAAGCTCATGATGCTC
GCCAGAAGTTTGTTGATTGGCAAAGCATTGCTGCCGGTCAAGGAAACGAAATTACTGGTG
GAAAACCCGCAGAGTATAAAAAGAGCGCTATCGTTCGTCAATATGCTCGTGACGCTAAAA
CAGTAACAAAAGAAATTGAAATTAAAGGTCTGTGGCCTACTAACGTGGGTGAACTTCAAT
TAGATTGGGATTCAAACAATGAAATCCAAACCTTTGAAGTAACTCTTGCTCTCGATTATT
GGGAATAAAATGAATGGGGAGAAATCCCCATCCTGCTTAAAGCAGAGAAGTCCATTATAA
ATATAACTATAATTCCCATTTGGAGAATACAATGAAATTTAATGTATTAAGTTTGTTTGC
TCCATGGGCTAAAATGGACGAACGAAATTTTAAAGACCAAGAAAAAGAAGATCTTGTTTC
CATTACAGCCCCAAAGCTTGATGATGGAGCGAGAGAATTTGAAGTAAGCTCGAATGAAGC
TGCTTCTCCTTATAATGCTGCATTCCAAACAATTTTTGGTTCATATGAACCAGGAATGAA
AACTACTCGTGAGCTTATTGATACATATCGTAATCTCATGAATAACTATGAAGTCGATAA
TGCAGTTTCAGAAATCGTTTCAGATGCTATCGTCTACGAAGATGATACTGAAGTCGTAGC
GTTAAATTTGGATAAATCTAAATTTAGTCCAAAAATTAAAAATATGATGTTAGATGAATT
TAGTGATGTATTAAATCATCTATCGTTTCAACGAAAAGGTTCTGATCATTTTAGACGTTG
GTATGTTGATTCAAGAATTTTCTTTCATAAAATCATTGATCCAAAACGTCCAAAAGAAGG
CATAAAAGAATTACGTAGATTAGACCCTCGCCAAGTTCAGTATGTTCGTGAAATTATAAC
AGAAACTGAAGCTGGCACAAAAATAGTTAAAGGTTACAAAGAATATTTTATATATGATAC
TGCCCATGAGTCATATGCATGTGATGGTAGAATGTATGAAGCTGGCACAAAAATAAAAAT
TCCTAAAGCTGCCGTCGTTTATGCCCATTCTGGATTAGTCGATTGTTGCGGTAAAAATAT
CATCGGGTATTTGCATCGTGCTGTTAAACCTGCTAACCAATTAAAATTACTAGAAGATGC
TGTAGTCATTTATCGTATTACTCGTGCTCCTGATCGTCGTGTTTGGTATGTAGACACAGG
TAATATGCCTGCTCGTAAAGCTGCCGAGCACATGCAACATGTCATGAACACGATGAAAAA
CCGTGTAGTATATGATGCATCAACAGGTAAAATAAAAAATCAACAGCATAATATGTCTAT
GACCGAAGACTATTGGTTGCAGCGCCGCGATGGTAAAGCTGTGACAGAAGTTGATACTCT
TCCTGGTGCTGATAATACCGGTAATATGGAAGATGTTCGTTGGTTTAGACAAGCTCTTTA
CATGGCATTACGTGTTCCTCTTTCACGCATTCCGCAAGACCAACAAGGCGGTGTGATGTT
TGATTCTGGAACTAGCATTACACGTGATGAATTAACGTTTGCTAAATTTATTCGTGAGTT
GCAGCACAAGTTTGAAGAAGTTTTCCTAGATCCGCTTAAAACAAATCTTTTGCTTAAAGG
TATAATTACAGAAGATGAGTGGAATGATGAAATAAATAATATTAAGATAGAATTTCATCG
GGATAGCTACTTTACTGAACTCAAAGAAGCAGAAATTTTGGAACGAAGAATTAATATGCT
AACCATGGCAGAACCATTTATTGGTAAATATATTTCTCACAGAACTGCTATGAAAGATAT
TTTGCAGATGACTGATGAAGAAATAGAACAAGAAGCCAAGCAAATTGAAGAAGAGTCTAA
AGAGGCTCGTTTCCAAGACCCCGACCAAGAACAAGAGGATTTTTAATGGAAGGTTTAATT
GAAGCTATTAAATCAAACGACCTCGTAGCCGCTCGTAAATTATTTGCTGAAGCCATGGCT
GCAAGAACGATTGATTTAATTAAAGAAGAAAAAATCGCTATCGCTCGTAATTTCTTAATC
GAAGGTGAAGAACCTGATGACGAGGATGATGACGAAGACGAAGATAGTGATGATAAAGAC
GACAAAAAAGACAAAGACTCTGATGAAGATGACGAAGACGAGGATGATGAATAATGCTTC
TGATCCCTGAAACTCATGAATTAGTTCTCGAGAATGTCGAAGCACTTATTCCTGAAGCAC
AGGGTCGCTTTGACGAATTGTCTTCTGCTTTAAATAAAGACGATATAAATACAATTGTCG
AGAATATGCTTGATGATGAAACTGATTTAGCGGTTGCATTAGCTTCTATTAATGAAAATA
TGCCGTTAAATGAATTTATCGTTAAACATGTTTCTGCCCGTGGTGAAATTACTCGCACTA
AAGATCGCAAAACCCGCGAACGTAATGCATTTCAAACTACCGGGTTGTCTAAAGCAAAAC
GTAGACAAATTGCTCGTAAAGCTACCAAAACGAAGATTGCCAATCCAGCAGGTCAATCTC
GTGCTCAGCGTAAGCGTAAAAAAGCTCTTAAACGCCGTAAAGCATTAGGATTAAGCTAAT
GAATGAACCCCAATTACTAATTGAAACTTGGGGTCAACCTGGCGAAATTATTGATGGCGT
ACCAATGCTTGAATCTCATGATGGAAAAGACTTAGGTTTAAAACCTGGTTTATACATCGA
AGGAATATTCATGCAAGCGGAAGTCGTCAATAGAAATAAACGTCTTTATCCAAAACGTAT
ATTAGAAAAAGCGGTAAAAGACTATATTAATGAGCAAGTTTTAACTAAACAAGCTCTCGG
AGAATTAAATCATCCTCCACGCGCTAATGTTGACCCGATGCAAGCCGCTATCATTATAGA
AGATATGTGGTGGAAAGGAAATGACGTATACGGACGAGCTCGTGTTATTGAAGGTGACCA
TGGTCCTGGAGATAAATTAGCAGCTAATATTCGTGCCGGATGGATTCCAGGAGTTTCTTC
TCGTGGATTAGGTTCATTGACTGACACAAATAAAGGTTATCGTATCGTAAACGAAGGATT
CAAATTAACTGTAGGTGTTGATGCAGTATGGGGTCCAAGTGCTCCAGATGCATGGGTAAC
TCCTAAGGAAATTACCGAATCACAGACGGCGGAAGCCGATACAAGTGCCGATGACGCCTA
TATGGCTCTCGCAGAGGCCATGAAAAAAGCGTTATAAATATTATTATCTAAACAACAGGA
CTACAAAATGCTTAAAGAACAACTGATTGCCGAAGCGCAGAAAATTGATGCTTCCGTTGC
TCTTGATAGTATTTTCGAATCAGTTAATATTTCTCCGGAAGCAAAAGAAACTTTCGGCAC
TGTATTCGAAGCTACCGTCAAGCAGCACGCCGTTAAATTAGCTGAATCTCATATCGCTAA
AATTGCTGAAAAAGCAGAAGAAGAAGTAGAAAAAAATAAAGAAGAAGCCGAAGAAAAAGC
TGAGAAGAAAATCGCTGAGCAAGCTTCTAAATTCATTGACCATCTTGCGAAAGAATGGCT
CGCTGAAAATAAATTAGCAGTTGATAAAGGCATCAAAGCCGAACTGTTTGAATCCATGCT
TGGTGGATTAAAAGAGCTCTTTGTTGAACACAACGTTGTTGTTCCAGAAGAATCAGTTGA
TGTTGTAGCTGAAATGGAAGAAGAGCTGCAAGAACATAAAGAAGAATCAGCTCGTCTGTT
CGAAGAACTCAATAAGCGTGACGCATATATCAATTATGTGCAGCGTGAAGTGGCATTGAG
CGAAAGTACTAAAGATCTGACTGAGTCTCAAAAAGAAAAAGTCTCTGCTCTGGTCGAAGG
TATGGATTATTCAGATGCATTCTCAAGTAAATTGAGTGCAATCGTAGAAATGGTGAAGAA
ATCTAATAAAGATGAAAGCACTATTACTGAGAGTATAAATACTCCTGATACTGAAGCAGC
CGGACTGAATTTCGTCACTGAAGCTGTAGAAGATAAAGCTGCACAGGGTGCAGAAGATAT
TGTAAGTGTATATGCGAAAGTCGCATCTCGTTTCTAATTTTAAAGGTTAACACAAATGAC
TATCAAAACTAAAGCTGAACTTTTGAACAAATGGAAGCCATTACTGGAAGGTGAAGGTTT
ACCGGAAATTGCTAATAGCAAACAAGCGATTATCGCTAAAATCTTTGAAAACCAGGAAAA
AGATTTCCAGACAGCTCCGGAATATAAAGACGAAAAAATTGCTCAGGCATTTGGTTCTTT
CTTAACAGAAGCTGAAATCGGCGGTGACCATGGTTACAATGCTACTAACATCGCTGCAGG
TCAGACTTCTGGCGCAGTAACCCAGATTGGCCCAGCTGTTATGGGTATGGTACGTCGTGC
TATTCCTAACCTGATTGCTTTCGATATTTGTGGTGTTCAGCCGATGAACAGCCCGACTGG
CCAGGTATTCGCACTGCGCGCAGTATATGGTAAAGACCCAGTGGCTGCCGGTGCTAAAGA
AGCATTCCACCCAATGTATGGTCCAGATGCAATGTTCTCTGGTCAGGGTGCTGCTAAGAA
ATTCCCAGCTCTGGCTGCTAGCACACAAACCGTTGTAGGTGACATCTATTCTCACTTCTT
CCAGGAAACTGGCACTGTATATCTGCAAGCTTCCGCTGTAGTAACAATTGATGCTGGTGC
GACTGATGCTGCTAAATTAGATGCCGAAGTTAAGAAACAAATGGAAGCTGGTGTACTGGT
AGAAATCGCTGAAGGCATGGCTACTTCTATCGCTGAACTTCAGGAAGGTTTCAATGGTTC
TACCGATAACCCATGGAATGAAATGGGCTTCCGTATCGATAAACAAGTTATCGAAGCTAA
ATCTCGCCAGCTGAAAGCTGCTTACTCTATCGAATTAGCACAAGACCTCCGCGCTGTTCA
CGGTATGGATGCTGATGCTGAACTGTCTGGTATTCTGGCTACCGAAATCATGCTAGAAAT
CAACCGTGAAGTTGTTGATTGGATTAACTACTCCGCACAGGTTGGTAAATCTGGTATGAC
CCTGACTCCGGGTTCTAAAGCTGGTGTATTTGACTTCCAGGATCCGATTGATATTCGTGG
TGCTCGCTGGGCGGGTGAATCCTTTAAAGCTCTGTTGTTCCAGATTGACAAAGAAGCAGT
TGAAATTGCTCGTCAGACCGGTCGTGGTGAAGGTAACTTCATTATCGCTTCCCGTAACGT
AGTTAACGTTCTGGCTTCAGTTGATACCGGCATTTCTTATGCTGCACAGGGTCTGGCTAC
CGGCTTTAACACTGATACTACCAAGTCAGTATTTGCTGGTGTTCTGGGTGGTAAATACCG
CGTATATATCGACCAGTATGCTAAACAGGATTATTTCACTGTAGGTTATAAAGGTCCGAA
CGAAATGGATGCTGGTATTTACTACGCTCCATATGTAGCGCTGACTCCGCTGCGTGGTTC
CGATCCGAAGAACTTCCAACCAGTAATGGGATTCAAAACTCGTTACGGTATCGGTATCAA
CCCATTTGCAGAATCCGCTGCTCAGGCTCCGGCTTCTCGCATCCAAAGCGGTATGCCTTC
TATTCTGAATAGCCTTGGTAAAAACGCTTACTTCCGCCGTGTATATGTTAAAGGTATCTA
ATCTTTGACGATTTAAGGGACCTTCGGGTCCCTTTAGTTGTTTTTATGGTATAAATAAAT
CATATAAACCAAAAGGAAAGCGCAATGGCTAAAATCAACGAACTTCTGCGCGAATCAACC
ACAACGAATAGCAACTCAATCGGTCGCCCAAATCTCGTTGCTTTGACTCGCGCTACCACT
AAATTAATATATTCTGACATTGTAGCAACACAAAGAACTAATCAACCTGTTGCTGCTTTT
TATGGTATCAAATACCTTAACCCAGACAATGAATTTACATTTAAAACTGGTGCTACTTAC
GCTGGCGAAGCTGGATACGTAGACCGAGAACAAATCACAGAATTAACAGAAGAGTCTAAA
TTAACTCTCAATAAAGGCGATTTATTCAAATATAATAATATCGTTTATAAAGTATTAGAA
GATACACCATTTGCTGATATTGAAGAAAGCGATTTAGAATTAGCTCTTCAGATTGCAATC
GTTCTTTTAAAGGTTCGTCTATTTTCTGATGCTGCAGTAACAAGCAAATTTGAAAGCTCT
GATAGTGAAATTGCGGATGCTAGATTCCAGATTAATAAATGGCAAACCGCGGTTAAATCT
CGTAAACTTAAAACTGGCATCACAGTTGAATTAGCGCAAGATTTAGAAGCAAATGGATTC
GATGCTCCTAATTTCTTAGAAGATTTGCTTGCAACTGAAATGGCAGATGAAATCAATAAA
GATATTCTGCAGTCTTTGATTACAGTGTCAAAACGCTATAAAGTTACAGGAATTACTGAT
ACCGGATTCATTGATTTGAGTTATGCATCTGCTCCTGAAGCTGGTCGTTCATTATACCGA
ATGGTATGTGAAATGGTTTCGCATATCCAAAAAGAATCAACTTATACAGCAACGTTCTGT
GTAGCTTCTGCTCGTGCCGCCGCGATTCTTGCTGCATCAGGTTGGTTAAAACATAAACCA
GAAGATGATAAATATCTTTCACAAAATGCCTATGGGTTTTTAGCTAATGGTTTACCACTT
TATTGCGATACTAACAGCCCATTAGATTATGTAATCGTTGGCGTAGTAGAAAATATCGGT
GAAAAAGAAATTGTTGGATCAATTTTCTATGCTCCGTATACAGAAGGTCTCGACTTAGAT
GACCCTGAACATGTAGGTGCATTTAAAGTTGTTGTTGATCCAGAAAGCTTGCAACCGTCT
ATCGGTTTATTAGTTAGATATGCTTTATCTGCAAATCCTTACACCGTAGCAAAAGATGAA
AAAGAAGCAAGAGTAATTGATGGTGGAGACATGGATAAAATGGCGGGTCGTTCAGATTTG
TCTGTTTTATTAGGTGTTAAGCTACCAAAAATTATCATTGATGAATAAAACAAAGGGACC
TTTCGGTCCCTTTTTATTTAACTTACCAATTCAATTCAATCCAAGCCGGACGAAGTACAT
CTTGTACCATTTTAACTAATTCCTTTTTAATCAAAGAAGGATTATCCGCTTGAGTTAGAG
TAATACCTTCACGAGAAGTTTCTTCCAAAATATCTTGAACAGTTAGTCCCATCACCTTTC
CAAAATCTTTTGGACCAATTTCGCCAATTTTAGAAATAACGTTATTTACTCGGTTTAGTG
TAACGTAACAAGCTAAAATCCCCACCAATTTGTTATCAGCTTCTGACAGTTCAACTTTAG
CTTTAATAGGCTTATCAGACTTTTTCTTTTCACTAAATTTAGAATTCTTGCATTTGATGG
CTACACGATTGCGATTAGGCAGCCAAGAAGGATAGCAAGGTTTCAATACATATCCTTCAG
CGGTAAATACTTCGCCTTTGGCTTCAGCTTTCCAAACACATTTGTTAGCGTCAATTAAAC
CTGCATTATCTACGGTAAAATTATAAGACGGAACAACAGAATCCAAATCATTTGGAAGTT
TAATAAGATCTTCAAATTTACCACGACCCAAAAGTGGAGCGATTTTAAACCCAAATGAAT
TACAAAACGATTCCATCATGTAATCATCAACATAAGTTACATCACCACTTTCGGTAGTGA
CAATAATGTCAAATACATAAAAATCTTTATCGCCATAATCAACATTCTTCTGAATGCCAG
GTCCAGCGAATTCGCCAAAAACTTGATAAGTCACAACAGCTGAAGTTTCCATAATTTCTT
GGACAGCTTTAATAGAATCTTCGTAATTCTTTAAAATAATTTCATAACCGAAGAAATCTT
CAGCAGGAAGAATCGGTCCAGTACGTTTAGCGCAAGTCACTTTATCACGCTCAATAATCA
ACGAGAAATTTGTGCCGTGAATCTTTTCACGAGCTACCCATTCGCCGCCAGTCAATCCCA
AGCTGTAAAGTTTTTCAATAAATTTAGAGTTGTAATGATTTTCAAGACTGCTATACTTTT
TAAACATAATTAATCCTCAAAATGTAATTTCTAACCAATCACCATCACGCTGATCACTAT
TGACTTTAAAGCTGAATCCTTCTTTTCTCAGCCAATCACCAATTTCTTCAGTAATCAATT
TATCGCGAGCAGTACAATAATAACTAAAATATGTTTTACCTTGTTCAGCTGCTTTATTAG
CAAGTTCTGAAAAATCTTTAATAAAACACTCTAGCTTAAACTGTTTACTTTTTAATGCTT
TTTCACGTAATTGATTAGCAAAAGATTCATTTTCATAAAGATCATACTGTTCCATTTTTC
ACCTTTTTATTGATATGTCTTTTTCTATAGACAACTTTTTCTCGAGTTTCAAATTTATTC
TTAGCAGTCATAGCTCGAGCCCATAATACAGCCACTTCTTTCGCCTGTAAGTTTAATTCA
CGAGCAATTTCAATGAATGACTTTCCAGACTCATGAAGAGTAAACACCACAACCTCAGTT
CTCATAATCAATCTCATGTTATCGAGTTGGTGCCATTATATACACCATTTTCTGATTGTG
TTTTGTGTGCTTTCAAAATGAAAAAAGGGCCGAAGCCCCTTATGATTATGGATAGGTATA
GATGATACCAGTTTCTAAAGCAGTTTTGTGAATGATGTATCCATTACGTGATTCTTGAAC
ATCAACTTCTGGATAGTCTTTCATCATTTTCTGAAGAGTGTAACGATGCAAGTAGTACTT
ACTATCTGGATCATCAGTTTTCCAATCTTTACCTTCTTCGGTCATTTTTTGGATTTCATC
CATAACCCACCAACCGCACCAGATGTAAGCTGAGCTACGGTGTGGAAGAGGATGAACATA
AGGTAATTCACCTTCTGGTTCTGGAGCAACTTTATCAGTCACTTGAACTTGACCTTCTGC
TGTAATAGTTTTACTATCATAATCAGTTGCCGTAACGATAGCAGTAACTTCAATAGTTTG
ACTTCCAACAGATGACGTATCAACGGTATACACATTAGTTGATCCTTCTACGGGAGAAGA
ATCTTTCTTCCATGAATAAGCAATTTGTGCTTCTTCTGGTGCATCAGTGACATTAGCAGT
AAATGTAGCCGAAGCATCTTGTTGAACGTTAATAGAAGGAGGAGTCAATGTAACCTGTGG
ATTCATTGTCTTCTTATTAACTGTTAATGATACTTCATTCGAAGTAACTTCCTTTTCATT
GTAATTTTCAGCAGTTACTTGGGCTACGCATTTAATTCTTTTTACTCCACTTGTGGTAGG
AGTGTAATTGAATGTAGCAGAAGTTGCTTCGCCTACAGGAGAACCGTCAACGTGCCATTG
ATACGTAGCAGACGCTCCAACTGGTTGAGAAGATAAGGCAGCAGTAAATTGAACTGGGGT
TCCAATTACTCCAACTGAAGGACTATCAGGAGTTACAGCTAAAGTAGTTGTCTGTGTCTT
ATTTTGAACTGTGATAGTTGTAGTAGCTTCTGCTGTTTCAGCATCAGTATCTGGAACTGG
GTTTGTTGCAACTACTTTAATAGTTTTTTGACCGGCAGGTCCTTTTAGTACATAACTAAA
AGTTGCTGACGTTTCTTCCTGCGGAGCGTCGTCTACAGTCCAAGCATATGTAATAGGTCC
ATCTCCAGTTTGACCACTGGGTGTAGCAGTAAACTGCTGAGTCTGATCTATAACTCCAGT
AGGCGTTTTAGGAGTTATATCAACTGTAAAAGTCATAAATTATCCTTATTTTAATGTTAC
GAAAGAAGAATTACGTGTTTCACGAATTAGAACTGATCCGTCACGATTAATGTAGTAAAT
TAAGCTAAATAAAGTTTGGTGTGCTGACGCATGCTCAAAACTTGTTGGGTGAGATTTCCA
ATCCGGAGTTTCAGCAATCCATTGATAAATCCACCAAGGAACAGTACAGAATCCTGGATT
TTTTCCAATCAACTGAAGATTCGGGCTAAAGTTTTCCGGAAGAGTAAATACAGACGGATT
TTCAGATTCAATAATTTCAGCTACAGCCTGTTCAAATTTTTCTTCAACAAAAGGAGTATC
TTCAATCAAAACATCGGTATTTTCAGGAATTTTATCCGTTTCTACTACTTCAATTTTAAT
GTCAGATTTAACCGGAGAATCAATCAGAAGTGCTGCTTCTGGATTGACTTCTTCATCGTC
ATATTTTAATCCCTCTGCAGCATCAGCAGCATCAATTAAGTCTTTAATAGATAACCCATC
AGTCTCTGGCATAGGTTCACTAGCGAGCTTCTGGAGGGCTTCTTCAATATCATTAACGAT
ATTATCAAAAGATTTATTCTTTTTGACCTTTATACCAAACTGTTCAGCATATTCAGCTAA
TTTAGCTTTAGCTTCTTTGTTATCATCAAGAGCCTTCAGCTCTGCAATATAATCTTTATC
TATCATAATATTTCCTCAGTATAAATATAGATATATTTATTACTCGGAAAATAGTATGTA
CCACTTTGTATATGAAACAACAAATCTAATAAATGGTAAAAAGTATATAGGAAAACACTC
TACTGATGACTTGAATGATGGTTACCTTGGTTCCGGTAAGGCAATTCAGCAGGCTATAAA
GAAATATGGTGAAAACAATTTCTCTAGAACAATACTAAAAGAGTTTAAAACTTCCGAAGA
AGCGTACATGTATGAAGAAGAAATTATAACTCCTGAAATAATAAAAAGCAAAAATTATTA
TAATATGAAACCTGGCGGAATTGGTGGAATTGTTATGACTACAGAGGTTATAGCAAAGAT
GAAAGAATCTTCCGCTAAGAGATTTGAAAACTCACCGGGCACGGTATTAGGTACAACTTG
TTACACTAATGGAACTAAAAATATTTTTATTAAGCCTGGAGAACTTGTTCCAGAAGGATT
TGTAAAAGGGATGGTTCATCCTAATAGAAAGTCCAGAAAAGGATGTAAAGTCAAACCGAC
TACCACAGGAACTTTTTGGGTCAATAATGGTGCAATAAATAAATTAATACAACCAGACGG
TATTATTCCCGACGGATTTATTAAAGGTCGTCTCATGAAAAGAGATTCTAAAGGCAAATT
TAGTAAGGCATAATTATGGATATTAAAGTACATTTTCACGACTTCAGTCATGTACGCATC
GATTGTGAAGAGAGCACGTTCCACGAATTAAGAGATTTCTTTTCGTTTGAGGCCGATGGA
TATAGATTTAACCCTCGCTTCAGATATGGCAACTGGGATGGACGAATCCGTCTTTTAGAT
TATAATCGTCTTCTTCCATTCGGCTTAGTCGGGCAAATTAAAAAGTTCTGTGATAACTTT
GGCTATAAAGCCTGGATTGACCCACAAATTAACGAAAAAGAAGAATTATCAAGAAAAGAT
TTTGATGAATGGCTTTCTAAATTAGAAATCTATTCAGGAAATAAAAGAATTGAACCACAC
TGGTATCAAAAAGATGCAGTGTTCGAAGGATTAGTTAATCGTCGTAGAATTCTTAATCTT
CCAACATCTGCAGGTAAATCTTTAATTCAAGCTTTGCTTGCGCGATATTATTTGGAAAAT
TATGAAGGTAAAATTCTTATCATTGTTCCAACAACCGCTTTAACAACTCAGATGGCTGAT
GACTTCGTTGACTATCGTTTATTCAGTCATGCAATGATAAAGAAAATTGGTGGCGGAGCA
TCAAAAGATGATAAATATAAAAATGATGCACCAGTCGTTGTTGGTACATGGCAAACTGTA
GTAAAACAACCGAAAGAATGGTTCTCACAGTTTGGAATGATGATGAATGATGAATGCCAT
CTTGCTACAGGAAAAAGTATTTCATCTATCATATCAGGTTTAAATAACTGCATGTTCAAA
TTTGGTCTATCTGGTTCATTACGTGATGGCAAAGCCAATATCATGCAGTATGTTGGAATG
TTTGGTGAAATATTTAAGCCAGTAACGACTTCTAAGTTAATGGAAGATGGACAAGTAACT
GAGCTAAAAATTAATAGTATTTTTCTTCGCTATCCCGATGAGTTCACTACTAAATTAAAG
GGAAAAACTTATCAAGAAGAAATAAAAATTATTACGGGGCTTAGTAAAAGAAATAAATGG
ATCGCTAAATTAGCTATTAAGCTTGCGCAAAAAGATGAAAACGCTTTTGTCATGTTTAAA
CATGTATCACATGGTAAAGCTATTTTCGATTTAATTAAAAATGAGTACGATAAAGTTTAT
TACGTATCAGGGGAAGTTGATACCGAAACCCGCAATATAATGAAAACCTTAGCTGAAAAT
GGTAAAGGAATAATTATAGTAGCTAGTTATGGTGTATTTTCTACTGGTATTTCAGTTAAA
AATCTGCATCACGTTGTTTTAGCGCATGGTGTTAAATCAAAAATCATTGTATTACAAACA
ATCGGTCGTGTATTACGTAAGCATGGTTCTAAGACAATAGCAACAGTCTGGGACCTCATA
GATGATTGTGGTGTTAAGCCAAAATCTGCTAATACGAAAAAGAAATATGTTCATTTAAAC
TATCTTTTAAAACACGGCATTGATCGTATTCAGCGCTACGCAGATGAAAAATTTAATTAC
GTAATGAAAACAGTTAATTTATAAGGGCTTCGGCCCTTTGGAGAAAAAGATGTTACTAGA
ATTTAAACAATTTCTTTATGAAGCTTCTATTGATGAATTTATGGGTAAAATTGCCTCTTG
TCAAACATTAGAAGGTTTAGAAGAACTTGAAGCTTATTATAAGAAAAGAGTTAAAGAAAC
TGAATTAAAAGATACTGATGACATCTCAGTCAGAGATGCTTTGGCAGGAAAAAGAGCTGA
ATTAGAAGATTCAGACGATGAAGTAGAAGAAAGCTTTTAAATTAAAAAAGGCCCAACCAA
AAAGGAAGGGCCAAAACTATAGACTAAAGGTCACACTATAGCAAAAGTTGTGTTTCATTT
AATTGTTCTTCCGAACTTTCTGAAACTGGTAGTTCTTTAATGTAATTATAGCAAGGCCCA
GGATGTACAGGACCTTTGTCTGTTTCAACAACCAACGCAGAATCGATTGGAGTTTTACAG
ACAACACAAATCTTATCTGACATGATTGTCTCCTCTGAATTATATATCTATTTATACAAC
TCTCATATGCATATCAATGCCCATATCTTTAGAATAAAAATATTCATCAAGATATCCGGC
AAATTTTCCTTTAACATAAAGAACATCTTCACCACACGGGTGGTCGGCTAGGATACGAAT
ATCCTGACGCTTAAGATTATGCTTTTTCATTAAGAATTGAATTTCCGTTTCAAATTCTTC
TTCATAATTAAAAGCATCATCAATGCTATATCTCATTATTTTCCAGCCTCAAATGCCCGC
ATGTCTTGAATATGCTTAATAGCAAATCCACGTGATTTAATAGCATCAAGAGCTCCGCTA
CAGAAATCTAATAAAATTCCCCAATATTGTAATGAAGTATCAACCTTTAAAACATCCTTA
TCAGCTGATAGAACTGTCTTCATTTCTGATTTCTCGTAACGATCCATACTAAATTCATCA
CCATCTCCTCGTCCCGAGTAGTAGTCTAATCTAGCTTTAAGAGCAACTTTTTTCTGTGCG
TCAATTCTAAGCATTTCCTTTTTAATACTTGAATGCTTATTAAGCCATTTACTATATAAC
ATCACATTATTAGCTGCTTCATACTGTAATTTAGTCGAATCTATAAACACATCTTTCTTC
AATTCTTCTTGAAGATCTTCTAATCTCATATTGTTCTCTATTCAATTGTTATTGGATGGA
CTTAGATTCATTATACCACGTTTATACGTGAAGCATTATACTCTATTACTGGAAGCCAGT
TGTAGTTTTATCTGCTCAATATCATCAGGGTTATCGATGACTGAAAAGCGTATTTCTACT
ATCAGAGTATAATCATCATAAACCGGTATTACATTAACTGCTAATTTATCAATACGTGGC
TCATAGTTTCTTACTGCGCTTTCGATATTACGCTCAACCGTGTCAGCAGTAAGAGGAGTC
ATATTCTCAAAAAGTTGGTCAGATAAATCGCATCCAAATTCAGGGTCAAACGGTCTTGAA
CCTTTTCTTGTTGTAATAATTCCTAAAAGACTATTTTTAATTGACCTTAATCCAAGTGAT
CTTGAAACGTCTTTGTTCCAATCCATTTTCATCTCTGGGTCAATATCAGAATAAAGCTTA
TTAATATTTGCCATTACAATAGCTCAAAGAATTCTTTGAGTCCTCTTATTACATGAGCGT
GAGTTTTTCCACACTCTGGACACTTAATTGGAACAGCCAAATAAACAGTAGGCTTTAAAA
GCATATCTTTTATAGCTACAATATCTGACTCTGTGATGATAGAATATAAATCTTCCAATT
CTTTTTCATTTAAGTCTTCAACTGGAATGCTTTCACCGTTAGCATGAATCGTTTCTATAC
ATGATACTATCATGTGGGCTATATTTTTATCATCAAAAATTTTAGGGTAATGGAATTTAA
TTTTAATGTCACCCAGTGTATACCAGAGGTCTTCTGATGCATCTATTTGTGTATGTAATA
GATTTATATGGGTTGGTATTTCAGTTCCACAGGTGCACTTCCAAGAGTTTTCGTGATTAA
CTTCACCAAGAGAATGCGCCCATAAATGAATCAGTAATAGTTCTGATTCTTGGCGGTTTA
AATCTTTTGCATTTGTACAGTCTTTGATTAGCTTTTTAACAATCTCTTCTACTGAACCAT
TCTTTTTAGCAGTAATAAGTTCTAGATATTCTTTAAGAGTAAATGCGCGACAGTTGATTA
TTTTAGAACCAACTCTCACATCAAATTTGTATTCATACATATTTAGCTCCTTTATTTATC
ATATTTATAAATAGAATAAAAGGAGCATCTATGGCAAACATTATTCGTTGTAAATTACCA
GATGGTGTTCATCGTTTTAAACCATTTACGGTAGAAGATTATCGAGATTTTTTGTTAGTT
CGAAACGATATAGAACATCGGTCACCACAAGAACAAAAAGAAGTAATTGCTGATTTAATT
GCTGATTATTTTGGAGACTATCCAAAGACTTGGCAACCATTTATATTTTTGCAGGTATTT
GTAGGTTCAATAGGTAAAACTAAAGTACCAGTCACATTTGTATGTCCAAAATGTAAAAAA
GAAAAGACAGTTCCATTTGAAATATATCAAAAAGAATTAAAGGAACCTATTTTTGATGTA
GCTAATGTTAAAATTAAATTAAATTTTCCTTCTGAGTTTTATGAAAATAAAGCAAAGATG
ATTACTGAAAATATTCATTCTGTTCAAGTCGATGAAATGTGGTATGATTGGAAGGAAATT
AGTGAATCAAGTCAAATAGAACTTGTTGACGCCATCGAGATAGAAACATTAGAAAAAATT
CTCGATGCAATGAATCCTATTAATTTAACATTGCACATGTCATGTTGTAATAAGTATGTA
AAAAAATACACTGATATAGTAGATGTGTTTAAGCTATTAGTTAACCCAGATGAGATATTT
ACTTTTTATCAAATTAATCACACACTCGTAAAAAGTAATTATAGCTTAAATTCAATAATG
AAAATGATTCCTGCTGAGCGCGGATTCGTATTAAAACTGATTGAGAAGGATAAACATCAA
TGAGTATGTTACAACGCCCTGGATATCCAAATCTCAGCGTTAAATTATTTGAGAGTTATG
ACGCTTGGAGTAATAATAGATTTGTTGAATTAGCTGCTACTATTACCACATTAACTATGC
GTGACTCTCTTTATGGTCGAAATGAAGGAATGCTACAATTTTATGATTCTAAAAACATTC
ATACAAAAATGGATGGAAATGAAATAATTCAGATTTCTGTAGCTAATGCAAACGATATTA
ATAATGTTAAAACACGAATTTATGGATGCAAGCATTTTTCCGTGTCAGTAGATTCAAAAG
GCGATAACATCATTGCTATTGAATTAGGAACTATTCATTCTATAGAAAATCTTAAATTTG
GTAGACCATTTTTCCCTGATGCCGGTGAATCTATAAAGGAAATGCTTGGCGTAATTTATC
AAGATCGTACATTATTAACTCCAGCGATAAATGCTATTAATGCTTATGTTCCTGATATTC
CATGGACTAGCACATTTGAAAACTATTTGTCATATGTAAGAGAAGTTGCTCTAGCGGTAG
GAAGCGATAAGTTCGTATTTGTATGGCAAGACATCATGGGAGTTAACATGATGGACTATG
ATATGATGATAAATCAAGAACCATATCCAATGATTGTAGGTGAGCCAACTTTAATAGGTC
AATTCGTCCAAGAATTGAAATATCCATTAGCATATGATTTTGTTTGGTTGACTAAATCAA
ACCCGCATAAACGTGATCCAATGAAAAATGCTACTATCTATGCTCATTCGTTTTTAGATT
CTTCACTGCCAATGATTACTACAGGAAAGGGTGAAAACTCTATTGTAGTGTCAAGGTCAG
GTGCTTATTCTGAAATGACTTATAGAAATGGATATGAAGAAGCTATTCGTCTTCAGACTA
TGGCGCAATATGATGGCTATGCTAAATGTTCTACTGTCGGTAATTTTAACTTGACTCCTG
GCGTTAAAATTATTTTTAATGATAGTAAAAACCAATTTAAAACAGAATTTTACGTTGATG
AAGTTATTCACGAATTATCAAATAATAATTCCGTAACTCATCTTTACATGTTCACTAATG
CAACGAAACTGGAAACAATCGACCCAGTTAAGGTTAAAAATGAATTTAAAACTGATACTA
CCACTGAAGAAAGTAGTTCTTCCGATAAGTAATAAAGAAGTTTCTATTCCTAAGATGGGT
CTTAAACATTATAACATTTTAAAAGATGTTAAAGGTCCTGATGAAAATTTAAAGCTTCTT
ATTGATTCTATTTGTCCAAATTTATCACCGGCAGAAGTTGATTTCGTTTCTATTCATTTG
CTAGAATTTAATGGAAAGATTAAATCTCGTAAAGAAATAGATGGTTATACTTATGATATT
AATGACGTTTATGTATGCCAAAGATTGGAATTTCAATACCAAGGAAATACATTTTATTTT
AGACCTCCTGGAAAATTTGAACAATTTTTAACTGTAAGCGATATGTTATCCAAATGCTTG
CTTAAGATCAATGATGAAGTTAAAGAAATTAATTTTCTTGAGATGCCAGCATTTGTTTTA
AAATGGGCAAATGATATTTCTACAACTTTAGCAATTCCTGGCCCTAATGGTCCAATAACC
GGAATTGGCAATATTATTGGATTATTTGAATGAAAAAGCCACAAGAAATGCAAACGATGC
GTAGAAAAGTTATTTCAGATAATAAACCAACACAGGAAGCGGCTAAATCCGCTTCTAATA
CTTTATCTGGTCTTAATAACATTTCTACAAAATTAGATGATGCTCAAGCTGCTTCTGAAT
TAATAGCTCAGACTGTTGAAGAAAAATCAAATGAAATAGTTGGAGCAATTGATAACGTTG
AAAGCGCAGTAAGTGATACTACTGCCGGTTCTGAGTTAATTGCCGAGACTGTTGAAATTG
GCAATAATATCAATAAAGAAATAGGCGAATCACTCGGAAGCAAATTAGATAAATTAACGA
GTTTATTAGAACAAAAAATTCAAACAGCTGGAATTCAACAGACTGGAACGAGTTTAGCAG
TAGTCGAAAATGCTATTCCTGTTAAAGTCGTCGAGGATGATACAGCTGAATCTGTGGGTC
CTTTATTACCGGCTCCTGAAGCAGTTAATAATGATCCTGATGCTGATTTTTTCCCTACTC
CTCAGCCAATTGAACCAAAACAAGAGTCTCCAGAAGAGAAGCAAAAAAGAGACGCATTTA
ACTTAAAATTATCTCAAGCTTTAGATAAATTAACAAAGACAGTTGATTTCGGATTTAAGA
AATCTATTTCAATTACTGATAAAATATCTAGCATGCTATTTAAGTATACCGTCAGTGCTG
CTATTGAAGCTGCTAAAATGGTTGCATTGATAATGGCTGTTGTTATTGGAATAGACCTAC
TGATGGTTCATTTTAAATACTGGTCAGATAAATTTTCAAAAGCCTGGGATTTATTTAGCA
CTGATTTTAAAACTTTCTCAAGCGAAACAGGAACTTGGGGTCCTTTATTACAAAGCATCT
TTGAATCTATTGATGAAATTAAAAAGTTCTGGGAAGCTGGAGATTGGGGCGGATTAACAG
TAGCTATTGTTGAAGGGCTTGGAAGTGTTCTTTATAATTTAGGAGAGCTTATTCAATTAG
GTATGGCTAAATTATCTGCAGCAATTCTTCGAGTCATTCCTGGCATGAAGGATACTGCTG
ATGAAGTAGAAGGAAGAGCATTAGAAAATTTCCAAAATTCTACTGGAGCATCTCTTAATA
AAGAAGACCAAGAAAAAGTAGCAAATTATCAAGATAAACGAATGAATGATGATCTTGGCC
CAATAGCAAAAGGATTAGACAAAATTGCGAACTGGAAAACTCGTGCATCTAACTGGATTC
GTGGTGTAGATAATAAAGAAGCATTGACTACTGACGAAGAACGTGCAGCAGAAGAAGAAA
AATTAAAACAACTTTCACCGGAAGAAAGAAAAAATGCTTTAATGAAAGCTAATGAAGCTC
GTGCTGCAATGATTCGTTTTGAAAAATACGCTGATTCAGCTGATATGAGCAAAGACTCGA
CAGTTAAATCAATTGAAGCTGCTCATGAAGACCTTAAAAAACGAATGAATGATCCGGATT
TAAATAATTCACCAGCAGTTAAAAAAGAACTTGCTTCTAGATTTGCTAAAATTGATGCCA
CTTATCAAGAGCTCAAGAAAAATCAACCTGAAGCAAAACCTGAAACTTCTGCTAAATCAC
CAGAAGCAAAACAGGTCCAGGTGATTGAAAAGAACAAAGCACAACAAGCTCCTGTTCAAC
AAGCATCTCCTTCAATCAATAATACTAATAATGTTATTAAGAAAAATACTGTCGTTCATA
ATATGACACCTGTCACAAGCACAACTGCTCCTGGTGTATTTGGTGCGACGGGAGTTAATT
AAGGAATAATATGGCAATTGTTAAAGAAATAACTGCTGATTTAATTAAAAAGTCCGGTGA
AACAATTTCAGCCGGACAGAGTACTAAATCAGAAGTAGGAACTAAAACATACACAGCCCA
GTTTCCAACTGGGCGTGCTAGTGGTAATGACACTACAGGGGACTTCCAGGTAACAGATCT
ATATAAGAATGGATTATTATTTACTGCATACAATATGTCATCTAGGGATTCTGGAAGTCT
TAGAACGATGAGATCTAACTACTCTTCTTCATCTTCGAGTATTTTACGTACAGCCAGAAA
CACTATCAGTAATACAGTATCAAAACTATCAAATGGACTAATATCAGATAATAATTCAGG
AACAATAAGTAAAGTTCCTGTTGCAAATATTCTTTTACCTAGATCTAAATCTGACGTCGA
TACGTCATCACATAGATTTAATGATGTTCAAGATAGTCTTATTACAAAAGGCGGAGGAAC
TGCTACGGGCGTATTAAGTAATATGGCTTCAACTGCAGTATTTGGTGCGCTTGAAAGTAT
AACACAAGGAATAATGGCTGATAATAATGAACAGATCTATACAACAGCTAGAAGTATGTA
TGGCGGTGCTGAAAATAGAACAAAAGTGTTCACCTGGGATTTGACTCCGCGCTCAACAGA
AGATTTAATGGCTATTATTAATATCTATCAATATTTTAACTATTTTTCTTACGGTGAAAC
TGGTAAATCTCAATATGCTGCTGAAATAAAAGGATATTTAGATGAGTGGTATCGTTCTAC
ATTTATTGAACCATTAACGCCAGAAGACGCGATTAAAAACAAGACGTTATTTGAAAAAAT
GACATCGAGTTTAACGAACGTTCTTGTAGTTTCAAACCCGACAATTTGGATGGTGAAAAA
CTTTGGTGCAACTTCTAAATTTGATGGAAAGACTGAAGTATTCGGTCCATGCCAAATACA
GAGTATAAGATTTGATAAAACACCAAATGGTAACTTTAATGGATTAGCTATTGCTCCTAA
CCTTCCAAGTTCTTTTACACTCGAGATTACTATGAGAGAGATTATTACGTTAAACCGTGC
TTCTTTATATACGGGGACTTTCTAATGTATTCTTTAGAGGAATTTAATAATCAAGCAATA
AACGCAGACTTCCAACGTAATAATATGTTCAGCTGTGTTTTTGCTACAACTCCATCAACT
AAAAGCTCATCGTTAATAAGCTCAATTAGTAACTTTGCTTATAATAACTTGGGTCTAAAT
TCAGATTGGCTGGGATTAACTCAAGGTGATATTAATCAGGGAATTACCACGTTAATTACC
GCTGGCACACAAAAACTAATAAGAAAATCGGGAGTCAGTAAATATCTTATTGGCGCTATG
AGTCAGCGTACTGTCCAGAGTTTATTAGGCTCATTTACAGTTGGTACATATTTAATTGAC
TTCTTTAACATGGCATATAACTCATCTGGATTGATGATATATTCTGTAAAAATGCCAGAA
AATAGATTATCTTATGAAACTGACTGGAACTATAACTCTCCTAATATTCGTATAACTGGA
AGAGAATTAGACCCTTTGGTTATTTCATTCAGAATGGATTCAGAAGCTTGTAACTATCGT
GCAATGCAAGACTGGGTTAACGCTGTTCAAGACCCAGTAACTGGATTGCGTGCTTTACCA
CAAGATGTCGAGGCAGATATTCAGGTTAATCTTCATTCTCGCAATGGATTACCACATACT
GCGGTGATGTTCACTGGCTGTATTCCAATATCTGTGAGTGCTCCTGAGTTATCATATGAT
GGAGATAACCAAATAACTACATTTGATGTTACTTTCGCTTATAGAGTCATGCAGGCTGGA
GCAGTTGATAGACAAGCTGCCCTTGAATGGCTTGAATCTGCTACTATAAATGGTATTCAA
AGCGTTCTCGGAAATAGTGGAGGTGTTACTGGACTATCTAATTCGCTTTCACGACTTAGT
AGATTAGGGGGAACTGCAGGAAGCATTTCAAATATTAATACTATGACAGGAATTGTCAAT
TCGCAAAGTAAAATATTAGGAGCAATATAACAATGGGGACCGAAAGGTCCCCATATTTTT
ATTTACGGAATGAAATAAAAGCAGCAACTGAAGCAACAGAGGTTTCTTCAATATAAACCT
CAATTTTTACCGGAGCTTCTGACTCAAATTTACCTGTTACTACACCTTGGAAAATACTTT
CAGTCTGTTCTGGCTTTGAAAAATTTTCAGAAGGAAAAATTCCGAACTTTTTATCTGTTC
CAAAAATTTTAATAAATTCATCGTAAACTGCTTCATTAAAAGCATTATCAGCAGGAATAA
CGCCTTCAACTACAAGTTCTTGACCTAAAAAGCGCAAAGAAGATTTCATTTTGTGTTCCT
CATGTTATGTCAGTAAGACTACTATAACACAACATAAGGGACTTGTAAACTACATTTTGA
ACTTTTTAGACATTCCGTTGATGTTAACCAAAGAAGCCAAGATTTGAGAAACTTCGTTTT
CCTCTTCTTTTGATTCTTCTACAAGAAATTGATTAAATCCAGCCATTGGACGAACTTCAC
CAGTTTCCATTAAATGGTCGCCATCATATACCGATTCCTCTAATTGTTCAGAAGGAGGAA
CGATTGTACCTTCGATTAGATACTTGTTATAAGCAGTTTCTTTCATAAAGTACGTACTTA
CTTTATTAATCTTCAGTAAAATTCCACGCGGTAGAATAACTTCAGCTTCTGATGGAAATC
CTGATAAATGACCTGGAACGATAACTTTGATTCGCTCAGCTCCTTTAATTACCATACCCA
CGCTAGTTTCAGCATCTTCATTAGCATATGTAGAATGACTACCCATATGCATCAAATCTT
CTGCGTCAACTGAACCTTCTCCTTCACCAGAAAATACTGCGCCGGAATCATCTAGAGCCA
TATAGTTTTTACCATGCTCACCGAAGATATTTGGTTTAAGAGATGTGGATACGAAGTTCT
TGAAATAGAACATTTTGTTTTCAATGTTATGACGCAAAGTTTTAAAGGTAACTTCTTGTC
CGCGATAAAGCGTAGTTCCTGGAGGAAGAACTGAACCTTTAGCGAATGCAGAATCCAACG
TCTCGATGTGCTTAATAGCTCGTTCCATATATTCTTCACGGGTAGAATCTGGTTTACCCA
AAAGGAACGAGTTCATTTCAACATATGAATCTGCACAATAATCTTCAATTACATCAGATT
CGGCCTGAGTCAATCCTTTTGGAGTTACTTCAGTGCTTGCGTATTCATATGCCTGGGCAG
CAGATTCATTAATCAATTTATAAATGCCATTCATGACAAATTGAATAATAGCTGTCTTTT
CATCTGGCGTAGCTTTAGAACCTTTAACTAAATCATTAATAATTTTCTTAATAACATCAA
AGCTATTAGAAATATTAATGTCAGCAAGATCGCTTAAAATTTTATCAGTTTTATAATCAA
AGAATTCTTTATTCTTTAAATATTCTTGAGAACCTTGATATGTTATATCGCTCTGCAACT
TGATAGATGGATCACGTAAACGTGCATGGGCCAATGCAATATGATTTCGGAAGTTTTCTA
GTTCATAATCGCTAGATTTAAAACGAGAAGCACTCCTCATACCACCGATAGCTCCTTTGC
TGAAGTTTGAACCAATCTGGATAACGCCAGAGTTCATCGGACCTTCTGCTTTATATACCG
GAACTTTAGATTCAAACTCTTGATATTTCTTAGCAGCGAAGCTATCACCCTGAAGTGAAG
CATCGACAGTAGAATATTGAGCTTGTGCTGCTAATCGACGACTAATTTTAGTTTTTTGAA
TAACAGCTTGATCCGTGCGCTTATCATTTTCTAAAGCAATAGAAGCAGCAACAGCGACAG
CTTTAGGAACAGCATTACCTGTTTTAACATCTACATAAACATCACCGACCTTCGATTCAA
CTTTTGTGAATAACTCAGTTGAAATAGGAGGTACACCTGGAATGTCTTCTAAATTGGCAT
TTTTACGGTAAACCATAATATATGCATACTTTTTATCATAGTCCCAGATTTCCTTTAAAA
GAACATATCGACCTGCTCCTTTAGTACGTACTAAACGGTCAGCAATAACTTGCATTTGAC
GAGCAGCGCCATTTGTTTTACTTTTTAGTACGCGGAATAGGCATGCGTCAATTTTATACT
GTTTCATTGTTTGAAGAGCAGTATCAAAAACAGCATTAATGACGCCAATTGGATTTCCAC
CCAAGTTTCTAAGCTTAACCAGCGATAATTTCTCGTTGACACCTATCATTACGATATGCA
TCATTTTATCGCCTGGCTTAACGTTTTTATTCGTATCACCGCCAGAGGTGTATGTACAAA
ATCTAAATCCAGGAAGCACGCTTTCTTCACCGGCTTGAATAGCAAAAATTTGTGGTATTT
TATGCTTAGGATTTAAGTTAACAACCGGCGCCGAAGCGCCGTCAAATAATTCTGTAATAA
GTTCCATGATTTATCCTTGAACGAACTTGTAAGGCATGTTTGTAATATCTATGCAAGACG
CAATAATTCCAAGAGATGATTCTACTTTCTGTTTAACATTTGATGAAACAAATGATGCAA
AGTCAACTCTGTCTTCTATTTCAATATCACCTGTCATTGCAACTACTTCGCCGGTTTCCA
TTAAACGGTCACCGTCATAAATTACCGATTCGGTGAGTTCTTCGGTGGTCATAACTTCAG
CTTGAATGAGTTTTGTATTATTAGACGTGGTTCCGTCATTATTAGAAGCATCAGTTATTT
TATTAACTTTGACCATCAATCCGCGCGGTAGAATAACTTCGGCTTCTGTTGCTATTCCGA
GACTTCCTGGATATACAACATTAACTTTATGAGCTCCATCAATTGCCCATCCTATTTGAA
CTTTAACGTATTCAGGATTTTCTTTATACGCTCTTATTTCGTTTGGATTAATAGTTATTC
CTTCTTCATTTTTATCAACTGTTAATTCATTGCGAGCTTCTGGTTCTAAAAGACCAATAC
CAGCATGTGTAATTCCAAAACGTCCAAAAATGATAGGAGTTAAAGAAGTAGATACAAAAT
TTCTGAAATAGAACACTTTATTTTTAACTAGTGCTTCGTATATAGGAGCAGTCATACTTT
GAGCACGATAAACTGTAATGCCTTCCGGTATGCGGTCACCATTTTCAAAAGCTGAATCTA
AATTATTTATAGCAGATTCAATTTCTTTTTCACTCATTACATCATATCGTTCTGGATTGT
AACGACCTAAAAGAAGATTATTAATGTCTGTATATCCTGAACCACAATATTCTCTAATAC
CTCGCTTTTGTGATGGAGTATATTTAGAACCATCACGGGCAATAGTAATATCAATCATTG
GACCAGCACCAATTCCAGAAAAGCTATAAATCATTCGTTTGAGGAATTTAGTTTTTGCTG
CATTCCATGCATTTTTAGTTATTTCTCCCCAGACTTCATCTGGTTGCCCTTTACGAGTTT
TATTATGTTTATCAAGCCAATTATCTTTATATTCTTCAAAGAATTTATTAATAGCTGCTG
CGTATTTCTCTAAACATTTTATTGAAGTAGTTGGTTCATTTTTGATTGCGTTAAAAATTA
CATCTTTAATTTTTTCTGAAACTTCATCAACCTCACTTTTTGAAAAGAATTTATAGTCAT
AGTGAAGTTCATTCGCAGTTCCTTCGGCAATAATTTTTGCTGCCTTAGTTTTAGAAGCTA
ACGAATTAATTCCAAGCTTCATTTCTTCTGCTTCGGGAATTAAAGGAGCGGTAGCAGGTT
TATTGAAATTAGCTGCGGTAGATTCATACTTCTGGAATAATTCACTTTCAAATCTAGAAG
ATTCCAATGATTGACTTTGCGCAATTGCTCTACGTGAAATTTTAACTTTAACGATTACAG
CTTGGTCAGAACGTTTATCATTTTCTTGCGCAATAGATGCTGCAATTGCCTCATTTTTAG
TTACTTGAGCTCCAGTATCTTTATTGATATAAACATCACCGACCTTCGATTCAACTTTAG
TAAAGAGCTCGGTACTAATTTCCGGAACTCCTGGAATGTCTTCTAGTGATACATTTTTGC
GATGTATAAGAATATATGCATACTTTTTATCGTAATCCCAGAGTTCCTTAAGAAGGACGT
ATCTGCCACCTGAACGACTGCGGATAAGTCTATCAGCAATAAGTTGAATTTGACGAGCTT
GACCAGCAGTTTTAGACTTAAGAATACGGAGCATGCAGGCATCAATTTTATACTGACGCA
TCGTTTGCATTGCAACAGTAAAAACTGAATTGATGTAATTAATTGGGCTTGGACCGAGAC
CTTTTAATTTAGCAATTGAACCTTTAGCAGTTAATGTAAAAGGAACAATATGCATCATTT
TATCGCCCATCTTTAAATCGCGATTAGTATCACCTCCAGATGTATAGGTACATAAACGAA
AGCCTGGTTGTTCAATTGCGTCATCAACATGAACTGAAAAAATTTGCGGTATTTTCTTCT
TTGGATTTAAGTTTGTAATCGGAAGAGTAGTATCTTCGTCAAATAATTCTGTAATGAGTT
CCATCATATCCTCTCTAGTGTTTATTCTATTTATAAAATTAAAGGCCCGAAGGCCTTTAG
TAATCTAGTGGTAAGAGAGTACGATATATTTCAAACTTTGGACCTTTTTCATAGGCATCA
AATGTTTCTGTGAATTTATTATAAGCATATGCATCTACAAATTCGAGAATGACTTGTGAT
ACAGAAGTAGAAACATCTCCACCTTCTTTTTGAGCAATGACAATTGTTTCTAAGTAAGCT
TTCATAGACCAGTTACCTCATGAAAATCACCAAATACATCCTCGAATGTATTAGCTTTAG
TTTTATCTTCACGTAAACGAATCGCAATCGGAAGAAATAATTTAACGTAATCAGTACGTC
CATCAGATTTTAACCAACCGTTGCATTCGCACTCTAGAATTTTTCCAATATAATAATTTT
GGTTTTCCATAATGCGAGTACGATCAAGTTCATGCGATTTTACACCAGCTTTATCTTTTA
AGCCTGAACCAGCATTTACTTTAATTTTTCCACACTCTGATTCAAGAATAAATCCACCTG
CTTTAGTAGGGTCTTTACGGTGAGGATAAATTCCTACAATTTTTAAATCAACATCAATTA
CTTCTTTAAATTTATAGAGATTTTTTGAACGAGCATTTTCCCACAATCCATCGGTATTTT
TGAGAATAATACCTTCAAGACCTTGGTCAATATACTTTTTATAAATTACCTTAGCTTCAT
CTAGGTTATTTACTACCTGGTTTTCAATTAAAATTACTTTATCATATCCTGATGTCATTT
GTTCTAGTTTAGAAAAACGTACATCATATTTTAAACGAAACGCCGGAAGACCGTATATTT
CTACCAACGGTACATAATCCCAGACCTGAAACTTCATGCATTGTGCTTCTTTTTCAGAAA
TGGTTCCCTTTAAAGATTTATTGGCGATGCCATTAGATGCAGTACGAGATTCAGCTACTT
CGGCGAATTCTTTAGCTTTACTAATTTCAGGATAAGCATCAAAAAGAAAATCTAGGCCTT
CTGGCTCCTTTTTAACTTGCTCATGGTATACCAATTCGCCATCAATTAACACACCTTCTG
GATGAATCTGGCGGGCTTCAGCGGTCATTTTGATTAACTCTTCTTTGAGAAGGTCTAATC
CTAGATATTCATTACCAGCTCGTGATAAAAGACGAACATCATCTAATTCATCACCTCTGA
CTTCGGCAAAACACCGAGCTCCATCAGCTTTTAATTGGGCAAAGGCTGGAAATTTGATAT
TCTTATTAATGCCTTTTTCATCATAAGAACTTGCCAGCATTTGAGGTTGTTCAGGAATTA
AACCTGGCCAAACTTTGTTTGCAATAGATACTGAAGCACCGCATTCAAGGTCTCGCATCA
TCACCCGACGCAAAACTTCAACATCATCCTTTTTACCATCGGTGATATATCCAGTTAATT
CTTCAATTGCCGCATTTCCAGTCAATTTCCGAGTAGCTAATGTGAATTCAATGAAGTCAA
GCATATCGGTAAGAGTCAACATTCCAAAACTCTGGGTAGCAATACCAGGTTTAGGCCATT
TCTTGATATAATACTGTAACCCACGAGAATAAGTTAGACGATATACTCGTTTAAGCAATT
CATTATCTTTATTCTTTTCAAGAATTGCTTGCTTCTGCTTAGTTGAACCAATAGATGCTA
TTTCGTTCAGAATTTTAAGAATCATTGTTCATCCTTTAGAGTTTGGTTTACAGCTCTATT
ATAAATCAATTCATCATTAAGCTCAGTCAAAGACCTATGATATGTAGTTCTAACTTTATT
TCCTTGCATCCAGTGCTTGATATAAATGAAACCTTGCTCTACACATTTTTTAAAAATTCG
TTCGTCTTTTTGAGCTCGGAATTCTGGATTGCATCTAAAAAATTGATTTACGTGACCATA
ATCACGTGTAGTATTACCTTCATTTTCATAAATAGTGTGAACGACAAACATTAGAATGCT
CCTTGGAAAATATTATCACCACTAGTAAATCTATTAAAATACCCTGCATCACCAGGCTTA
GTATAACTCCACGTATGGAATGGATTCATATGATACGGGTGTGTATAATATGGATTATAT
GGATGTGTATAATATGGATTATACGGATTAAATCCAGGAGTTCTCCAGGTAGTGTTCCAA
CGAAAAGAATCGTTTTTAACCATCTTCTCAATTACATCTTTTATAGCTTTTTCACTATCA
AAACTTTCTTTATTTTCCTTCGGTGAAAAAAGCTTATTTTCTACATCATTCCATGTATAA
ACTCGCTGCGCAGTTTTTGGAATATTGTCACGCTCTCCTCGAGCCATCCAATAAACCGGA
ACATTTAATATTTCACTCGCATGATCGCAGTGGTGAGCAAGATCGTCAATATAACAAATT
ACGTTATATTTCTCTTTTGCCTTTTTGAATAACTCTTCTTTTGAAGAATCATGACCACAC
ATCATTACTTCTGAGAAGGCACCAGGAAAAAGAGCATTCAAATTAAATTGACGATTCAAC
AGAGCGTCAATAGAATCACCCAATGCTGTAACAGCTACAAAATTATAATCTTCTTTTAAT
TTGTTAATTACACACAGAGCATCTTTATACGGAGACAAGTAACGAATAAAATCTGAACGA
TTGTATTTTTCAATTAACTTGACGCCAAGTTCTTCATCACAATTAAATAGTTTACCTGGA
GAAATAAATTTCTCATCTTGGATCATTTTTAAAATATGTTCTAACGGAAGATTATATTTC
TGAGCAAAATAAGGAAGACCTGATTGCCAGCTTAAACATACTCCATCAATATCAGTTAAA
ATAGTAGGCTTCATAGAGAGTCTCTTAATAGGTTTAACACATCAATAAATTCAGCTTCGG
TTAGTATTGTATCATCTTTTGTTAGACCACTAGCCATGCTGTGCTTCAAAACTTTTCCTT
TCGAGGCTTGTAATGCATCGCGAAAGCCCCTATTTTGGATCGCTGCTTCAAAATATGCAT
TTGTGTATAATTCTTTCCACGCTGGGGAGTATCTTGAAAATGGAACTCCAAGCCAGAAGA
GGGTCCCACGGTCCTGAGCTCTAGCATAAGACCTTCCAGCTTGTTGGGCGGCAAGCCCGG
ATAACCCAAATATACGACGTTGTTGTTCAACATTTTTCACCTTGCACCCTTGGAGGAATC
CTTCAAGACCTCCAAATTGAATACCATCCATAACGAAAGGCCATTGGGCGAAATTACTTA
ATGCACATGATGGCCACCTAAAATTGCTTCTAATCTCTAACTCAGACATTTTCAATGCTT
ATAATTTCAACATCAGCCCAATGACCATAGCAAGGAAGACGAAATTCAACTGGCCAGTTA
GGGTCCTTTTCTAATATAATAGACTCAACTCGTGGTTCTTCGTGTTCATCAGTATATGGA
TTTTTATCTGTTACTTTATATGTGACCTTAATGTACTGAATTCCAAAAATCTTATTAATT
ATATTCATACTAATTCCTTTAATCCGTAAATAGGAGATAATTCATCGCCCATACGAAGGT
CTTCATTTCCATCTACCCAGGAAACAATATAAGCCTCTTTTATTTGAATACCACTCCATT
TAAATGGAGGTAGAACCTTAGAAATTAATCCAGGTATACCAACTCCCTTTAATTCAACAG
TTTGACCTAAAAAGAATTTCATTAGAACCTCATCTGAAAACCGTGCGATTTAACATTACC
GCCGCCAATATCAGAGATATTAATTTCGCGCGCAATTGAAGGGTCAATGTCAATTTCACG
ATTGAGTTTAGTGATAGCTAAAGTATCGCGCCCATTTACAGTACGGAACTCTAAAGGACA
TACTACATTAACGTAGTTTTTAATCGATTCGCTGGTAGGTTGCAAATGAGCAGGAAGGTC
TTTAGGCGCCTTAGAGAAAACCACTTCACAGAAGTTTTTACGAGTATCAAAATAAGTAGT
CATAAACATAGTATTTTCCTCAGCAAGGGGCCGAAGCCCCTCATTTTATTTTAAATATCA
AATTCGTTAAGAACTACATCAAAGATTGCTTCAAGATGCTCAGGTTTAGCTCTATTACTC
AGAATATGACGAATCCAAGTTTTAACCAAAAGCTTGCGATTAGCACCATTCCAGCAAGGA
TGAGTCCCTAAATCGCGTTCACGGAAATCATCATCCAGAGCGATTTTAAAGTTGGAACCT
TCCATCGTGATTGAAACCGTGATACCGTTTTCAAATCGCATATAAACGTAATTAGGAGTC
ATATACTGCTCAATTTCGCATACTGATCCATTTTGATGTTTCCAAAGGCAAATAGTATCA
ATAGAACCTGCAATACCATTAGAAACATATTTACGTTCAAAGTTGATGTAGTTCATTTTA
TTCTCCAAGATGTTTAATTGCGGTACAGGTATATAATATCATATCCTGTACCAAAGTAAA
CTATTTTATGCAACTTTAATCCAATTATCTAAATTTAATTCACCTTTGGCTTTCATTTTT
TCAATCAAGAGGTCAGCGGTAATACGACCATTTTGATACCACGTAACATCTTCAGAGTAA
CCAGTTTCTTTATCTTCATAAGTCTCACAACGAATTTTACCAATAATCAAAGTTTTCAAT
TCGTATGTATCTCCAGTAAAAAAGTTAGTTAACATTATTTTCCAAGAGAAATCATCAGAA
GGACCTTCAGGAGTCATGCAACTTACAAATTCAAATTGTTCTTTGTATAAGTGCCACTGA
AGTTCTTTAGTTTCGATAGCTTTATAGCCGTCGTGATCTTTACCTTTGATGTATGAGTTA
AGATTGATTTTCATTTTATTCTCCTTTGTTTGTGTAAGATAATACTATCACAAAGGAACT
ATACTGTAAACAACTTTATGCAATCTTTGGAAAATAAAAAAGGACTCCCGAAGGAGTCCT
CAACTTATGCTTTCTGCTTACCAAAACGAGAAGCATCATCTCGAAGAACCGCACGTGCTC
GGCGCATGATCTTCTCAACAGTTTGATTGATACGAGAGTTCGACCCACGCTTGTAGCCAG
CGCGTTTAGAATCACCAACTTTCTTTTCAACTGCTTTCTTTGCTTTAACTTGTTTTGCCA
TTATAAATTCTCTTTTAAATGAAAATGCAGGACTTATTGGCATTGCCTGCGCAAGCCCTC
AAGGGGGTACTTAGGTTTTGTATATTTACCGACAGGATAACCATAAACCCGTCATCATTC
ACATTCAAGAGGTACACCGTAAAACTGCCGGGGTCTTAAAACTATAATGATTCGCAAATC
ATTAATCAGACAGTTCGACGGCTCCTCGATTTTAGCTCACACTAAGGCAGTGAATCTCCA
ATAAATTACTTCAGTGTTACCACAAAGTGACGAACTGCTTTTCGTGCAGCAGAAGCCAGA
GGCTTAGCATATTTAAGTTCATCTTTTTCCTGAAGCTCAGCAGCTAATGCAGTTTGAGCA
GGATTCAGATGTTTAAAATAACGCAGGATTTCAAGAGCTTCGGCTTCAACATCAATAGAT
GCGCCATAGTTTTCGTGACCATTATTCCATGCGTTTCGTTGCAGTTCAAGAGCGTGTTGT
AATTGTTTAATCATTTAAAAATTCTCGTTAGAGATTAAAACTCGGTAGTCACGTTCTTCT
GAATTTCATCTTCTTTCGACAGATCTCTCAGTTGTAGACTACCACATAGAATTGTTCGGT
TAACTTATTATTCCGACACCCAATTCATATTATTATTTATATCACTTATAAAGACACGGA
ATAGCTTTATAGTGACAGGTAACGAATTTTTGCTTAATTTCTTTTGGCTGCTTAAGACCC
AGAGCTACAAAAGGATGTGGAACGTTTCGAATTTGACCAACTGGAAGAGAAGTCAAATCA
CCAACTTCACAGAAACCTTCAGGAACATCAGGACCAACAGAGTGAATTACACACAGTTCA
GGAACTTCACCTTGAACACGTTTACCGATAATAAGTCCTGATTCTGTAACTTCTTCATCA
CCGGCTTGTGCAGGTTCAGAAACTAAAATAACATATTCACCGACAGCACGAATTGGTAGC
TGTTGTACTTCAGACATCGTTTTTCCTTTTTGTTAACAGATGAATTAATAATAACAAATA
ATTCTTAAAGCATTTATTTACCAATAAATTGAAGCAAATGCTCAACTTTCATACCATTAA
CGGAAATCAATTTGTCAATAGAAAAACCTCGCCACGCACCAAGCTCAACATCAAATACTG
GAATCATGTCAGTAGATTCTTTCCGAGTAGATTCAGTCAATTTACCAGTTTGCATGGTTG
GCATAAAGTCTGCATCACGAGTACCTTTCATAGTACGAATAGTACCGTCAGACTTTTCAA
AAACTACGTTTGAAACACCCATGGACAGTTTAGTTTTCAAAATTTCACGAATTGCTACTT
TCTGCTCAGTTGTCAGTTTCATTTATTTACCTATTACAGTTTTAATATGAGTTGTTCCAC
GTTCTTTAAGGGTGGAAAGTAATTTTTGGCATTTTTCTAAATCAGATTTCCAACTATACG
GTCTATCAATACTAGTCCAATCAGTTTTATAATACTGTTTCCATTTAGAGAAAAAATATT
TCTTATACTCTACAGCAAATGAGATGTTCTCGTTAGAATAAGAACTAATTGCTGTAAGCT
TTACCAAACGAAATTTCATTATTCACCACAGAATTCGTTGATATTTTCCCAATTTAACTT
ATTCAAGTTTTTCTTAGGAACATTAAACACTTCAATACCTGCATTTCGCAGAATATCATC
CCAGCCAGGTTTATTTTTATCATATGTTTCGCAATAAACCAGCTTTTTAATACCAGATTG
AGCTATTGCTTTTGCGCAATCTGGGCAAGGAGAAAGTGTTACATACATAGTAGCACCTTC
AATAGAAGAACCATTTCGTGCAGCAAACAAAATTGCATTTAGTTCAGCATGAATTTCATT
TTTAGACGACCATTCAGAGTGAGCGCTACGATGTTCTTTCGCCAAAACAAAACGATCAGT
TGAACCAAATGATACGCATTCAGGCTTATGACCTTGAATGATAGTGTGTTTAGGCTTATT
CAACAACCAACCTTGCTCAGCAGCATAATCACAACAGTTCACACCCCCTGCTGGGGAACC
ATTATACCCAGTAGAAATAATACGTCCATTCTTTTCAATTACTGCTCCTACCTTCCAGGA
GCAACATTTTGATTCCTGTGATACTAAATATGCAATTTGAAGTACTGTACTCGCTTTCAT
TTCATAATCACCAGATAAGCAGATTTAGCAGTTTCAACACGATAAATTTCGTGACGAAGT
TTAGTTATACTTTTAATAACAGAACTAATTATATTCTGCCCATCTTTAAAGCGGTTTTTC
TTATCAATAAAAATTGCGCCAACCATCTTTTTGTGAAGCTCAACTGGATACTTCGTCACA
ATAATAGCATCATACACAGAAGGATGAATACTATTCACCAGAGTATCATTCATTAAAGTT
ATTCTAATGAACTGTGCTGTTTCAGAATCAAGCGCTCTATGATCGCCAGCATCATTTTCA
AGACAATTATCAATTATATCAGTTAAATTCATCATAGTACGCCATACACCCTTTGTGCTT
CAACTAATCCATCAAAATCCAATTTAAGATGCGATATTTGATCGCCATCACCTGGATTCA
CAATTACTAATACTGAACGAGGAGTTTCGGTAATAACACGAACCGATGTTTCAGGAAATC
GTTCAGAAACCTTATTTACTAATTCCTGCGCAAATAGTTTAACTTTTTCTTGGAATTCTT
TAACAGTAATTGGTTTTTCACTTAGCAGCATTTTGTTTTCCTCATTTGTTTGGTAGAGCT
ATAATATCACAACTCTACCGTAAAGTAAACTATTAAATTGCTTTGAATTCTGCTGTCTGC
GATTCAAAACGAATGTCGCCTTTGATAACTAACTCAGCATCAAGACCGAATACAACAATG
ATATGCGCGGAACCTGGATATAGCGTAATTGCAATAGAATCCACCTGGTCTGGAAGCAAA
GTGTTCAATACATGAGTCACTTGAGCATGAATTCGAAGCTCGGCTGCGTTATCAAGCTTT
TCAAACATATTATTAGCAATAATTTGGCTAAACACTACTTCTACGATTTTAGAATAAGTC
GGAAACATATTTACCTCACATAATTTTCTTCAAGCCAATCAATAACATCCAATGCATTAT
CAAAAGTTGAACCATCTACTTTGTCTTCTGTTTCATAATCAAGAACATCTAGGCCTAATC
TTCCGTTAACAATAGGCCATAGACAAAATAGATATTTCTTTTCTTTTTCAATTTTATCAC
AAAGACGATAAATCTTTTCTATGTTATTCATAAGTTTTCCATGGTAAAGGCAGTTTAGTT
TTCTTTACTGTTAGTTCAATATCAGGATTCTTTTCTCTTAATTTAAGGCATTCCTCCCAA
GCTCTGATTTCACTAGTGAATACACAAAATTGCCCATTACTAGTACCGACTAAACCACTA
TTTACAATAATAATAGCCCAAGTTTCATGATGCCACGCCATTAAAAATCTCCCGAAGCAA
CTTGCCAGCATTCAACACCGATACGACGCCACATCTCAACTACTTGAGTTCGGTCATCAA
TAGCTAATTTCACATCAAAATGTGGTGCGATGTGTTTCCAGAAAATTTCTTCTTTAACTA
CATCATCTTTACGGGTATCACCTTGTTCGCGTTGACACTGCATAACTAATGGAACGCCAG
CAATATCCTCAACCCATTTACGAGTCATACGATAATATTTCGTTGGGTCTTCTTCGGTTC
CACTTTCACGGCCTGAAACGACTACGATGTAATATCCTTGCTTATCGTACATCTTAGCTA
GTTCAATAACCATAGGATTGACAACATCAGTATCGCATTTTTCAAGGTCATAAGGACCAC
GACCATTCATTTTTGCTAATGTGCCATCAACATCAAAAATAACTGCTTTTGGTTTACCAG
GAGTCCCATTATATACTGGAAGACCGAGATACTCTCGCATGCTTTTATACATTGAGCGTA
AAACATCAATTGGTACTGCTTTAGTTCCGCGTTTTGAGTTACGTTTAACCAATTCAGTCC
AAGGAACATCAAACACTTTATGTTCAACTTTCCAGCCGTATTCTTTGGCAAAAGTTTCCC
ATGCTAGGCGACGTTCAGGATTCAAGTTAGTATCTGAAATGATTACGCCCTTAACAGAAT
CGCCACCGTACAGAATACTTTTAGCTGTATCAAACTGCATACCAGTTACGATGCCTTCTT
TCTTTTTGGTATACTTATACTCGTCGCGTTCTTCATGCGCCATAATAGATTGGCGATAGT
CATCACGATTGATATTATAAAACCCGGGATTCTTAGCAATAAATTCACGAGCCCAAGTAC
TCTTACCAGAACCAGGACAGCCAATAGTCAAAATAATCTTTTTCATCATTTAATTCCTAA
GAAAACTTCAAGAATACGAATATTATGCTCACGCCGTCCTTTGTATAATTCAGCTGTTGA
TTGATTCACTGATTTACTCTGAACATTGGATGAAATAAATTTTATCATGTGATTTTTAAG
CTGATGCATATCAAGCCCACGGGCTTTTGCTTCTTTTCGTAATGCTTTACCAGCATCATC
TAAAGCTTTAGCATGTTCAATGTCTTCGCTAATGCTTGATACATTTTCACGGCATACGTC
AATGTAACGGTCTGAACATTCAATATAACGTTCTAGCAGAGTTTTCATTTATTTTTCCTC
AACCAATGATTGAATATAATCATACAGGTCTTTAGATGCTTTACCCCACTTATTTTGATA
TTCATTTTTGAGATTAGCACGTGATTGAGCTAATAAAACATCATTAGTTGGAGGTAAAGA
TTCTAACCGCTGAATCTGGCGTCCATAAATCATTGCAGCCATCTCGGATTCATAAATCAA
TCCTTTGAGATGTTCAAATTGATGCCATGAAATCATTTACATTTATCCTCTTTTAACTCT
TGACGATAATAGCATATCATAGTTTTCTGGTCATGTACATATCGTTTTACATCATTAAGC
CAAATACGAAATTCCTGAGAATCTTCAAATGGCATACCGACCCAAGCTTTACCATCGATA
ACTTTAACTTGCCAAGATAGTTTAGCTTCGTCATATGACTTTATTTGTACAGGCCAATTA
GGATGAACTGTTTCTTTCTTTACTTCTAGAGGCTTTGTAGAACAACCAACTAGAAGACCA
ATAGATAATATTACTGCTGATAGTTTAATCATTTAGAAAGGTCCTGGATGTCTTCTGCGA
ACTTGTTGAAGGAGTTGTTGATTTGTTTTTCAACCAATCCTGGCTTATGAGCCACCACAT
CCGCCTTCTTTGCGTCTTTGCGCAGTTTTTCATTTTCACGCTCAATAGCAGCAATTGCCT
CACGATTTTTATTATTCATCGCATCAATATAATTATACTGAATTCGCAAATTATTTAATG
CTAAGGCGTTTTCATTGGCCGTTTTTGTAATTTCAGTAACCGATGTTTCTAATCTTTCTA
CCTTATTTTTTAAAATAATAGATGTTCCGCCAAATACTATTACAAGTAATAGCAAACCTG
CTGTCGTATTACTTAATTGCATAAAGTTTTAATAACCTCTATAATATCGTCTTGAGAAAG
ACCGTTAATTAAAATATGATGTTCAGCAGGAGATTTAGAAATTTTAAAGCATGCCTCAAC
ATCTTCTGCCATATCCGATGCGCTACGATTTGGATTACTAATTCCAAGACGATGTTTTCC
CGTTAAAGGATTAACGATGATATAGCATTTACAGTTGTTAATATGAACATTAGGTTGAGT
CTGATTAATGAACACATCACAATCATACTTAGCGAGTTGATTTTCTAAAAAGACTTTCAT
CTCTTCAACCGCATCAGGAAGCATATCACGGGCTTGCTCAAGACGACGATTTCGATATTC
TTTAATGGTCGTTTTCCGCTTGACTTGCTTAGCTAAATCTTTCTTAAGATCGGTGATATA
TCCAACTCGACGATTTCCTTTGAATACAGAAATCCCATCTGTAGTATCACCGTATGCTTC
AACGACCATTTCAGTAGTAATAAGCTGCAAATCCATCATAAAGTCCTCATGTTATGTCAG
TAAGACTACTATAACACAACATGAGGGACTTGTAAACAGCTTAGTATCCTTCTGGGATAA
ATTTTTTATAATTTTTCAAAAAATTCTGTTCGATTTCACACATAACCTTTTCTTGACTAT
CGTACCCCTGGTATAGGCTCATAATGATACCGAACAGGTGATCCATTCCAGCACCTTTAG
CAACACCTTGCGCTTCCATCGCATAAGTCTTTCTATCCTTACCACAATGCTTATTATGAC
AGTCAAGAACTAAAAACAGAGCTCGGTCTAAGTACTTCAGATAAGTCGTTTCAAATGCTT
CAATTTTTCTGTATGAATATTCATCGTCAGCGTACATTGCTTTAAGATCATCTGATGCAC
CATCAATAATAGTCTTAAACAATTTTTCTGGATTATCTAATGAACTTTTTGTGCTATGAA
GAGACACGTACCAGTCAGACTTAATTTTAAAATGAGAACCATCTTTCATTACAGCAACAT
AGCCTTCGATGTTTTCTGCATTTTTAGCTTCTTCTACCCATTTAGGGCTATCAATTTCGA
ATCGTTCAACTAGATATGGACGAAGAGCAGCATCTTTATAAATATCATCGTATGAAATGT
ATTCACCCGTTTCGTTTTCACGAATATTCAATAAAATGATTTTCATCTCTTGATAAGCAA
GAACGATTCTATTAGTTGGAGCGACGAATTCGAAGTTAGCAGTAAATCCATCTTCGGCTA
ATTCTTTAAGTCTGTCGCGCAACGGGTGATGATTAATATTCATCAAAATTCCATTAGCCA
TTAAAGCCTGTTCGGATTTGATTGAACCCTTTGATTTGAACAGAATTTCATCACCGTCTA
AATAAGTTGATACCAAAGACCCGTCTTCTTTTGTTAGAATGTAATCAACATCATTTAAAT
CGATATTCATCGTGAATGGGTTTTCATTCAAGTTAAAAAACTTTTCCATAGGACGAGAGG
CGATTCTTACTGGTTTTTCTCCATCCATTTCAAACATAATTCCACGACATTCTAATGCGT
CTGGAAGTAACCAATCAGAATAAGATGCATAATTATATGAGAAAATTCTGTAAGTTCTTC
CAGATGCACTTACATCATCCGAGTAAAAAAACTTACGCTGTGAATCCTTACACAGTTCCA
TTAAATTGTTAAAAAGTTCTTGCATTGTGTATCCTCTTTTGTGTTTTGAATATAGTACCA
CACTCCATGTGGAAGCATCATTTTTTCTTATGTTGAATATTCCAAGGCGGGTTAAATAGC
TTAATGAATAGTGGCTCCTCTAGGTCAATCGTTGCGATTGTCATTGTACCTAACTCATTT
GTCATAGAAAGATTAAAACATTGGCGGGCGTAAAATTCAACTTTGCTTCCTTCCTTTAGC
GCAGCATGAATTAATGCAGATTTAGTAGAATCAGACGTTTTGTCTTTACGGTTAATAGCA
GTTCTATAATAGTTTATTCTTTTACGTAAATTTTTAGTTTTTCCAATATAAACAAGCTCA
TCATTTATAGCAATAGCATAAATTACGTTATACTTGTTTGGAATAGATAATTGTTTTATA
CTTCCGTTGTCGTCTAATTCTAGTTCAGTATATTTAATAAATGAATATTCTGTTGCAATT
TCTTTCATAATAAAATGGGCCTTGCGGCCCACTCCTTAAAAGTATTTTTTAAAACTCATC
ATAACTTTATCATCAACATCATTATCAATCTGTGCAACAAGATAAGATGACAGTTCTACT
TCTTGTGGCGCGGATTGAACATTATCAGAATTAAGATATTCACGAATCCAAGGATATGGA
TGTTTAACCGGAGCATCGGTAATTGGGCATGGAAGACCACACTGTTTCATACGAGATACA
GTTAAGTAATCAATAAAGCTCCACATGCTATTTGTATTTAATCCAGGAACATCGCCATCT
TTAAATAAATGAACTGCCCAATCTTTTTCTTGGCGGTTAACTTCCATGAAAATATAAACT
GCTTCTTGTTCACACTCTTGAGCAATTTTAACCCATTCATCGCCATCAGTACCAGATTGA
AGTTGACGAATAATATATTGTGTACCTTTAAGATGAAGCTGCTCATCACGTGCAATGAAC
TTCATAATCTTGGCATTACCTTCCATGATTTCCATGTTCTTATGGAAGTTAAAGGTACAT
GCAAAAGATACATAAAAACGAATAGCTTCTAAGGCATTAATAACGTGCAAACAGAGGTAA
AGAGATTTCATTAGCTCACGCTTCCAATATGTCTCATGCTCTATGGCATCTTTAATATCA
TCTTCGTCTGCGTTAATTTCTTTTTGGTATTCGATATCAGCTTTAGCGTTTTCCCAATAA
CGAGTTTTAGTCAGAACATCATCATAATAACGTCCAATGGATTCAGCACGTTTCATAATA
GCTTCATCTAATACAATTTCATCAAATACCTTCGATGGATCAGTATAAAGATTTCGCATG
ATATGAGTATATGAACGGCTGTGAATAGTTTCACTAAAAGTCCATGTAGCAACCCATGTG
TCAAGACTTGGGTCTGAAATTAACGACATAAGTACAGCAGACGGCGCACGACCCTGAATG
CTATCCAAAAGTGATTGATACTTCAGGTTATTAGTAAAAATATTTTGCTGGTACTGAGGA
AGCTTATTAAATTGTGCAGCATCCATCATCAAGTTTACTTCTTCAGGACGCCAAAAAAAT
GATAAAGATTTCTCAATAAGTTCTTCAAATACTCTATGTCGTTGAATATCATATCGAGCT
AAACCCAATCCAGAACCAAAAAACATCGGCTCAGTCAAAATATTAACAGGGGATGTATTA
AAAACTGTACTCATTTAGAATCCTTAAATTTACATTTATCATAATGCCATCTTAAAGCAT
TACCTTTATTAACTTTCTTGCCACAATGCGGACAAGGCGGATACTCTGTACCTTGCTTAG
TTCTCAAAGAAATCAAATCACGGGTTTCTTTAGTATGAGGAACATCTCTTGTCGGAGAGA
TTGTACCATACATCGGATTAAGCACGCCGACTTTAGCAGCAGCTATATTCTTTTTAGCTT
CTTCGGTTTTAGGTTTTCTCATGCGAGCTAAATGCTCTTTGGTAAATTTCCTTCCTTTAA
GAGCTCTACTTATCTTTTCTCTAGTTTCCATAGAAACTTCACGTCCTGTAGCAGCTTCAG
ATAAACGTCGTCTACCTAATTCGTACAGTTGAGAAGAAATTTTATATGAGCGATTTTTAC
CAGTCAAGCACATTAAACCAAAAGCTTTCTTTAATCCTGGGGTGTCATATATTTTACATA
AAAGCCAATGAGCTATAAAATGCTCTCTACCTGTTAATTCAACTAAATTTTCTTTATCAT
CAGAACCTCCCATACATCTAGGGATTATATGATGAGTCTCTTTATATCCTAATAAAGGTT
CCCGGGTTTGAGCCCGGGAAATTAAACTATTATATACGTTTTGATAATTCATTACAATTT
ACAGGATGAACAATCTTCAGCTTTTGGAGTTTCTATTTCATAATCATCAGTACCGGAACC
ATCACGGGTATTATGATAATAGAAATTTTTTCCGCCAAAATACCAAAAATACAAAAGGTC
ATCAATCATTATTGACATTGGAACCTTGCCTTTAGGGAAGATTTGGGGGTCATAGTATGT
ATTCGCCGAAGCTGATTGACAAACCCATTTCAGCATAATAGCTACCTGCGTAAGATAAGG
TTTATTACCTTTCTTAGCTAATTTCCATGTATAGTCGTAAAGGTCTATGTTATGCTCAAT
ATTGGGCACGACCTGATTAAAGGAGCCCTCTTTTGATTCTTTAACAGAGACTGGTCCACG
TGGAGGCTCGATACCGTTTGTACTGTTAGAAACTTGGGAAGATGACTCACATGGCATAAG
TGCTGATAATGTACTATTACGGATGCCAAAGAGCTTAAGGTCTTCCCGCAGCGCCGACCA
GTCACAAACGTATTTTGGAGCTGCGATTTGGTCAATCTTTTTATTGTACCAGTCGATAGG
TAATTCGCCTCGAGACCAACGAGTGTCTGAATAATATTCGCAAGGTCCTTTTTCTTTGGC
GAGCTTAATGGATGCTTTAATGAGTCCATACTGTAATCTCTCAAATAGTTCATGTGTTAA
ATCGTTAGCATCTTCATAAGAAGCAAAGTTACTTGCCAGCCAAGCTGCATAGTTAGTAAC
ACCTACACCAAGGTTTCGACGCTTTTTAGCTTTTTCTGCTTCAGGAACTGGATATCCTTG
GTAATCCAAAAGATTATCAAGAGCACGAACTTGAACTTCTGCCAATTCATTAATTTTATC
TTGGTCTTGCCAATCGAAGTTATCCAACACAAATGCAGAGAGAGTACACAACCCAATTTC
AGCATCAGGGCTATTCACATCATTTGTTGGAATAGCAATTTCACAGCACAAGTTACTTTG
ACGAATAGGTGCCTTTTCACGAATAAACGGAGTATAGTTATTCGTATTATCAATGAACTG
TACATAAATCCTTGCTGTTCCTGAACGTTCAGTCATGAGCAATTCAAATAGTTCACGGGC
TTTAATACGCTTTTTACGAATATTAGGGTCTTTTTCTGCTGCTTCGTATAATTCACGGAA
ACGGTCTTGGTCTTTAAAATAAGAATAATAAAGCTCGCCACCCATTTCATGCGGACTGAA
CAAAGTAATGTAATCGTTCTTTCCAAATCGTTCCATCATCAAATCATTCAACTGAACACC
ATAATCCATATGACGGATGCGGTTTTCTTCTACGCCTTTGTTATTTTTCAAAACGAGAAG
ATTTTCAACTTCCAAATGCCAAATAGGATAATAAGCAGTAGCAGCGCCGCCACGAATTCC
ACCCTGTGAACATGATTTAACTGCAGTCTGAAAATGTTTCCAAAAAGGAATAACACCGGT
ATGGCGTACTTCACCCATGCCAATCTTAGAACCTTCGGCACGAATCATACCAACATTAAT
ACCAATTCCAGCGCGTTTAGAGATATATTCAACAATTGAAGCGGAAGCCTTATTGATAGA
CTTCAACGAATCTCCTGCCTCAATAACAACACATGAACTGAACTGTCGAGTCGGAGTACG
ACAACCAGCCATAATAGGAGTTGGCAGTGAAATCTGTCGAGTAGATACTGCTTCATAAAA
ACGGATAACATGTTTTAATCTATCAACAGGTTCATCTTGATGCAGTGCCATTCCAATAGC
CATAAATGCAAACTGTGGAGTTTCATAAATTTGACCAGTGGTTTTATCTTTAACTAGATA
TTTTTCTTTTAATTGCATCGCCCCGGAATAAGTAAATTCCATATCCCGCTCGTGCTTAAT
TTTTGATTCTAAAAATGTAATTTCTTCTGCTGAATATTTTGACAATAATTCAGGGTCATA
TTTACCTTCATTTACACAGTAAGAAATATGGTCAATAAATGAACGCGGTTCATACTGCCC
ATAAACATGCTTACGAAGAGCGAACATTAAACAACGTGCAGCTACATATTGATAATCAGG
CTCTTCAACCGAAATAGAATTCGCAGCAGCCTTAATGACAATAGTCTGAATATCATCAGT
TGTCATTCCATCACGGAGATAAGATTTAATATTTTCATATAATTCATAAGGATCGACTGA
TGTTCCTTCAGCTGCCCAAGATAAAACTTTAATAATTTTTTGTGGGTCAAAGCTCTGAGA
AACACCACTACTTTTGATAACATTAATTAATTGCATAAGTCCTCAACTTGAAAATCGTCT
TTAAACAATCGGTTAACTATATGAGCTATTATATCACCATGACACGGCTTTGGTTTACAT
GTGCATCCTAGCCTCATTCCACGTAAAGGCTCTAAATGTGCTTTAGTTATTTCTCCGGAT
TTAATTCGACGTATAAAATCTTTTTTGAATAATTCAATGGCAGCCTCCCGGCTGCCAGCA
TCTTTACCGACGTAATTTCCCCAAAATGTACCACGGTGAATATTAACATCAAAGTCGGAT
TTGTATTTATTCACTACCCGGCATAGACGGCCCACGCTGGAATAATTCGTCATATTGTTT
TTCCGTTAATACAGTAATATCATAGTAACAGTCGGAAGAAGTTTTAACTGTGGAAATTTT
ATTGTCAAAATACTCACGAGTCATTTTATGAGTATAGTATTTTTTACCATAAATGGTAAT
AGGCTGTTCTGGTCCTGGAACTTCTAACTCGCTTGGGTTAGGAAGTGTAAAAAGAACGGC
ACCAGAAGTATCCTTAAATCGTAAAATCATATATCCTCTCAATTAAATTAAAATTATACC
GCCATCTTTCCTTTAATTGACGGATGAGATACATAGTTGTTAAGAACAAAATTATGCGGC
TTTGCGAATTGACTCAACCAAAATACCTGCGATTCTGTGCCCCATTCATCAAATTCATCT
GGAAATTTTAATTGTAATTCGCATAAATCCATAGGTTCACGACGCAAAATTTCTTTACAT
TGTTCTACGTGATTCATATAGATATGAGTATTACCACCAGAAAATATCAAATCTCCCGGA
ATAAGATTACACATCTTAGCTACAATATGAACTAACGTAGCATATGATGCAATATTAAAT
GGAAGACCGAGGAAAACATCTACCGAACGTTGATACCACTGCAAATCTAAATAGCCATTA
CGCACATTAAACTGATAGAACATATGACAAGGCGGTAATGCCATATATTTAAGTTCAGCT
GGATTCCACGCAGAAACAATTTGACGCCTATCATTTGGCAGTTTTTTAATACGATCAACA
ACTTCTATAATTTGGTCTACACCGCCAAAATCACGCCACTGTTTTCCATAAATTGGACCA
AGTTCACCGCTATGGTATCCTAAATCTTTTGCCTGATTTTCGTAATTTTCATCCCAAACT
GTTTTGCCTTGGATTAACGAATCGTGTTGAATTAATCGTAAATCATTAACATTTGTGCTT
CCTGATAAAAACCATATTAGCTCAGCAATGCATGCATTCCAGGCGAGCTTCTTAGTTGTT
ACTGCAGGAAAACCTTTAGTTAAATCCCATCGTAATTTAGTACCGAACAGAGCAATTGTT
CCTGTGCCCGTTCGGTCATCGGTTTCATAGCCATTTTCAAAAATGTCTTTAATTAAATCT
TGGTATTGTTTCATTTAGTACCTTATATAAATTATAATACATTTTATGAAGCTGAATAAT
CAATACGGTTTAGCATCAAATTTTCTCTCAATTTCAGGCGTGAAATATAATTCTTTACCG
CGTTTGGAAAAGCGACCAATAATATGATAATTATTCTCATCAAACGTGATATTACCAATA
TCCATAGCTTTCAACCAAATATCGATATTTCTATCCAGCTTTATATCAAAATTCCAATAC
GGAGAACTATTACCGAAAATAATGCAAGCGGATTCAGTGAAACAGCTACTATAAATCTTG
TCTTTAGGAACTACTAATTGATAGACACCTTTAATAAACTGAGGACCTTGCCATTTTGGC
TGTTTCTCGTCTTTTTCTAACAGAATAGGGTAATAATTAAAATTCATATTTCCGCCACGC
GTTATTTCATTTATATACTGATTCCGTAAGGGTTGTTACTTCATCTATTTTATACCAATG
AGTTTCAACCATTTCACGCTTGCTTATATCATCAAGAAAACTTGTGTCTAATTGAACCGT
TGAATTAACACGATGCCTTTTAACGATGCGAGAAACAACTACTTCATCTGCATAAGGTAA
TGCAGCATATAACAAAGCAGGCCCGCCAATTACACTTACTTTAGAATTCTGATCAAGCAT
AGTCTCGAATGGTGCGTTAGGGCTTGACACTTGAATTTCGCCGCCAGAAATGTAATCTAT
ATATTGCTCCCAAGTAATATAGAAATGTGCTAAATCGCCGTCTTTAGTTACAGGATAATC
ACGCGCAAGGTCACACACTACAATATGGCTACGACCAGGAAGTAATGTAGATAATGACTG
GAACGTTTTAGCACCCATAATCATAATTGTACCTTCGGTACGAGCTTTAAAATTCTGGAG
GTCCTTTTTAACTCGTCCCCATGGTAAACCATCACCTAAACCAAATGCTAATTCGTCAAA
GCCCTCAACCGTTTTAGTTGGAGAATAAGCGAATACCAATTTAATCATTTTAATTCCTCA
ATATAAAATATGTCAGACGGTTCAATATAATTGCTCAAGCGCTGACCATGATAATTATAA
ATGCAAAAGTAAAATTGGTTTTTAAATTTATTTCGCACTAAAGAAACCGTATAGTAATCA
CCGTTTGAGGTTTGAACGACAAACAAATTATCATAATAAATTAGATTTTGGTAGATATCA
GCGATATCTATGTCTTCCCCAACCTTAAGCAAATTTAGTGTTTTCACTATATTTCCTCAA
ACAGACTTTTTCACAATTTTCCAATCAGCTTTAAACTGCTCGACGTCAGAATGGTAAATC
CAAAATCCTGCGCTTTCTCCGTCTTCATAAAGAGGACATCCATCGCATTCATCTTCCCAT
CCCATGTCACGTAAAAGATGTTCAGCTTTTTCAACGAGATCAGAATCTTTACCGATGATA
TTAAAATACCATTTACCTCTAACTTCTGAATCTTTGATGCTCTGGCGTTGTAATCTCATT
TTATTCTCCTCAGTAGTTGATAGGGTAATAGTATCACACTACTACCCTGTTGTAAACTAC
TTTTTGAAAGTTTTTCGCAAAAGTTCAATGATTTCATCTACATTGTTTTCGTCAACAATG
CAGTGAATTTTTGTTACGCCAGAAACTATACCTTCATTAGCGGATTGAGGCTTTTCTAAA
GTTACCTCAGTAAAGTATTTGAATTCTTCAGAGTAAATCTCAAAATACGTCTCAAGTGGG
CCACCCGCCATGTATTTAGTGCCATCTTCCATAGTTACACGTACCACACATTCACCAGCA
CAATCATCACTTTCCATTTCATCTACAACAAAACTAGGTCCGTGCTTCTCTATTAAATTT
AGCATCATTACATTGCAACGGCACTCGTTAGCAAAGTCATTTTTAAATAAAGGGTTAATG
ATATAAGTTTTTCCAACTTCCATTTTGATTTCCTCAGTTTAACGGGGCTATCAAATAGCC
CCTTGATAATTATTGTTCAATCAGTCCCATGTAAAATTCTGCGTCTTCAGAATCCATACC
ATCACAATACTCATTAGCCATAAAGCGGGTGAGGTCTTCAAGAGGACCTTCAATAACGAT
TTGAATACTCCAAAACTTAGAATCTTGCACGCTTGTGATACTAAGTTCAGGATAACGATT
ACGAATAATTTCTTCGATATATTCAAAATCAACGATGTCAATATCAACTTTAGCCATATT
ATTTTCCTCTTTAATCATCAGCAGTATTGCCGATAGTTGTATAGTACCATGGAAGGACAA
GGATGTAAACCGTTTTGTGAAAAAATTTTTGAAATAAAAAAGGGGACCCTAGAGGTCCCC
AATTAATTAGTAATATAATCTATTAAAGGTCATTCAAAAGGTCATCCAGGTCCGTGTCAT
CAGCACTAGATGAACTGCCAGAGCTTGAGCTCATAAAATCATCTTCAGTTTTTGTTTTGA
AGTCATCAACATTAAATGCATCCAAATCATCAGCAACTTTATCGGCTTTCTTAGCAGCAG
TTGCTGCGGCACCACCCATAGCAGCAGTTCCCATAACTTGACTGAACTTAGTGCTCAGTT
CTTCAAACGATTTGAATTTATCTTTAGAAGTCATTTCAGAAAGGTCAACCATTTGTTCGA
ACAGTTCTTTCTGGAAAGATTCATCATCAATGTTTGGAATCGCAGATTGATTCAGGAATT
TAGATTCGTCGTAGTTACTAAAACCAGAAACTTGTTTAACTTTCAGTACAAAGTTAGCAC
CTTCCCACGGACAAGTTACATCAACCGGAGTTTCACCCATTTCAACATCAACTGCAATCA
TTGCATTGATTTTATCCCAGATTTTCTTACCGAAACGGTATTTAAATACTTTACCTTCAT
TTTCTGGAGCAGCTGGGTCTTTTACAACAAGAATGTTAGCCCAGTAAGAAGTTTTACGTT
TAACAAGACCGTATTCTTTATTGTCAGTGTTGTACAAATCATTTTTATTGATGTACTGAC
ATACTGGACAAGAATCGTAATCACCGTGGGTAGATGAACAGTTTTCAATATACCATTTAC
CGTTTTTCTTGAAACCGTGATTTACAAGAATTGCGAATGGTGCTTGTTCATCATTTTTAG
ACGGAAGAAAACGAATTACTGCTTGACCGTTACCCGCATTGTCGAGTTTCAGTTTCCACT
CGCCTTTATCTTCAGAAGAAAAACCACCTTTATTTCCAGCCAGTTTAGCCATTTGTGCAG
CGAGTTCAGCAGTAGATTTACGTTTAAACATTTTTATTTCCTTTTTAATTTAATTAACAG
TTGGTGCTATGACGATGTATGACCTCATAGCTGGTCAGTGAGATAATTATAATCTATTTA
TAATAAGCAATTAATACTTACAAGATTTCACAGTTTCAATAAAAACACTTTTAGCTTTCT
GTGAATCAATATTTAAAATTTTTCTATAAGCCTTTAACTTTATAGAATAATTATTCCAGA
CTAAATTATCAGTCTGTTCATCATGTTTATCGATTATATTTAAAAACGAATCAAGCAAGA
TAAACGTCTCAAACGAAATTATATTCGATTGAAGTAGTTTAAAAATATAACTTGATTGAA
CTTTTGGATTATACTCAAAGATTTCTTTAAAAGCAGAAACTTCAACTTTTTTACTAAAAT
AGTAAATATTGCGAATATCTTCTTCAAACTTAAATTTAATTTGCTTTAAGCGTCCGATAT
ATTCACGATAAAACACAAGTGCATCAGCGTCAGAGATGTCACCAATCCAAGCATCTTGGT
TAGCAACCAGATTGCTTATAAAGATTAAAGCAAGTTCCTTTAATTTATATTTTTCTGATA
ACTTCTGGAAAAAATACTTATCCCTTCGCTTTTGATAAGCGGCATCAGACACCCGCATGC
ACCAATTATACTTAATTACATCATACTTTCCATTCATATGTTGTTTTATCATTAAGTATA
ATTTATAAACTGATTTACCATCAATATATCTTTCACCACCAGCAGGCATGCGGAGTTTAA
TCATAATAGAAAATCTAATGTATTAGTTTTTTCACAACGAACAACAGAAGGACGTAAAAG
ATTTTCGTCAATAGCTTCTGACTGAATTTTTTCAATTATACCCGAAGGAATAAATTTAGC
AAATTGAGTTTCAGGAATAGAATTTTCTTCTAAGAATGCTGTTGTAGCTTCAAGATAACT
CATTCCAAACTCTTCTACCATTTTTTCAATAATAAATCCATTTTCTTGGCGGTCAAGAAG
CTTTGCAATTTCATCCTTTTCTTTCTTAATTGAAAGTTCTTTTTCTGAAAGACCGGTCTC
ATCGACCGGACGAATATCATTTAGAGAAAACTGTGTCATAAAGTTCAACTACCTCTTCAG
TTTCAGCTTCAAACACATCACGGTTATCTTTATGATACAAAGCTAACAGACGATTAAACA
TCTTACCATCAACGCCAAGTTCATCTTTGGCACGAATTCGAATATCTTTAATCAGTTCAT
TATAACCGGAAATTTTCAGTTTATGATCAGATGCTTCTTTAATAAATTTAGCCAAGTCTT
CGCCATGGATAGCTTCATCAAATTCAACCATTTCTTTTTTAGCCATTATTCACCTCAAAA
TTCATTAATGCTATTAGTTAATTTAGAAAGACCCGCTTTTACAAAATATGAATAAATTTT
GCCACGAGGTGGTAATTTATATGAATTATAGTAATTCACAATGTTTGAAGCAATATTATC
AGGAATATAATCAAAATCAATTAGAACTAAATTTTCTTTATAACGATTATATTCAGATTC
TGTGAGAAGCACCTTAGCTTGCTCACGGTCATTAGCAATAGCTTCAACGATTGAAGTTTT
CATTGAAGGAGTTCGTTCACCTTCAACTCTGGTAAACCAAAAGTCAGATCGTACTTTAAC
TGAAGCAACGTTATCCTTTTTGTCGCCTTTAAGGATTTTAGTCATACAGTCAATTTCAGC
AGAACCGCTTTTAATTTTAACCCATTTCTTGTGCATCGGTGACCATTGCTTAACATTTGG
GTATTTGTGAAGCTGTGTAAAGTCACCATCCGACGAAATGATTAAAATCTTATGTCCTTC
TAAAGAGAACTTTTTAACAAGAACAGCAATGTGGTCATCTGCTTCATACTTATCAATATC
CATAACAATGTATGGCATATAAGCTTTCAATTCATCTATAACTTTATGACTGGATTCAAA
ATAACCTTCCCAGTCCCAAGTAGATTCTTCTCGTGCTTTTCCACGGTTTTTCTTATAATA
ATAAGCAAAATCACGACGCCAGTATCCAGATTTCGCGTTATCAATACACAATATAATTTT
AGTGTATCCAAGAGTTTTTGCTTTTTTGACATTAAACTTAATTGAGTTCAATATCAAATG
ACGAACCATTGATAAATTAATTTTTTCTTTATCTGGAAAGTTTACCAAAGCAGTTGAAAG
CGCAATTTGACTAAAGTCAATTAAGCAGATTCCTTCTTTGTAATCTTCATCCAGCATCAT
TTCTAAATCCATATGAACCTCGTTCAATTAGTGAGATTTCTATTATATACCATCCGAATC
TTAAAGTAAACAAGTATAAATACTTATTATTGAAAACACAATAGGAGCCCGGGAGAATGG
CCGAGATTAAAAGAAAGTTCAGAGCAGAAGATGGTCTGGACGCAGGTGGCGATAAAATAA
TCAACGTAGCTTTAGCTGATCGTGCCGTAGGAACTGACGGTGTTAACGTTGATTACCTAA
TTCAAGAAAACACAGTTCAACAATACGATCCAACTCGTGGATATTTAAAAGATTTTGTAA
TCATTTATGATAACCGCTTTTGGGCTGCTATAAATGATATTCCAAAACCGGCAGGAGCTT
TTAATAGTGGACGCTGGAGAGCATTACGTACCGATGCTAACTGGATTACAGTCTCATCTG
GTTCATATCAATTAAAATCCGGTGAAGCTATTTCGGTTAACACTGCAGCTGGTAATGATA
TTACATTTACTTTACCATCTACTCCAATTGACGGTGATACTATCGTTCTCCAAGACATTG
GAGGAAAACCTGGAGTTAACCAAGTTTTAATTGTAGCTCCAGTGCAAAGTATTGTAAACT
TCAGAGGCGAGCAAGTACGTTCAGTACTAATGACTCATCCAAAGTCACAGTTAGTTTTAA
TTTTTAGTAATCGTCTGTGGCAAATGTATGTAGCTGATTATAGCAGAGAAGCTGTAGTTG
TAACACCAGCGAATACTTATCAAGCGCAATCCAACGATTTTATCGTACGTAGATTTACTT
CT GCTGCACCGATAAATATTAAACTTCCGAGATTTGCTAATCATGGCGATATTATTAATT
TCGTTGATTTAGATAAACTGAATCCACTTTATCATACAATTGTTACTACATACGATGAAA
CGACTTCAGTGCAAGAAGTTGGAACTCATTCCATTGAAGGCCGTACATCGATTGACGGTT
TCTTGATGTTTGATGATAATGAGAAATTGTGGAGATTGTTTGACGGGGATAGTAAAGCAC
GTTTACGCATTATAACGACTAATTCTAATATTCGTCCAAACGAAGAAGTTATGGTATTTG
GTGCGAATAACGGAACAACTCAAACAATTGAGCTTCAGCTTCCTACTAATATCTCCGTTG
GTGATACTGTTAAAATTTCCATGAATTACATGAGAAAAGGACAAACAGTTAAAATCAAAG
CTGCCGGTGAAGATAAAATTGCTTCTTCAGTTCAATTGCTGCAATTCCCAAAACGTTCAG
AATATCCGCCTGAAACTAAATGGGTAACTGTTCAAGAATTAGTTTTTAACGGTGAAACTA
ATTATGTTCCAGTTTTACAACTTGCTTATATAGAAGATTCTGATGGAAAATACTGGGTTG
TACAACAAAACGTTCCAACCGTAGAAAGAGTAGACTCTTTGAATGATTCTACTAGAGCAA
GATTAGGCGTAATTGCTTTAGCTACACAAGCTCAAGCTAATGCCGATTTAGAAAATTCTC
CACAAAAAGAATTAGCAATTACTCCAGAAACATTAGCTAACCGTACTGCTACAGAAACTC
GTAGAGGTATCGCAAGAATAGCAACAACTGCTCAAGTGAATCAGAACACCACATTCTCTT
TTGCTGATGATATTATCATCACTCCTAAAAAGCTGAATGAAAGAACTGCTACAGAAACTC
GCAGAGGTGTTGCTGAAATTGCTACGCAACAGGAAACTAATGCAGGTACTGATGATACTA
CAATCATCACTCCTAAAAAGCTTCAAGCTCGTCAGGGTTCTGAATCATTATCTGGTATTG
TAACCTTTGTATCTACCGCAGGAGCTACTCCAGCTTCTAGTCGTGAATTAAATGGTACAA
ACGTTTATAATAAAAACACTAATAATTTAGTTGTTTCGCCTAAAGCTCTGGATCAGTATA
AAGCTACTCCAACACAACAAGGTGCAGTAATTTTAGCAGTTGAAAGCGAAGTAATTGCTG
GACAAAGCCAAGAAGGATGGGCAAATGCGGTTGTAACGCCAGAAACGTTACATAAAAAGA
CATCAACTGATGGAAGAATTGGTTTAATTGAAATTGCTACGCAAAGTGAAGTTAATGCAG
GAACTGATTATACTCGTGCAGTCACTCCTAAAACTTTAAATGACCGTAGAGCAACTGAAA
GTTTAAGTGGTATAGCTGAAATTGCTACACAAGTTGAATTCGACGCAGGCGTCGACGATA
CTCGTATCTCTACACCATTAAAAATTAAAACTAGATTTAATAGTACTGATCGTACTTCTG
TTGTTGCTCTATCTGGATTAGTTGAATCAGGAACTCTCTGGGACCATTATACCCTTAATA
TTCTTGAAGCAAATGAGACACAGCGTGGTACACTTCGTGTAGCTACACAAGTTGAAGCTG
CTGCAGGAACATTAGATAATGTTTTAATAACTCCTAAAAAGCTTTTAGGTACTAAATCTA
CCGAATCGCAAGAAGGCGTTATTAAAGTTGCAACTCAGTCTGAAACTGTGACTGGAACGT
CAGCAAATACTGCTGTATCTCCAAAAAATTTAAAATGGATTGTGCAGAGTGAACCTACTT
GGGCAGCAACTACTGCGATAAGAGGCTTTGTTAAAACTTCATCTGGTTCAATTACATTCG
TTGGTAATGATACAGTTGGTTCAACACAGTCGTTAGAATTATACGAGAAAAATAGCTATG
CAGTATCACCATACGAATTAAACCGTGTACTCGCTAACTATTTGCCATTAAAAGCAAAGG
CTGCTGACGCAAATTTATTAGATGGTCTAGATTCATCTCAATTCATTCGTAGGGATATTG
CACAGACGGTTAATGGTTCACTAACCTTAACCCAACAAACGAATCTGAGTGCCCCTCTTG
TATCATCTAGTACTGCTACGTTTGGCGGATCAGTTTCGGCAAACAGCACATTAACTATTT
CTAATACTGGAACTGCAACTCGTCTGATTTTTGAGAAAGGACCTCAAACTGGAACTAACC
CAGCACAGACGATGACTATTAGAGTTTGGGGAAATCAGTTTGGCGGCGGTTCAGATACAA
CACGTTCTACTGTATTTGAAGTTGGTGATGAAACATCTAATCACTTTTATTCTCAACGTA
ATAAAGCTGGTAATATTACGTTTAGCATTAATGGTACTGTGATGCCAATAAATGTTAACG
CTTCCGGTTCATTGAATGCGAATGGCGTAGCAACATTTGGTAGTTCAGTTACTGCTAATG
GTGAATTCATCAGCAAGTCTGCAAATGCTTTCAGAGCAATAAACGGTGATTATGGATTCT
TTATTCGCAACGATGCTGCTAACACCTATTTCATGCTTACTGCATCGGGTGATCAGACTG
GCGGATTTAATGGATTACGTCCTTTAGCTATTAACAATCAGTCCGGTCAAGTAACGATTG
GTGAAAGCTTAATCATTGCCAAAGGTGCTACTATAAATTCAGGTGGTTTAACTGTTAACT
CGAGAATTCGTTCTCAGGGTACTAAAACCGCTGATTTATACACCCGTGCACCGACATCTG
ATACTGTAGGATTCTGGTCAATCGATATTAATGATTCAGCTACTTATAACCAATTCCCGG
GTTATTTTAAAATGGTTGAAAAAACTAATGAAGTGACTGGACTTCCATACTTAGAACGTG
GCGAAGAAGTTAAATCTCCTGGTACATTGACTCAGTTTGGTAACACACTTGATTCGCTTT
ACCAAGATTGGATTACTTATCCAACGACTCCAGAAGCACGTACCACTCGCTGGACACGTA
CATGGCAGAAAACCAAAAATTCTTGGTCGAGTTTTGTTCAGGTATTTGATGGAGGTAACC
CTCCTCAGCCGTCTGATATCGGTGCTTTGCCATCTGATAATGCTACAATGGGGAATCTTA
CTATTCGTGATTTCTTACGAATTGGTAATGTTCGCATTATTCCTGACCCAATGAATAAAT
CTGTTAAATTTGAATGGATTGAATAAGAGGTATTATGGAAAAATTTATGGCAGAGTTTGG
ACAAGGATATGTCCAAACGCCATTTTTATCGGAAAGTAATTCAGTAAGATACAAAATAAG
TATAGCGGGTTCTTGCCCGCTTTCTACTGCAGGACCATACGTTAAATTTCAAGATAATCC
TGTTGGAAGTCAAACATTTAGCGCAGGTCTTCATCTAAGAGTTTTTGACCCTTCCACCGG
AGCATTAGTTGATAGTAAGTCATATGCTTTTTCTACTTCAAATGATACTACATCAGCTGC
TTTTGTTAGTTTCATGAATTCTTTGGCGAATAATAGACTTGTTGCTATATTAACTAGCGG
AAAGGTTAATTTTCCTCCTGAAGTAGTATCTTGGTTAAGAACCGCAGGAACGTCTGCTTT
TCCATCTGATTCTTTATTGTCAAGATTTGACGTATCATATGCTGCCTTTTATACTTCTTC
TAAAAGAGCTATTGCATTAGAACATGTTAAACTAAGTAATAGAAAAAGCACAGATGATTA
TCAAACTATTTTAGATGTTGTATTTGACAGTTTAGAGGACGTTGGAGCCACAGGATTTCC
TAAAAGAACATACGAAAGCGTTGAGCAATTTATGTCGGCGGTTGGAGGAACTAATAACGA
AATTGCACGTCTACCAACTTCAGCTGCCATAAGTAAATTATCTGACTATAATTTAATTCC
TGGCGATGTTCTTTATCTCAAAGCACAGTTATATGCTGATGCCGATTTACTTGCGCTTGG
AACTACAAATATATCTATCCGTTTTTATAACGCATCGAATGGATATATTTCCTCGACACA
AGCTGAGTTTACCGGGCAAGCTGGTTCTTGGGAATTAAAAGAAGATTATGTGGTTGTTCC
AGAAAACGCTGTCGGATTTACGATATATGCACAGAGAACTGCGCAAGCTGGTCAAGGTGG
CATGAGAAATTTAAGCTTTTCTGAAGTGTCAAGAAATGGAGGTATTTCGAAACCTGCTGA
ATTTGGCGTCAATGGCATTCGTGTTAATTATATCTGTGAATCTGCTTCACCTCCGGATAT
AATGGTACTTCCTACGCAAGCATCGTCTAAAACTGGTAAAGTGTTTGGGCAAGAATTTAG
AGAAGTTTAAATTGAGGGAGCCTTCGGGTTCCCTTTTTCTTTATAAATACTATTAAAATA
AAGGGGCATACAATGGCTGATTTAAAAGTAGGTTCAACAACTGGAGGCTCTGTCATTTGG
CATCAAGGAAATTTTCCATTGAATCCAGCCGGTGACGATGTACTCTATAAATCATTTAAA
ATATATTCAGAATACAATAAACCACAAGCTGTTGATAACGATTTCGTTTCTAAAGCTAAT
GGTGGTACTTATGCATCAAAGGTAACATTTAATGCTGGTGTTCAAGTTCCGTATGCTGTA
AACAACACAAACCCATGCGGTGTTTATCCAGGTAACGGTGATAATGCTACTTTTGCTGTA
GCAAATATCGATATTGTTTCGTGGAATGGTATTGGTTTTAAATCATCACAAGGTTCAGCA
GCTCGAACTGTTGTAATTAATGCACGTAATGGTGATATTAGTACAAAAGGCGTTGTGTCG
GCAGCAGGTCAAGTAAGAAGTGATGCGGCTGCTCCTATAGCAGCGAATGACCTTACTAGA
AAGGACTATGTTGATGGAGCAATAAATACTGTTACGGCAAATGCAAACTCTAGGGTGCTA
CGGTCTGGTGACACCATGATAGGTAATTTAACAGCGCCAAACTTTTTCTCGCAGAATCCT
GCATCTCAACCTTCACACGTTCCACGATTTGACCAAATCGTAATTAAGGATTCTGTTCAA
GATTTCGGCTATTATTAAGAGGACTTATGGCTACTTTAAAACAAATACAATTTAAAAGAA
GCAAAACCGCAGGTGCACGTCCTGCTGCTTCAGTATTAGCCGAAGGTGAATTGGCTATAA
ACTTAAAAGATAGAACAATTTTTACTAAAGATGATTCAGGAAATATCATTGATTTAAGCA
TTTCCGCTGGCGGTAATATCAGTGGAAATGTAACTATTGATGGAACTTTACGCGTCAATG
GACCAATAAACAATTTTGGAAATTTTTCCACAAGTGGCCAGATTACCGCTGGTAGTAGTA
TTTCAGCTCAAGTTTTTAGAGCATTGCAAGGTTCGTTTTATACAAGAGCATCAAATGATG
CCTCAAATGCCCATTTATGGTTTGAAAATGCCGATGGCACTGAACGAGGCGTTATATATG
CTCGTCCTCAAACTACAACTGACGGTGAAATACGCCTTAGGGTTAGACAAGGAACAGGAA
GCACCATTAATAGCGAATTCTATTTCCGTTCTATAAACGGCGGTGAATTTCAAGCCAATC
GTATTTTAGCATCAGATTCATTAGTAACAAAACGCATTGCAGCTGATACAGTTATTCACG
GTGGCAAAGCCTTTGGTGTATATGATACGGATTCATTAGTTAACTACGTATACCCAGGCA
CCGGTGAAACTAACGGAGTAAACTATCTTCGTAAAGTTCGCGCTAAATCAGGCGGTACCA
TATGGCATGAGCTTTGTACTGCTCAATCAGGCCAAGCTGATGAAATGTCTTGGTGGACCG
GTTCTACTCCTATTTCAAAACAATTTGGTATTCGTAATGACGGTCGGATGATTGTCCGCA
ATAGTCTTGCATTAGGCACTATGACTACTGATTTTCCATCGAGCGATTATGGTAATGGTG
GCGCATTAGGATTCGGTGCTTATTTGGCTCTAGGTGATAACGGGACTGGTTTACGCTATC
AAAAAACCGGTGTTTATGATTTAGTTGGTTCCGGATTGTCTGTTGCATCTATTACTCCTG
ACAGTTTCCGTAGTACTCGTAAAGCATTATTTGGACGTTCAGAAGACCAAGGCACCACAT
GGATTATGCCTGGAACGAACGCTGCATTTTTATCAGTTCAAACACAGGCTGATGAAAACG
CTGCTGGAGACGGCCAGACGCATATTGGCTATAACTCAGGCGGAAAAATGAACCACTATT
TCCGTGGTAAAGGCAAAACTAATATTAATACTCAGGAAGGTATGGAAGTTAATCCGGGTA
TTTTGAAATTGGTAACTGGCTCTAATAATGTAATGTTTTATGCTGATGGCGGTATTACAT
CTGTTAAGCAGCTTTCAATATATAATGGCATATATTTAGCAGCTAATAATTCTACTGCTG
GGCTAACATTCGCTCCAACTACTACAATTGATGGTACTAAGCAAATTTTGTGGGAAGGCG
GTACTCGTGCTGGGCAGAATAAAAGCTATGTAACTGTTAAAGCGTGGGGTAATTCATTTA
ACGCATCTGGCGATCGTTCCCGTGAAACAGTTTTTGAGGTAGGTGATGGGCAAGGTTACC
ATTTTTATTCTCAACGTGTAGCTCCTGCGCCTGGTTCGACTGTCGGGCCTATTCAACTCC
GAGTTAATGGTGGTTTATTAACTTCAGGTAGTATTGTTGCTTCTGGTTCTATTACAACCG
AATCTTCTTTGAGTGTTAATAATGGCATGTCAGTAAACGGACAAGCTAAATTCGGTGGAA
CTGCTGATGCATTAAGAATTTGGAATGCCGAATACGGTGCTATTTTCCGTCGCTCAGAAA
CAGCATTACATATTATCCCGACTCCTAAAGATGCCGGTGAAAGTGGTGGAATAAGTAATC
TCCGCCCACTTAGTATTAGTCTTAATAATGGTATGGTACAAATGCGCCATTCTGTTACGT
TAGGCGATGATGGCGCTGGCGGTAATATGATTACTGTGGACAACGATACCAAACTTGTTG
TTGTTACTAGTAATAGTCGCATTTCTCCTAATTACCGTATGCAGGTAGGACAAGCAGCTT
ATATTGATGCTGAATGTACTGACACAGTTCGCCCGGCTGGTGCAGGGTCTTTTGCTTCAC
AAAATAATGAAAACGTTCGTGCTCCATTCTATATGAATATTAATCGCACAGATACAAGTA
CTTACGTTCCTATTTTGAAACAGCGATATGTCCAAGGAAACAGTTGTTATTCTCTGGGAA
CTCTAATTAACGGCGGTAACTTCAGAGTTCATTATCATGAAGGCGGCGATGGCGGTTCGA
CTGGCGCTATTATAAAGGATTTAGGTTGGGAATTTACCAAAAATGGTGATTTTATATCTC
CTAAGCGTGTTTCTGCTGGGGGTTCAGTTTATTTAGGTACAGACGGCAATATTACAGGTG
GTTCTGGCAATTTTGCTAATTTAAACAGTACAATTGAATCACTTAAAACCGATATTGTAT
CGAGTTACCCAATCGGTGCTCCTATTCCATGGCCAACGGATACTCCTCCTGACGGTTACG
CTATTATGGAAGGCCAGACTTTTGATAAGTCTGCATACCCAAAATTGGCTATGGCTTACC
CATCTGGCGTAATTCCAGATATGCGCGGGCAAACTATTAAAGGTAAACCAAGTGGTCGAG
CTGTATTAAGCGCAGAAGCCGATGGTGTTAAGGCTCATAGCCATAGTGCATCGGCTTCAA
GTACTGACTTGGGTACTAAAACTACGTCGAGTTTTGATTATGGTACTAAGACGACAAGTA
GCTTTGACTATGGCACTAAGACTAGCAATACCACAGGTAACCACTCTCATACTGTAAGCG
GTACTACGAGTTCTGCTGGTGCACACCAACATGCGCGCTCAGGTCCTCAGTTACAAGCCG
GCATACCCAATAACATATTCTATGACGGATATAATAGTGTAGGTGCAAACGCCAACGCTA
AAATCACCGGATCTGTGAGCGGTGCTACTGCAGGGTCGAATATAGCCAAAACTTCTTCAG
ACGGTGCTCATACCCATACTTGGTCTGGTACTACAAGCACTACAGGTAACCATGCTCACA
CAGTAGGTATTGGTGCTCATACCCATACTGTAGGTATCGGTGCTCATACCCACACGGTAG
CAATTGGCTCGCATGGTCATACTATCACTGTAAATAGTACAGGTAATACAGAAAACACGG
TTAAAAACATCGCTTTTAACTATATCGTTCGTTTAGCATAAGGAGAGGGGCTTCGGCCCC
TTCTGAATATGAAAATATATCATTATTATTTTGACACTAAAGAATTTTACAAAGAAGAAA
ATTACAAACCGGTTAAAGGACTCGGTCTTCCTGCTCATTCAACAATTAAAAAACCTTTAG
AACCTAAAGAAGGATACGCAGTTGTATTTGATGAACGTACTCAAGATTGGATTTATGAAG
AAGACCATCGCGGCAAACGAGCATGGACTTTTAATAAAGAAGAAATTTTTATAAGTGACA
TTGGAAGCCCGGTTGGTATAACCTTTGATGAGCCCGGCGAATTTGATATATGGACTGATG
ACGGTTGGAAAGAAGACGAAACATATAAACGCGTTTTAATTCGCAATAGAAAAATTGAAG
AATTATACAAAGAATTCCAAGTTTTAAATAATATGATTGAAGCTTCTGTCGCGAATAAAA
AGGAAAAATTCTATTATAAAAACCTTAAGCGGTTCTTTGCTCTTTTAGAAAAGCATGAGC
ATTTAGGTGGTGAATTCCCTTCATGGCCTGAAAAAGAACGGAAACCTTGGTATAAGCGTT
TATTCAAGCATTACGTATAAATATCTTAAAAGGAGGGTCTATGGCAGCACCTAGAATATC
ATTTTCGCCCTCTGATATTCTGTTTGGTGTTCTAGATCGCTTGTTCAAAGATAACGCTAC
CGGGAAAGTTCTTGCTTCCCGGGTAGCTGTCGTAATTCTTTTATTTATGATGGCGATTGT
TTGGTATAGGGGAGATAGTTTCTTTGAGTACTATAAGCAATCAAAGTATGAAACATACAG
TGAAATTATTGAAAAGGAAAGAAATGCACGCTTTGAATCTGTCGCCCTGGAACAACTCCA
GATAGTTCATATATCATCTGAGGCAGACTTTAGTGCGGTGTATTCTTTCCGCCCTAAAAA
CTTAAACTATTTTGTTGATATTATAGCATACGAAGGAAGATTACCTTCAACAATAACTGA
AAAATCACTTGGAGGATATCCTGTTGATAAAACTATGGATGAATATATAGTTCATTTAAA
TGGACGTCATTATTATTCTGACTCAAAATTTGCTTTTTTACCAACTAAAAAGCCTACTCC
CGAAATAAACTACATGTACAGTTGTCCATATTTTAATTTGGATAATATCTATGCTGGAAC
GATAACCATGTACTGGTATAGAAATGATCATATAAGTAATGACCGCCTTGAATCAATATG
CGCTCAGGCGGCCAGAATATTAGGAAGGGCTAAATAATTATTTGTTCGTATACATCTCTA
GATATCGATATACACCCTCAAAACCCTCGTTGAATTCGTCGATGAGGGTTTTCTTATCTT
CTTGAGTTAATTCAGAAACAATTTTACGGAATGAATTCTGATTTAATTTTCTACCTTCAT
GCGTTACTCCAATCTCATTCAGAAATGCAATAAAATTAGCACGATTCTCAACAATATCTT
CTCTGGAAAATTTAATCAAAATAGACGCAACGGTAATAATTTCACGAACTGTATCAATGT
TTTTATTCATTAACTATACCACTCAATTAGTTGACTTTGTTATAATATCATCAGACGCTT
GATTTGTAAACTGGTCTGTGTTATTTTCTTCAAAAATTTTTTCTACGAATTCCTTGAACG
ACTTACGTTCCTGAGCTACATTATGCTCGATTACTTTTTCAAGATTATGACTCATTCGAA
ATAATCTTCAATTTCATAATCATGGACGTAAATCATTATAGTTTTTAATACATCATCAAT
ACTTTTTCCTGGAGCTGGAATTACGTAGAAATATCCTGCTTTTGAGAGGTCTTTATAAGT
TCCAATCAAGAAATCATTATTCTCAAGATGTAGTTCTTCAACTAATTCATTAACAATTGA
ATGGTATAGGTTTGGTAGAAACTTATATAGCTTTTCTAGAATATCAATTTTGATTGTGTA
TTGAACCACAGACTGAGAATCAATAATCATAGACCTTCCCCTTATGTTTCTGTTTGCGAT
TAGATTCTTTAAACGCTTTCTTCTTATCCTTATGAACAGAAGCTTTATTAAAATTATGTT
TTGCGACTAAATTGTTCATAGTGCTGAATTACCTCTCTCAAACATTTGCATGTGAATGAA
AACTTTTAGCTACACCACATTCAAATATATGTTCTCTTAAATCACGTGTATCGGTATATC
CCATCTCAACGATAAAATGCCGTATTAGATTTTTATCTTTATCATTGAGAGAATTAAAAT
AATCGGATTTTGAATTAATTTCCCTGGCCAAATTGAATCACCTTCAGTTGACGTTTTAAT
TCTTTTATCATCTCTTCGTTCATCGCAATATAAAGATCGCGTAAAGCAGGTTTTAACATT
CCATTTACTGGAGAACTAAATGGACATACATAATCTTTTCCTACGAGCTTTTTAGTGAAT
TCAATATTACAGAACTGAAATGCCGGCTCATTGGTATAAATTCCCCAATTAGTTGACATC
ATTTTATTGGCATATTCCAGTGCCTGGATTTGATTCATAATTCCATCAATTTGAAACTGT
TTAATATTCATTAGTAAAGGTCCTCAGAATAAAGTTCTTTTTCACTACCACCACGTTCAA
TACGTACTTGTCCAGCGTAAGTTGCAATAATCATTGCTTCTTCACGTGTCCAATAATTAC
TATATTGGTCAATAAACCCTTGGTCATCATCACAAACTTGTTGAGTAACTAATTGAGGTT
TAACTACATCTAAAACTTCTGCCATATCTTTAGAATAATGACGAGCACCTGGAATAATAA
GAGTTCGTCCATCTTTTAATTTAAAACGATTAGCTGCACAGACAATTCGTCGTTGATACT
TTTGGTTTTCATCCCAGTACGCAGTCTGCCAACAGATTTCAGGAACTTCTTTCAGAATAT
CTTCTTCTGTGCATTTATAACCATGCGCTTTAAATTTTTCAACAAGACTTTCTGGAGTCT
CACGAGATAAAGGCACATTCAGCATTTTTAAACGATTAATAAATGGGTTCATTTAAACCA
TCCTTTAATACGCTGCCACAAAGTTTTCTGTTGAGCTCTGTTAACACCAATTGAACGAAT
AACTGGTTGAGATTCCTGGAATTCTTTATAATCGGCAAGGTAAATTTCGTAAGCTGCATC
CGTAAATGAACTTATCGCTGCCATAAAATTATTGCGAATACCTACTGGAGCATCTTTACT
TTCACGAATAATCATGTATTTACCAGTCTTAATCTTTACGATAGTTCCAAGATAAGCTCC
GTGGTACCAAATATCCCAACCCTCTTGAGTAGGTTCTGCGCAACGACGAAGTTCATTAAC
AATTTCTAACTTGTTCATTATTTATTCCTCACAGTTCAGATGCTACAGTGATTACTGCTT
CAATGTTTTCTACTGAGCGTTTAATGTCAAGATACACATTACCGTTTTTAGCGATTTTAC
ATGACATTCCGATGTCAGTAAATTTCTGAATATGATGTTCCATCATTTTGTATCCAAAAA
TTCGCATATTTCCGTTGTTATTAATTTCAAAATTGCGAATTCCGTGAGTGCGTTTTTCTA
AAATAGCAAGATAGTTACTGCGGTAAGTTTCAACCTTTTTAAGAACAAATCCATTTTCAT
CTAAAAGATTTAACATGAAGTCTTTATCTTCTTCCATATCGGAAGTAATCTCACGAGCTT
TACGAGTCGCTCGTTTTTTCAGTAGTTCAGGAGCATTTTCCTGTGCATATAAAGTTGCCG
CATTTGAAATAATATCCTGAGCTTCACCAGTAATGATTAATCCATCACCAGATTTCTCCA
CCAGGCCTTTTTTAATCAATACCCCAATATTACTATTAACTACTGCGTTACCTAAATCTG
GATGCACCTCACGAACTTCTGCAGCTGTAATGAAATCTTTCTTAGCAATGGTAATTAAAA
TCGCAGCAGTTTTTTCATTCAGAACATCGTTAGAAGCTTTGATGATGTAAGTTACTTTAG
ACATTTTCTAATCTCCGTAATTCTGTATCAGTAGTTGATAGTTGTATAGTACCACAGTAT
GCTTTGGTTGTAAACCGTTTTGTGAAAAATTTTTAAAATAAAAAAGGGAGAGCCTCGGCT
CTCCCTAAAATTACTGCATGACTGTGATAACTGTCATGATAACACGTTGAATTCCGAACG
CAAGAAGACCTCCTGCTACGGCTGGGACAACGCCTAAACCCGCCAGTAAAATGCTACCAG
ATACTAATGCAGCGCTTGTGATACCAATGAATGGACTCATTTGATTTCCTCTAAATCTTT
GGTGTATTCGGTAACTACATCAGTAGTTTTCCAATATTCGTTTTCTTCTTTTTTAGCTTT
AGCTTCTTCAGCAAGTTTCTTTGCTTCGTCGGAAGTCATATGAAAAATATTCATTCCAAC
TAGTTTATCAACATAAGAAGAATACATATCGATTTTCGAAAGTTCTTCGGTCAGTTCTTT
ACGAGTTTTACCCTGTACAACAATTTCACCTGAAATTACTTTCTTAATGAAATGTGCCTT
GGCAAAGGCTAAACGAAAAGCTGATTCAGTTTCTTTAATTTTGTTATCAATTCGTTTTTG
GACATAAGTTTTACGAACTTCAACAAAGTCTTTAATTAAATCGACTACGTTATCATAAAC
TTGCAGCTTTCCTTTCTCATTAATGACGGTAATATTCTGAGAACGACGCTCAATCAACCC
GAAGTCTTTCATAATTTTTGCATGGCGTTCTTCTTCATTATCGCTCAAAGAATATTCTTT
ACGGAATTTAACTTTGAATCCAAAACCATGCTCACCGCAAGCATCATCCCATGTAATGAA
GCCTTTATCTTCAAGTGGGTCTAAGATTTTACTCACATAAGTTTCACGATCATACTTATA
CGGAATCTCAGTGATATGCATTTGAGTTCGTGAAGTAAACTTATATGTTCCACGAATTTC
ATATTGACCGTCAATCTCAACGACTTCACCACGAAATTCTGGGAATTCTACCTTCGGTTT
AGTTACTTTCTTTCCTTGAAGAGCTTGTAGTACAGCTTTCTTGACAGAAGAAACACTATG
AGGAAGAATGTAAGTTGCATAACCAGTTGCAATACCGGAAACACCATTAAGAAGAACAGT
AGGAATAATAGGCAAATAGAAAGCAGGCGGAATGTGTTCTTTATCTTGATGTACCGGAGC
ATATTCAGTATCTTTATATACGTTATAGAAATTTTTACTTACACGAGCAAAAATATAACG
ACTTGCTGCTGCTTTTTGAACGGTACGAGAACCGAAATTTCCTTGACCATCTAACAGAGG
AAAGTTATTATTCCAAGTGTTAGCCATCAAAGCACCTGCGTCTTGCGCAGAGTTTTCACC
ATGATGATATCCAAGGTCTGCTACACCACCTGCAATAGAAGCAAGTTTGTGAAACTTATC
TTTATTTCCTCGCGCCAAATCAAGAGCTCGAGCAATAACAAATCGTTGAACTGGCTTAAA
TCCATCAATCATATTTGGGATAGCACGATTTTCAACCGTGTACATAGCATAAGCCAATGC
TTCATTATCAATGATACTTTTTAAATCGCGATTATTCAGTTGCATAAATTTACCATACTA
GTGAATGTAGTGCCATAATAACATCAGAAATGAAAAGCACGACTTGAATTAATCCGAACA
TTACTCCGTAATATAGTGCTACCAATAAAGTAGCAAGGGCTAATGAATAGCCCAAGATTT
TCTTAATCATTAGTAGATAACAACACAAATGTTAAATATGCACACATACCCTGGGCTAAA
GCTTGTGAAAACACACTGCTAGCATCGATACAGATAGTTAAAACACATGCTACTATCCAA
CAAATAAATGAAATAACTCCTAATAATTTTGCGATATTCATATTTTCCTCACTGGCGTCC
GAAGACGCCTTTGGTTTTAAGATTGTTACGATAGAACTGCATCACATGTTCATTATGGAA
ATTACTCATTAATATGCCTGCAAAACAAATTTAAAGTTATCAGCCAACATACGGTTCATT
TCTTCAAGTGTTTGATACTCAGAATGATGATTACGAGTAAATGCCAAAGCTAACTGACCT
TTACCAAATCCTGTCGTCAGAGGTTTCATCTTAGAAGCAGGCAGATAAAATACTGTGTAT
GGAACATTGTTATTTGCAATAGTACGTGCAAGCTGAGACCGACGTTGACGAATATGACTT
AGAACTGCACTGAATCCTTGCTTAGAACGCTGATTACCTACATAAAATCGTGCGGACACG
CATGGATTACTAAATGGACGACCATCTAATTTACTCACTAAAAAGTAAAATCCAGGTTTA
GATAAAATGTCTTTATGTGGAGTTCCCAAAAACCACTCACCGCCCTTGATTGTACCAATA
ACAGTAGCGCCTGCATTATTCAGATCAGTAACAGTCATATATTTCATATTAATTTCCTCT
AAATTATTTTCTACTCCAAGGCCGCATGAATACATACGGCCATTAAATTAATCGTCGCAG
TCGACGCTCAATTCCCAGAATTCTTCTACAGTATAAGTTTCAGTATCATTTTCAATACAG
AAACGTTCATTACTGTTATTTGCTAAAGTAGCATTAACTGTCGGTTTCTCGCTAGTGCTC
TTAAGAGGTGAAATACGAATTAACTGATCACCGTTATCTAAACAGAAAATTTCACCAACT
TTTACATCTTTAAAACTTTTCATAATTCACCTCAAGGAGTATAAAATCCAAACGCAGTTG
TTGACCATCCCATCCAATATGGGAAATTTGCACCAATGTAAAACATAAGAATATAAAACC
AAATGTTTAATAAATTCATCATTTTACACCATTCCAAATTGTTTCAACTACGGATTTTAA
ACCATTTTGATGAATATCCATTCCGACTACCGCCATCAAATAGATTCCAACTACAACTGA
ACCTAAGGCAAAAATCAGCATGAAAATGAATAAAGCCGGAAAAATATTATCGAAAAACCA
TTCAATAAATGTAAAAGCACTGCGTTTACGCTTCATATTTTCCTCACATAAATCCAAAGT
AAACGTTTAATACATCAATCATTAAAACGATTGGGAATATACTCAAAACTACTAGTATTA
TAACTACATTCCATATAGCTTTAACAATCTTTTTCATTTTGTGTTCCTCCGTAGTTGATA
GTTGTATAGTACCGCAGAGGAACAGTCTTGTAAACAACTTTTTTAAAAATATTCGTAATA
AATGTGAATACCAATCACCACTGCCGAAACCTGTGCAACCCACCACGCACAAGCAATAAG
TACAGAATTCAAAATTTTCATAATAACCTCATCACAAAAGTAAATGTTAAACAAATTACT
GGAATACTAATTAACCAAACAAAACACCACCACAATGAACTCATAGTTCAATCTCAGCGA
TTTTCATTTCATTACTATTAATAGCCGCTTTAAGACTATCTGAAAGAATTACACACCAGT
GGTCATTCATATGACCATTAACTAAGCGTGTAATTTCTTCGGGAGTTGAAAAATAAGGCG
TATCAGACTCCCAATGCGATAATCCCAAGCGAGTATAAATCATACCTTCATCATCGCTAG
AATATTCAACTGACACAAACTCATCAGTTATTTTATGTTTAGCGTAATAAAATTTAAATT
TCATTTTTACTCCTCCGTAGCTGATAGTTGTATAGTACCACAGTCCTTGTGGTATGTAAA
CCGTTTTGTGAAAATTTTTTTAAATGGAAAGATACCATCCGTTGTAGTTGCTTTTTCTTA
CAACCTTACGAAGGTCTTCTCTATCACCGATGAACTTCGGAGTGTACTGGATGACACCTG
GATGAATTTCTTTAGTGTTGAATATAATTATACAGTCAGCGACCTGATGATTCAGAATAG
GCCCTAGATTTATTCCAGAACCGTATGGATACTCTCCGCTGCATCCTGTTGTTACAGAAA
TCCAACGTGAGTCAGTTTGATGTGTCTTAACTTCTACACGAAGCCCGCAGTATCTTGGAT
GCGCCAATACATCCCATGCGTATGTATACGGGTCATTAACATCCTCTTGGCCTTTGTTAA
CATACCCGCTTAGCCAATCTGCTACAAAAAACTCTGCGTACACCGCGATACGACATCTTT
CGATAACTTCTGCTTTATCCTGGTTCGGGTTTTGTTTTAAAGAGTATCTTGCTGTATCAG
CAATTTTGACCTTCATTTCACTAGTCAAGTCACTGTTCGATAGGGTAAATGTCGGAATCT
GAAATAGTCTCTGTAAACCCGGATTCGTTTTCTGCATTTAGACTTTCCTTTTTACCGCTG
AGATAAGCGTTATATACTTTAAGAGTGCCGTAATAAATTCGGTCATTTTCATCTAAAGAC
TCACGATCAAGTTCATCGAGTTCCTTTTTATCCATGACTATAATATCATTGCAGTAAAGA
AACCCAAGTTTTTCGTGACCAAACTCAAATTTATTGCAGTACACAATATTAGCGTGATGG
TTTCCGTGCAGTTTAATCTCTTTTATGTCGGAATCACCGATATTCATACAATAAATCATA
ATTTTTCCTTAAAACAAAAGGGCCGAAGCCCCTTATTTTATTTGAATTGTGCAATTCTTT
TCTCTAGACATTCAGCATAAGATTTCATTGAGATGAACTGTGAAAGTAGCAGTTCTTGCT
CAACTGCACTAACTGTTAGAAACTTTGCGCTTTCTAAAAATTTACTCAGTGCATTAATTT
TGAGCATTAATTGATCGTATTCTTCTTTTACTCGTGCTTGATAACCTAACATAAATTTCC
TTTAGTCAAGGGCCGAAGCCCTTATTTAAATTGCTCAGTAACGTCTTCAACTACTTCGTA
TTGGCAAGTACGCATTTTAGCATCGTTGTAATCAATCGGAATTGATACTACATCACGTGG
ATGTACTTTAACTTTTACAACTCGGCTAGTTGAACTACCAAAGTGACGAATATAAGATTT
AGAACACACATGCAGACCACGAGAACAAGTTTGTGTATCATCGTCATTCACACGAGTACG
TGGCATTTTAACTACTTTACCAGGACTGTTATCAAAGGTGTTTGAGTGACAGTCAAAGTA
ATTGCTGCGAACTACTTTCCAAGCATAGAAGTAACCATCTTCTGTAATTTCAATATCGTT
TGCTACCAAGAAATCAAAGAGTCGAGATACCGCTTTTTGGCTTGGGTTTTCCAGCAGATT
TTCCAAGAACGGGAAATAAAATTCAAAGTTTTCGCCTTTTTCCATCGAGTCAAGAATACG
ATCAACCAAACCAGACCGCAATTCGATATTTTGATAGAACAAGCTTCCACCTTCAATTCG
AACATCGCCGGAAATATATTTTTCAACAGCACGGCGAACATTAATTTTTTGTGCAGCTTC
TTCCAGCCTATCCGCTACAAGCAGATTAAGAATTTCCTGGAAGTTTGAATGAGTATTAGG
AGTTGCGTTATAAGTTACACCGTCAACAGTAATTGAAATGAATTTTTTAGATGCATTCCA
AATAATGTCAGATTTAGCAACTGGAGCAATAACTGCATCGCTATTAACTTTAACTGTAAT
ATCACCGCTAATAGTAACTTTAGAGCGTTTAGCTTCTTCAGCATTTTTCAAAACACGACG
GATTGTGTCAACCGATACATCCTTCCAATAAGCTAATTCCTGTTGGGTATAATTACCACT
TGAATACAGTTTAACAATTTCAGCTTGTTCGTTTTTGGTCAGGCATTTAATATTGTACAT
AATTTTCCTTATTAGGCCGCAAGGGCCTTCATAGTTTTAGCGATTTGGGAAACTTCATCA
TCACTTAAAGAGTTGCGATAACCGATGAAGTCGGAAACAATACGGAATTTCTTGGTAAAC
TCAGCAACCATTTTATCACTATTTTTTGAAGCATTACGTGATAATTCATCAAAAAGATTA
GTTACCGTCCAGATGTCATGACCGATGGTATCTTTTCCACCATTAAAATATACACCGCGC
AATGAACTAACTATATTAGCGAGTCGTGTATATTCTTCAGAAACTTCATCTGTACTGAAG
TACTTCATCATAAAATCTAGTTCAGGATGCTTGATAATTTTATCAATATATTGTTGAGCT
GAACTTGAATAACCTACATACTTATCATAATCTACATCATCAAAAGCATCTACATATAAA
TCACGCAAAGCTTCAAAAATACATTGGCACTGACCGAGCTCTTTTACCTTTTTCTGCAAA
AGCGGACGAATAACATAAAATTCATTAATGCCAATAAGATTAGCCATACGAATCAAAATA
TTCATAGATGGATGACAAAGAGATGTAGTACCATCCATAGAGAAAATATCAGAACGATGC
ATATACGCTACATACCCAGTAATTTCATCTGCTTCTGATGTGAGCGTAAATAATTCCTCT
TTTTCCCAGCGCCCGTCTTTAATTTCAAACTTAAATGCAGTAGCAGCTTTAGGACGAGGA
GCTTTACTTTTAACTGCCTTCGGAATATAACTTTTAACTAAAGCTTCAATTTCTGACAAA
TAATGAATGTTAACTTCATCACTTTCAAACATTGCCATAATATCAGGGAGTAAATCAATC
TGCGATTCTACTTCCGGATTAATAAACAGAAGACGCTCGTTGTGATGAATATTTAAAGTG
TTATTAAATTCTTTATCATCTAACGCATGCGCTAATCCACGGACAATATTAACACGATTT
TTAATATTATCAATAACGATATTAATTTTTGTTGTATTAATACCGAACAGACGATAACTT
GATGCAATGGCTGAAGTTTCATGACTTTGCTTAATGCGCTTCAGTCGAGGGTCAAGATTT
ACTTCATACACAACTCCTGCATTACATAGTTTACTATCAGGTTCAAACATGCTTTGCATC
TTCTTATATGACAGATTTTTAGTCGTAAATTTGACTGAATTACTAATCATATAATCTCGA
GCAGAATATCCCATCTTCATCAATTCGCGGTATGTATGACGAGGAGATGTAGATTCTTTA
AATCGTTTTACATCTTCATTGAATGCCTTCTCACTAAGCTCTTTAACACGCTCAATAATA
TTTTTACGGGTACGATCATCTAGTGAAAGAGCTTCGCGTGATGGAGCAATATCAAGTGAA
CCCATTGGAAACTTAATGTAATTCACTTCATTGCGGATGCTTAACCAGTTACGGTCTCTA
ATAACACCATCAATAGGATAAACAATACCACCATAGATAGCATACAATCCACCACGATCT
GGCCAATATCTTTCTGGATTTACGCCGTAATAGTCATCAAAATCCGGAAAATAATCAATT
TCGCGGTCAAGACCATTAATGATAGCCAAATCTTTGAATGGTCGCATGATATAAGAAACT
TCATAAGCAAAGTTTCTAAAGTCTTTTTCTTCAACTGGAACTACAATTTCAATACCAGTT
TTATCGTCTGGACCCATTTCTTTTACGAATGTAGGTTTAATTTGCGGACCATCACCATCC
ATGTAAGCTACATAACCACGAATTTCGCCTTTATGATATGAAGTAATACTAAACGTATCA
GTATAGCTAAACGGAGATTTAGAACCTAAACCAAATCCGCCAATGAAATCGTTAGATTCA
GCCTTAGATGAACTAAAGTATGAATTATACAACCCAGGAGAATTATCATCACCTTGAATA
TCAAAATCGCTCATACCCGGACCAAAATCTCGGCAAACAAATCGCGGATCTAATCGTCCT
GGAACTTGAATGATAAATTTTTCAGGATTTCCATTGAGAGCATGGGCATCAATCATGTTG
GTAATCAATTCACGGACTACTGCGCGAATCTTGTTTGTATACAAATCAGATGACAGAATT
TTAAATACTTTAGGAGATGCTGTGATGCTAAATGCTTTTGATTTAGAACCATTACCAAGA
ATTGTTTCTTTTTCAGTGGTGATAATCATAATTTCCTCATTAATTCATATTACGCTTAAT
AACTTCAGCAACTTCTAATAGTTCATCTTTAGTTGCACTGTCGGATTGAATTTTATCTCT
AATATCTTTAAAGCGGTTTTTAAATTCTTCGGCTTCTCCCATATCGAAAAAGCGTTGAAT
GATTCTATATTCTCGATGAACTGCTTTATCAAAAAGTTCTAAATTTACTTTATATGATTT
CATTTCAATATCCTCATTTGCCCAATTAATTATACCACATCCTTGTGGTAAAGTAAACTA
CTGGCTCATCCATTCTTTACGAAGATCAGCATTATCTCCCATGAGCATTTCAAAAAGCTC
TTTCCAGTTCTCAGGAAGTTTAACAACATCATATACTGGGTTTTGAATCATCTCACGATA
TTCAGATTTTTCCAAAGAGCCAAGTCCCTTAATATAACGGATGCTATGTTTAGGTAGAGC
ATCTTTAGCACTCTCATATTCAGCGACTGTATAAAACCATTCTTGTTTTTTACCGACCTG
AGCGATGATTACAGGAGTTTTGACAAAGCGAATTCTTCCTTGCTCAAACAATTCTGGCCA
ATTACTAAAAAATCCGAGCAGAGAAGGATAAATGCTTCCTAGACCATCATGGTCAGCATC
AGTCATAATAGCGATATTATGATAATTCAAGTTTTCAGCTTTTTCACCGAGAACTAATCC
AGTGATTGCGCAAATATCAAATAGTTCTTTGTTTTTAAGCATATCTGCATAAGACATACC
CCAACTGTTGAGAACTTTACCACGTAATGGATAACCACCATGAAGTTCTTTATCACGAAC
ATCAATGAGATATCCAATAGCCGAATCACCTTCAGTCAAGAAAAGAGTAGTATCAGCATC
TTTACCACAAAGATTCGCTTTAATATGTTTATGAACCTTAGCTTTAGAGGCCTTTTTAGC
TGCTTTAGTTTCTGCTGCTTTTTCTGCCGCCAATTTACGAGCCAAAGCAGCTTCAATAAT
TGGCATTAAAATTGCTTCATTGTTTAAAATAGCGCGTGAAATCTTTTTAGCATCAAGCTG
AATATGACTACGAATTTCACCAAATGGAGAAGTCAAACGCTCTTTAGTCTGAGAATCAAA
TCGCATGTTTTTCATATCACGAACAAACATGACGATAGTCAAACATTCTTTAACACGTGC
TTTAGTTACATCAATTTTGAACTTGCGTTTGATTTGTGGAATAAGGTCTTCACAAATATC
ATCCATAACACAGTCAATATGATGGCCACCATTCTTAGTATGAATGTTATTGACGTATGT
TAATTGACGAAAACCATCCGGTGAACGACCAACCGCAATAGAACAATTTTCTTGTTCTTG
AACGATAGCATGCTCATCATATTGGCGTGCATATTTCTTAAAATTACCTTGAACCTTTTT
ACCATTAAATGTAAATTGAATATCAGGATAAACTACTGCAAGTGTCTGGAGACGATCCAA
TGTAATGTCAAGATAAACTTGAGATAGCTCATTAGTTTCAAATGACATAAAATCAGGAAT
GAAAGTAACACGAGTTCCTTTCCATTTTCCAGGAATAGTTTCCCATGATTTATTTTCCAT
GCCATTTGAACAACGAACTACAATATTATTTTGACCGTCGCCAGTTTCACCGACAAACAT
CACAGAAAAAATGTTAGTTAAACTAGAACCAACACCGTTCATACCGCCAGTGACGCGTTC
TTTATCATCACCGAAATTACCACCTGCTTTTGGAATAGTCCAGGCGGCAACAGGACCAGG
AATTTCTTCACCAGTAGGTGTTTTAACCATCGCTTGTGGAATACCACGACCGTTATCTTC
AACAGTTACTTGATTGTTTTTGATAGTAACATTAATTTTATTCGCGAATTTAAACTTAGT
ACGAATACCTTCATCTACTGAGTTATCGATAATTTCATCAATAAGCTTAACAAGACCAGG
TACATACTGAACACTTTCCCATTTACCAAACAGAAAGCGCTCATGCATTTCATTAGCAGA
AGAACCAATGTACATGCCGCTACGCTTTTTGATATGTTCAATATCGCTCAGAATTTTAAT
TTCATTCTTAATCATCACTTATCCTCGTTTGGTTTCGGGAATATTATACTCCGGTAATCA
TAAAGCTAAAGGCCCGAAGGCCTTTTATTTAAAACGGATAGTCGAATCCTTGAAGAATAG
ACCAGAACATACGGTTCCTTCTACTTTCTGCCCGGTAGGTCCAATAGCACGAAATCCAGT
ATGTTGGAAATCATTTTCAGAGCAACCGAACCAGTTATATCCAGTGATTTCAATATTAGT
AAAACCACTTGAAGACAAAACTTTGGTTGCATTATCAGCATCAGTACATCCTGCTAAAGA
CACTGCTAATACTAATGCTGCGATAGAACGATTAATATATTTCATAATTTCACTCAAATT
TAATGGCTTGAAGAAGACTAATAATTCTCAAGCGACTTCTTTCATCTTTAACCGTAAATG
AAAGAGGGTCACCAGATTTCATAGTGATAGTGCATTCAAAATCAAAATCTTCGGGAACTT
CTTCGAAGAAGTCAAATTCTTCATCATATATTAGAACATTACTCTGAAAACTGTGAAGAA
TTTTTCCATCATTTCCAGATGCTGTACTAATCATTGTAACGTTATTACCTTTCATATCTT
CAACGATAAATTCGCTTGTAGATATTACGGCATTAATAGAACCATTCCTATAAATAGCAG
AAAATAGATATTTCTTTTCTTCACCTTCGCGAATGCGATATTTCTTACCAATTTTAAACA
TAATTACCCTTTAAGTAAGTCGTAAAAACCACCATTCACATGCTTAGGAGCGGAAACTAA
CCGAATAGCAATCCGATGACAATCAGGACATACATCAGTATCCCTTTCAGAAATTTTCTT
GATTTTTTCGTATTCTTTTGCACAGTCTTTAGATTGACATTTATAATCATAAAGCGGCAT
AATTATTCCTTAAAGTGAGCTTTCAACATCTGATACAAAGACCACGCCTGTTCATTATTT
TCAATAGTAACTTTCATGACTGGGAATTCTGTGAAATCTTCTATTTGTTCTTGCTCTTCC
TGCTCTTGTTCTTCAGCAGCCTGATATGGATTTTCCACTTCATCAAAGAACTCAGCTTCG
TTAGTAGAAAGCCAGATAAAGTTTTCATCAAGGATATCACCATGTTTTGCATATCCAATT
GCACCAGTAAATGACATAATTTTAGTAGGACGACCAAGATGGTCAGCATCTAAAATTTTA
AAAGGATGCATACCTAAACGACGCGCATAGATTCCGTTATCAGTATGGTCTTTAATAAAA
TTTTCTTGAGCTTGTTTATTTTTAAATTGATACCATTTATTAACTTCAAATCTAATAGCC
ATTAATAAATTTCCTTCCAGTAAGTTGTACCGTCTTCAGTGATTTCACGGAATACACCAT
AAATCGGTTGTTTATCACCAACCTTTTCATACACATAAACCGAAGTCAAGTGAGTAAACT
TGATGGTGTGTTCCTTTTGAACTACTACCAAATCTGGATCGAATAATACATCTTCAAATT
CGTCATTAGTGCATTTCTGAACAATTTTACGTTTCATTACAATTTCCTCATTAATTAAAC
AGTGGAGCGATGCGTTTCAGAAGAGTAGCAGCACCTTTGGCGAATTTTACATCATGAAAA
ACAGTTTCTTCTTCCGTTACAACACGAGCTTTAATGTTTTCACAATCCCAATTTTTACGA
ACAATCTTCAAAAGCTGCAGTAAATCTTTGCATTCAGCAATATCGATAACACATCCACGA
GAATCTTCCATTATCGCACGATAACCGTAAGCCATACCATAATCATTGAAAGATTGCTCG
ATGATAATTAAGTTTTCCATTTTATTCTCCAAGTTGTTTTCTGTATCAGTAGTTGATATT
GATATAGTACCATAATCAACTACTGATGTATATAGTTTTATGAAAAAATTTTAAACTTTA
TGCATAGCGAGCTTTGCTATAGTGTTTAATCCAACTTTCAGGAATGACTTTATATGTTCC
TAAAAATACCGCGTTGTACAGCTTAACACCGTCTTCTACCCATTGATCGGTAATGTATGC
ACACATAGCGCGAGTACGGTTAACAACACCTTCCTCACCTTCAGTAAATTCAAACTCATA
AGGAGCAACGAACTTGATAGCTTGACCGAGTTTCCACTTAAAGTCTACACCTACATGCGA
AGTATCAATCGTTTCAATTCCTTTAGCAGGAACAGCTTTTAAAAACGCAGACTCAAGAAA
TTTCGCACGAACATAGCCAAACTGGGGTTTAGACTTTCCATCTTTAGGAATGATACGCAC
TTTTACTTCAGAATCTTCATCTTTAACGCCGTGTTTAAGCTGAATGCTTACAACTTCAAC
CAATTTTCCTGCTGCTTTAGAACGGGATTTATCAGATACACGAGCTAATTCACCAATATT
AATAATCATAGTTATCTCTCACTTGTTAAAAAGATTTTATACTCCACGGGACCATTATAC
TCTGGTCCCAAGAGTTTGTAAACTATTAATTCAAAATAGCTACCACTGCACTACGAGGTA
CTACGCTAAAATCACCTGCATGAACAACGTTCAGAAGTTCAACACCATCTTCAATCCATT
GGTCTGTTACCCAACCACAGACCGAAATAAATGGGGTCTTAATAGCTACCGCATGAGTCA
AAAGGTCAGTAGGATCAACTTCTTTGAAGAGGATAAGCTCTGCTTCAAAGGCCATAGTTT
TAATTACTTCATCATTATCTAAGCGATGTGCTCGAATCACGTAAGCTTTATTCTTATCAT
ACCAATTACTTTTTGAAAAACTTTTAACCACAAACTCGCCTTCACCAAAAACACTAGTCA
GTTCTTTATAACCTATATTTAGTTCAGTAGTTTTAATTTCAGGTTCAACCAGTTTGTAGG
TTTTGCCGATTTCAATAGCGGTAGTCATAGTAGTTTCCTTAATTTCCAGTGGTTTAACAG
GGCATACATAAGTGCTTACAACATCAAAATCAATCAGCTTAGCTACCGGATTTGGTGCGT
ATTCAGGATTATAATTAAATTTCATAATTATCTCATTTCAATAAAATCTACGAGTTCAGC
ATGCGATTTGCGGAACATTACTTGGTGCCCACCAATGATAACTTCATCTTCAGGAACTTC
GTATACAGCGAGATAAAATCCTTTAGAAGATAATTCTTCGCGCTCTTCTCGTGTGAACCA
TCTCATCATATCATATTCGCTAGCGAAAGCAAAATGATAAAGAGCTATAAACCATCCTGG
AATATAGTGATCTACGCCTACATATTCTTCTTTCTCAAAGTTAGTATTAATTGCTATATT
AGCATTTTTAACTAATAATTTGTCTTCGTGCGGAAGAGGAATTCTTTTATTATCATTACT
ATGATGCATAAAATTAGGTCTGTCATAACCTACGTGTAATAACCACTCTTCGCTCCATGA
ATCTATTATACTCCTGTATGGCGTTATTTGAACACAAAGATTTCGACGTATTGTTATAGC
ATCTTCATTATTAAGAATACTAAAAGATGATTCAACACGATAAATTTTCATTTTATTATC
CTCAGTAGCTATGGTGTTATAATACCATAACTAACCGAGGAAGTAAACAACTTTTATCGT
TTTGTTGGAAAAGATAGAGGATCGCATTCTTCCTCTGATGGAGCGTCTTCAAGACCCATA
GCATACCGCAAAGCATACTTCATCATCAGGATGTCTTTCGCACAGTCATGAATAGAATCA
TGTGCAACGAATCCATCTAAAGTTCCCTTTGGAAGAGGGCACGTGGTCATATCACGAACA
AGCAGAAGTGCTTCAATTCTAGTACGAATATCACGCTGATTCCAGAATTTACAAGGTTCT
AACTTAAACGTATCAAGTTCATTCTCAGAAACACCATTAAGACGTTGAACATCACGAATG
AGATCGACTAAAATTGGAAAATCAAACGACATTCCACGGCACCAGCCTTGAGATTTCCAA
GGATCGATATTATGTGCATTGATGTAATCATTAAATTTCGCAATACCGTCGATAGTGCTT
ACATCTTCATCGGACGGTGCAATATTTTTTCGAGCTTCAGGAGATTGATTCTTCCACCAT
TCGATAGTACTTTTAGTAAAAAGACGATGTCCTTTTTGACTTTTTAAGTCAAATTTAATT
TTAATCCCACGTGAAACTAGTTCATCGAATGTTTCAACAACTTCTGGGTTAGGGTCAAAA
GCAATTACAGCCAAATCAATAACAGCTGCTTTTTCACCGCTTCCCATTGTTTCAAAATCT
ATAATAAAATCAAACATTAAATTTTCCTTGCTAAATCGCGAATTTGACCTACAGTATAAT
CTTGGATATAAACTTTATTAATAGGCTCATCAATAAATTTTGCCATAGATTCAATATCTT
TTTGTATCTCTTCAAGACTGTATACTATCTTTAAAGCTTTTTCGCGAATAGTAATATTTT
CAGGACTAGAATTTTCCTCAATGACAGCTTTAACATTTGTCATAAGAGATTTAAACTGAT
GCAAACTTAATTCAATCATTAATAACCGCCTTATAAAGATGGCTAATTTCACCTAAAACA
TAATCACTGATTGTAACAGTTTTCACTTCGCCACAAAAGAATTCTAACGCAATTAAATCT
CGTTCAATTTCTTCTAATTGAAGCATTAACTTTCCAGATTCAATTTTTACATTTCTACGA
TTTTTACTATAAGCTAATTCATAAATTTCGCTAACTTTATCTTGAAGCAGATAAAACTGG
TCTTTAGTTATTTCCACGAATAGCTTCCTCAAATTTAATCATACATAAAATACATCATAA
CGACCACGGGTAACACCAACATAAAGAAGTTGTTGGGCCAATTCAGCATCTGCATAATGA
ATACAAGGCGTATAAATGAAAGCACGGTCTACAGACATACCCTGAGCTTTATGGAATGTT
GATGCAGGAAGTGCTTTCACTTTACTGAACTGTGATTTAGCATCCCAAAAATCACTCCAT
GGAGCTTTTCCGCCTTTGTTCCAATTTTTATAAGTTTCTGCCGTTTTACCTAAAAATAGG
TTAAACTTATATAGCTCTTCATCAGATGAAATTATTTTAATCTTTTCACGATAATATTCA
TCATCGCCGTAAGTTTCTACTGTTAAATCCCAATGACGAATTAAGTATTCTCCAGAAACA
CCACGAGCTTTAACAAAGGTTGATGTATACTCTGCTTCTATAATACGAACTAATTGTCCG
TTATTAAAAATAATTTCTGACACAGGCTTTCCATCAATTTTATATGTTTTAATTAATGGT
TCCTGCATTACAATAATTTCACCGACAATAAAATCTTTATCAGTTTCAAAAATCTTTTTG
CGAATAATGCTATTTAACTTGTCAACAGATTTATTCGTAAATGCCATTACGCGATTTTCA
AACAAATCATCTAATGATTTTACGATTGAAAAATAATTTACCATAAAATCGCGTAAAGCG
GTATCACCAGTAAATCCACGTACTCCATGCCCGTCAACAACTTTATCATAAATCCACTTA
CCGTTGCGAACATCAGTAGCTACATCAATAATAGGAGCATTACTGCGTTTAACTTCAGTA
AGTTCACACTGATAAAAATCTTTGTGTGTAAAGAATGGACTGATATAAGCAGTATTTTCT
CCTGGATCAACAGGTCTAATTTGCTTATTATCGCCTATTCCAATTATAGTACACCACGGC
GGGATAGTTGAAAGCAGAATTTTGAATAGCTTTCTATCATACATTGACACTTCGTCGCAG
ATTAATACCCTGCATTTAGCTAAATCCGGTACTTCCTTCTGTTCAAAAAGAACGTTTTCT
TCATATGTTACCGGGTTAATTTTAAGAATACTGTGAATAGTACTCGCTTCTTTCCCCGAC
AGTTTTGAAAGAATCTTTTTAGCTGCATGTGTAGGAGCTGCCAAAATGATACCAGTTTCA
CCCGTAGATATTAAAGCTTCAATGATGAATTTGGTAAGAGTAGTCTTACCGGTACCAGCA
GGTCCATTAATAGTTACATGATGTTTCTTTTCTTTAATAGCCTTCATAACGATGTTAAAG
GCATTTTTCTGGCCTTCGGTCAAATCATCAAATGTCATCGTAAATTCCCTGCAATTGGTA
TACTAACAATACGCCCAGTATCTAAAATTCGCTGATATAATCTTTGTGTGTCTACGTCAG
GCTTAACATGTTTAACTTCTATTTTATTAAACCAAAATTTACGTGGAGTCTCAACTAATC
TTGGAATTCCCTTACCTAAAGCTAGTTGATACTGCTCTTTAAGAGTGGTAAATACTTTAT
CAGCAATCTTCCATTCAAAAAATACAGCAGGACGATGTTCATCAAGCGGAACTGGCGCCG
TAAATCCGTCTTTGTCTCGGTAAACTATCGCGTATACATAAACCATATTATCCTCGGATA
AGTTTAAAAATTGAACAATTTAGCGGATATCCTCTTTTCAGTTTAAGTTTATCAATAAAA
GACAAGTTTTGATACCGCTCTACACCTTGAATAATTTTATCACACATATCATATTGCATT
TCTGCTTCTGACAACTTTTTCACAATTTTCCAATCCGAACCTTTAAGAAGAACGTTCAGT
TTAACAACTTCAGCGCCTTCTGCTATGCGAGAACCGTCAATACGAGCTTTAAGTGCTATA
ATTCTTAGCTTAATGTCAGAGGTCTGTTTTGATTTAGAAAGCTGAGAAATGTGTTCAATT
CGGTTTTCACGTTTTTTCTGTATAGCTTTAATTTGATTATAAGTCTTTTTGATTTTAGCC
CATTTCTTTTCATCTAAATTTAGTTTATGAACTTTTTTCGCAGATGAACGACCAATTCGC
AAAGCAAATAAATCACGCTTTTCAATTAACTCTTCTAAAGTATAATCAGAACGAAATGTA
TTATACTTTTTCTTTACTGCAATAACATTCCCTTTAATGTATCCAACGTTATTATCAAAA
CGTTCTAATGATAATTTCTCTCCTTCAATACGATTATCAAAAGGTTCTCCCGAGTAAGCG
CAAACTTTCTGATCTAAAATGTTCTTAATGTAATTGAAGTCTAAGTTAAAATCTTTAGAA
CGTCTTTTTGCAGATGCCTGAGTATGCTCTAGACGACGTTTAATTTTACGAATTTGGTTA
TTAGACAGCTTCATATTTTTCTCACATCTTACGGACGGTTAACTACTTATACTATAACAT
TTTTACCTTAACTTGTAAACAACTTTATGTAAAAATGCTTTAAAACTTTCATGGTATAAT
GAATCTAAGTCCTTCCATTATAGATTAAATCCTTCAAATTCAAGAGTATAGATAGTGTAT
GTTGAATACTTTTTGTACTCGTATCTATCTGCAATTCTAAATACACTTCCAGCTGGTATC
ATTACTTCTTGTTCATCTGAAACTAATTCCATATTACGATAACGATGGCTATCCGGAAAC
TTAAAGTTTGGATTGTATTCTTTACAGCGTAGAGCTTTTATAGCATACTCCTGGAAATTG
AATACCATGGGAGCTTTGAATTCAAAAATAACTTGTGTGTTATACTCTAAACCGGAAGCA
AAATGCAGAGCTATATTTTTATCATATGAAGCTGATACTACTTTATCAAATATAATAACA
TCAATTCCTTGATTTAATACTTGCTTAGTCTCGACTGGAACACCTCTCCAAAGAGGTTTA
TCGTTTGGAACCAAACGAGATTTGATTATTTCATTTAACCAAGTATGGTCATCTGGTTTG
TTGGTAATACAATGAATTAAAAGTTCAATTTCAGATAAATTAAACCCTTCAGAAAGTAAT
TCTTCACGAATAGAAGCACGCACCGATGCATCCATTGATTTTATTTTAAAATCTTTTAGT
TGCATTACTGAGTATTTCATTCAACTACCTCAATATCATAAACTTTAAATGTTCCAAATG
AATCGTGTAATTTTTCTTTTGAAATAGAAGTTATTCTATACTTTCCAATTGGAATCATCC
ATTCTTGTTCACGCACAATCATCATTAAGTTATCAGTACGCTCTGAATCTAGCCCATCAG
TATCTTCATACGTGTACTTAAACTCAGTATTAGGAGAAGAAAGTATAATATCGCTGATAT
GGTCAGAATAATTAAAAGCTTTATCAGTTTTTAAGCGAAGTATTATTTTAGTAAAATATT
CAGCATAAGAAAAAGAACATGCTGTGAATAAACTAGTAGTAAATGAATCTACCCTGTTCG
TTGAAAACACTTCTCCAACTTGTAAATCTTTAATAAGTTCTTTTGTCGATTTTGATATAC
CACGATATAACTGATAAGGCGATTTAGTTAAATGCTTTTTAACGATTTTATTCAACTGCT
GATGAAGAGCTTCATTCTTTTTGGCTTCCATACATTGCCAAAGAATTGACTGCTCAAAGT
CAGTAAATTTTTCACAGACTTTTTTATACATATCATATTGAAAATCAACGCTTTCAGCTT
TTATAGATAACTGTTCAACATCTGCAAGATTAATAATCATGATAGCCTCCGTATACTTCA
GAAGCTATCATATCATCGTTAGAAAGGAAAGTAAACAACTTTTTGAATTATTTTGCCCAG
GGAGCCCAGGGCGGAGGGTCAAGATGGTATGAAGCTAGTTCTTCTAGAAGAGCATCTGGG
GCTTCAATTCCATAATTCTGTAATACTATACGGTACTCTTTCTTATAATCACTAGAATCA
TTCTGGATATTCGTAGAATGATTATCTTCTAACATCTCAAATAAATCCATATTAATTCCT
AGCGATAAAAACCAAAATGACGATTAGCTTCAGCAATCTTTCTTTCTTCTTCGGACATTC
TCCAGCGTAATCCAACGTCAAAATGAGCCCAGACCATCTTAACAAATGCATTTATATCTT
TAATATCTTCAATAATGAATGTTTTACTTTTCGAAGGTTGACTCGCTAATTTAACTTTAT
CATCTTCAAACAGGTCAAAAAGACCATATTCATGAGCTCTTTTATAGCCTTTAATAGTTA
AAGCTTCGGAAGAAGAAAACGGTGAATCAGTATTTTGCAAAATATCTTCAGTATGCTTTA
TAATTAGAATAATATTTTCTGGATATTTTCTTTCTTTTATATCTTTAATTAAAAAATCCG
GATTTTCTGCTAAAGGAATAATTAATGAGCAGTTTTTATCAAGCGTATTTACTGATTTAC
CTTCTTTAGACATAAATTCTATTGAATAATGTTTTGCTACTTCAATCATGTGATTTCCTT
TTGCCTACTAATGGACCGTCGGGAATTTTGTTTTCCTGGATATATTTCTCATTTTCTTCC
ATCATTTTACTACCAATTTTAAGAAGCAAATCCATTGCTTCATTTGCTTTTGCTTTAGCC
TCTTCCAGCGTCATATCTTTGCTCATGATTTATCCCCATAGATGTCTCTCATCAATTTAA
GCGCTGAGCGTTCTAATTTCTTTTCTTTCTCAGCACTAATCATTGATTTCATCCATTCTT
CCGATTCGTTCTGCATTTCTTTATTTGCTTGTTCAACCCAACCATCATCAATGTACATTG
AGTTTGGTCTATTGAACCATTCAAGAATCTTCTTGAGAGCTTTCATTTATTTTACCTAAA
ACAATAGTAGGAGCATTGTCAAATTTATGAATTTTTAGCAAATTTGGATTTAAATTATTC
CATAAAGAGGTAATAAAATATGATAGCGCACTTTCGTCCGTAATTATAAATTTATTTCCT
TTATCTATTTTCCAATCATATATTGAATCATATGAATAGAAGGACAATGGTTTATTATTA
TAATATGCTTCACTAACATCAATATAGTTAGATTTAGTAAATGCTTGAATTGCCATAAAT
GGAGAATTTTGTACAGTTTCAATAATTCCGATCTTTTTAAGTTTTATTTCAACATCTTCT
GGAATTGGCATTGAAATAAAATCTTCTACTAGATACATGTTATTGTCATATCTTTTATCA
ATCATTACTGCTACGGTAATTGGAACATCCTTGACAAAGGCCATACTAATACTATTGATA
GACATTTCAAACAAAATTGCTTCCATAATTTTCCTCAATCACAAGATGTAGATGAACAAC
TAGAATCACAAGAACTTCCACATGAATCCCCTGCCCATACATGAACAGGAACATTAGTAT
CATATGAATCAGAACTAGACTGTGTATTCTGTGTGTTAGATGATGTAGTAGGTGTTGACC
AGCGCCAAGGATTTTTATAATATTCTTGGGCTTCTTCATAAGTCATAGTAACTGCTTCTA
CTGTTCCATCTCCCATATAAACATACTCAACTACAGTTAAAGGAAGGTAGTCATTTGAAA
TAGGAACTACACCTTCCCCAGGAGTTGTAGAGAAAAAATCCGTAAAGAAACTTTTAAACC
AATTAAAGATAAACATTACAAAAAGCCTCTTTTGAATTCAACTTGCTTTTCACCATAATC
ATATCGAATCTCTGCATTAAATTCAACAGAACCATCTGCGTACATCATAAATGAATGCAC
AACAACTTCTGTAGACCATGGTTGCAATTCATATTTCTTCATTACATGCCGTGAAATGAT
AATATCTAAATCTTCATTCGGTTTAATCCAACGATTTAACATAGTGCTCTCCTCTATAAG
ATAATTCTATTATACCATACTCATTTTGGAAAGTAAACCATTTAAATGAAAAAAAGGACT
CCCGAAGGAGTCCTTGAATTTATTCACCAGTTACTTTCCACAAATCTTCATTTGCAGCAA
TCCATTCAGTACGTTGATTTTCTTCATATACTGTAGAATATGCTGCTTTTTCTGAAGGGA
ATGTCTGGTAATGAGCACCAGAAATTTTGTGAACATCAGAATAAAGAGGGAAAGCTACGG
AAATTTCCTTTCCTTCAATTTTCTTATTTCCATCTAATTTCTGCTCAAATGTTTTGATAT
TAACATAACCGCGAGTACTAGCCATGTAATTCTCCTTTTATTTAAATTACATGATTATTT
ATAATAAATTCTCGCGGAACGCTAAAATACCCAATTTTAGTTAATATAACAACATCGCCG
TTAATAATTACCGGAGAATAATCGGCTGGAGCATTAAATTTCCAATGGGCTCTAATATTA
TATCCATCAGAACCAAATGCTCGACTAGCCGGTCTCCCGGCTTTTTGCCATGCATAAAAA
TCAAATTTCATTTTGAATGCTCTATAATTAATTTTAAGGCTTCTTCGCGCACCAACTTGC
CTAATGGTATATGCCCAGTTTTAATTGTGTAAGCTTTGTGGAGCTGATTAGATAAGAGCT
CACATACGAGCTCCTTGTCATAATCTTTAAATAGCTGGTCAATACGTTTCTTGCGGGCTT
TCTTAAGCTGGCGTTTATTTAAACGAGCCATCAATAACCTCGGTCTTGACGAGCGAAATT
TTCAGCATTTTTCAGATAATAAAGTTTAAATATTTCTTCAGCTGACATTCCAAGAGCAAT
GAATTTATTCATGAAAAAGTGAAATTGGTCAATTAGTTCAAATTTAATTTCAAGTTGATC
TTCAGGAGATAAATCTTGAATTTTCTTGGATTGCATTTCAGAATAACGTTTCTTCCAAGG
TTTCCATACAGCAGAAGCTTCTTTTTCACCATTACTCATACCACCAAGAGAAGTATATAG
CTCGCGAGTTTCATCTGCGATATAATCATCTTGGTTTCGCAACCAAGCAAGAACTTCTCC
TGCAGTTTCAAGTGAATCAGGATGACGATTTGTTTCTGGCTTATCATTAGCCAAACGAAT
CTGTAAATGCCGCTGCATATCAAGCATAACCTGCAATGGGTCAATATTGTGCATAATATT
CTCAGCATATGCACGATTTGCTTTATCAACGCCTTCGATCAAATGAGCGCATTCATTAAA
GTGAGCCATTATTTTTCCTTTCAATTCATTAATAAGTTAAATAATTATATCATTTGAATA
TAAGCAATTAATTAAAAATATATACTTCATCAGTTCCATTCTTTTCTTTGGAATGATATA
TGTTAAAGACATATTTTTTATTAAGATGCTTAACATTGTATTTTTTAGACCATTCTTTAA
GAAGAGTGTTTTCCTTTCCGTGATGCTCTAAAACATTCGACAGTCCAAATTTTATTCCTC
TGTCATTTAAAGAATCTAAAAGATTTAAAAGGTCTTTTTCTTCTTCTTCTGACCAAAATT
TATTATAATCAGCAACTGTTATAAGATATGGAGGGTCCACATATACAAAATCGCCGTCTA
GAATTTTGACATCTTTAAAATGCAATGAACTAAAGATTATTTTATCACAATTTTGTTTAA
AGTGATTAAAGCGTTTTTCACTATTTTTGTTTATAGTTCTTTTTCCAAACGGAGTAGTAA
AATTTCCTTTATCGTTTATACGAATCATATTACTAAACCCGTGAAAATGAAGAACATAAA
GTAAAAGAGGATCTCTAGTTTTATTATAATCTTCACGTAATTTCAAAAACTCTTCTTTTG
ATGTTTTTGATAGTTTGTATTGCTTTATTACTTTTAATACGTCATCCCATGATATATCAA
TAAGACATTTATACATTTCAATAATTGGTGTTTGAATATCATTGGCCAATACAGGACCAT
TGACGTTCAAAGACACTGATAAACCTCCACAAAATAAATCCACGAATCTGTCATATTTTG
GAAAGTGGGGCTTAAGTTCAGGTAATAATGACTGTTTATTACCTGTATACGCGATAGCTC
CTAGCATTATATTCTCTCATTTATTGCAGCAAAAAATGAATTATACAATTCATCATCATA
TGTATTTGATAGTAATACTAACACGTTTTGCGATTTAGCATATTCATTAAACCTCGCCTG
AATAGTTGGATTATCAGTAAATGATTCTCTTTTTGTCCATTTATTACGCGGATAATATCC
GCATGGCAAAAAATCTAATATCATCAATGATACAGGGTTTTCAGTTTTTGTGTATTCTTT
TAATTTCTCTTTATCTTCTAAATATATTCCAACAGAATCAATAGCTGTACCTCCACCAAC
TTGGTGTTTAATTTCAATTATATGCTTTTTACCGTTGCGAGAAATAACAATATCAAATCG
TCTAGTACGCTTCTTAGTTATAAAATTCGAGCAAAACAAATTATTTGATTTTTCAGTATC
ATCGGTTAAAACCATTTTTTCTTGATAACTAACTGAACAATCAGTGAAATATTCTTTTAC
TTTATTAAGTATGAAATTTTCAACTACGGCAGATATTTTATATGAATCTCCGTTTAAAGC
CATTTCATGTACAATTTTATTAATCATTATATCATCCTCAGCAATTTATTTTATAATACC
ATAACAAGCTGAGAAAGTAAACAAATTTGTGAAATTTGCGATAAATATTAATTTAAAGGA
GGACATATGGTACAAAAATTAATGGCACTTGTTAATGCCATAAAAGGTAATAAAAAACGT
ATAGCTTTTACTATTTCTGCTATGGTAGGAATTTTACTCTGGAACTTTATTTTATCACCA
ATTGCAATTGCGCATGGTGTTAATATTCCAGTAGTTACTCTTGATACATTCGTAGATCTA
GCATTTGCTTTAGTTGGGTTAATTTAAATCTTGGCATATTTAGATAGCCGCATTTTAGCC
ATCAACCCCTGGGCAATATTATTTTTCATATATTCCATAATTTGTTCAGGGGTTGCACCT
TCCTTTCTAATCATATCATTGACATCTTTTGATTTCCAGGGAGATTTATCCCAAAACATA
ACCCTTTCTCCTGCATCAACTAATTTAGTCATTCGTTTGATAGTGTCAGGGTGACGAGGT
TCATTATCTAAAACCCACACTCGTCTATCTTTAAATGGAACAACTTCTAGGTCTAATTGA
CCACCCGTAATAGCTATACCATTTTCAATAAAAAGTGAATCTATAGGTCCTTCTAGAACA
TATACATCACCATCTTTAACTCGTTCGACTCCATATATTTTTGTTGCCTCAGGATAAGCT
TTGATGGTGATATATTTTTGGGGAGCATCTTTCTTTAATGCACGTCCTTGAAAAGACTCA
GCTTTTCCATTAGCATTATAAATTGGAATAACAAGACGAGGCTCAGGTATTTCCTTTTTG
TATGTTCCCGGTGCTATGCTATTAACTAATTTAGGCCATTCAGTTGTAAACCAAAGATAT
TTCCATTTATCCTTTGGAATACAACGAGCTTTTACATATTTTATAATTGCATGGTCTTCC
GCCAGTTTATCTAATCTAACGCATGACGGAAGAGATTTAATTATTTTCTTCTCAGGTTGT
TTAGAAAGTTCTTTAGGTTTTTCTACTGGACGACTTTTACCTTTTTCTTTTCTTATTTCA
AAGATATACTCACGATATAAATCAGGTTCAAACTCCTTTAAATATATTCCGATTGGTGCA
TGATAGTTACAGTTATAACAATGAATATTTCCTTCATTATTATCACCATAATACCATCCA
CGAGCTTTATTCTGGTCGGTTTTTGAATCTCCACAAACAGGGCATCTAAACCGTAATTTA
AAAGTTGAACTATTATTTACTTGTGTGAATTTAGGTAAATGAGCTAATGCACGGTATGCA
AACTCATTATCAATCCAAGGTATTGATGACATTTTTACTCTTCTTTTTCTTTAGATTCCT
CTTTTTTCTTTTTAGGAATCTGTTCAGGACCTTTATTTACTACAGCACCTGATGTTGTTC
CAGTAGAGATATTTTCAGGATTACCACCTGAATCTCCAGCTACCATATCTTCTTTGATAA
ATTCTTTATATGTTTTCATATTAACCTCTATTCATAAAAGCATTAAAAATTTGGTCATCA
ATAGATGGAATAGCAACCTTTTCGGCATCATTTAGCAAATCATTAATTTCATCAGATAGC
ATAACACATGTGCCTTTATTTCCTGTAATTGTTACTGCACAATTACGAACGTTTTCTTTA
TCAAATTTTAGGTTAATATTTTCGTAATGAAAATCCTTTAATGCTGAATATATTTTTAAA
ATAAAATTGTCTTTTACTACAATAAACCCAACCTCACTATTAAAACGTGGTTCATGGAAA
CTGCAATAAACCTTTTCATCTATGAAATCGTATGAAATTTTTTCCATTTTTAAATATGAA
AATTCAGAACTATGCATACTAACCTCTAATTACTCACCTACCACTTCAGCGATGATATTT
TTATTATTAAAGTTTTTATCGCAATATAGAACATAATTATACTGCATTACACCACCAGAC
TTAAGCTGTTTTTGCACTTCGGCTTTCATTTCAGGACGATCGCGCTCAACGATATTCATA
ATATCTGCTTCAATTTGGGTTTCAACTTCAGTCTGATCCGCAGTCATAGACCATTCGCAC
AAATCTTTATCATAGCCTGCCATAGCAGGCTGAGCAGCGCAAGAAGCTAAAGCAAAAATT
GTAGCAAAGATAAATTTTTTCATGATAATCTCCTCAGTAGTTTATGTTTATATAGTATCT
CAATTTCCAATAAAAGTAAACAGTTATTTTAAAACTTCTGCATAATCACATGTTACAAAC
TGGTTCTCTAACTTGACAATTTTACGAAAGTATCTTTTGCATTGGCGAATCTGCCGCTTC
GTAGGGCGAACAGCAAACTTAATAAATTCCACTCGACCAAATGGAGGACTTTCTTCTGCT
GGAATATCTAACACCAATTCCCACGTATCTGCAATAAGTGCTTTGAATTGCGTATTTTTC
CTGACGTTATACGGAGTAGGTTTAAATAAAACAATATGCATATTATCCTCGGCAATCCAC
TTCGCACACTTTCTTGTCATCAATGAAAGCTTTAACTAATGCTTTATTAACTTCAGCATA
TTGAGTAGTAGCCCATTGAACGTCATCTTTCATCATTGTGATTTCTTTAATAAACATGCT
TTCATTCTTAAACCACCCCATAAAAACTACCTTTACCAATTCCATAACAATCTCCTCATT
TAACCAACAAGACTACTATACCATAGTCTTGTCAGCTTGTAAACTAAAATTTTAATTCAT
TTGCCAAAGCATCTAACTGAGCTCGAGCTGATTCGTTTCTTTGATAGCGATTCTGTTCAG
CCTGAATCTGTTGTGAACCTGCTACTTCACTCACTTCGGTTGGAGTAGAATCTTGTTCAA
TTTCTACCCATTTTTGATTTCCTTTTTGAACACCCATCAAAAACTTATTCCACTTATTCT
TATCACCATATCGTGATTTGATTTGCTTAATAAGTTGTTGTTCAGCAGCTGCTAGCTCCT
CAGTTTCAATGACCGCAAGCATAAAATCAGCTGTTGCTGGAAGACCAGCAGATTCTGCAA
TATCGCTCATGTTAACATCGGAAGAGTCCCAAGCTTGTTTACCGACCTGTGCTGCAGTCC
AAAGAACAGTTTCAGTTTCAACAGCCAGAGCACGCAATTCTTCTGCGATGGCTTTAACAG
TTGTGTAACTATTTTCCGAATAAACTCTGATGCGGCAAGATTTACAAATACCCAGATAGT
CAACAATAATGATTGTTGGAACAAAATTCTTCTTGAGCTTCAATTCGTTTAAAAGAGATC
GAAATGTATTAGCGTCTGCTCCACCAGTAGGATATTGCTTAACGATTAAACGACCGAGAG
TAGATTTCTCACGCCATTTTTCCATTTTTCCTTTATACTCAGCGTAAGAAATATGCCCAT
CATCAATGTCATCAAGAGAAACATCAAGCATATTAGCGTCAATACGTTTAGCACAGACTT
CTTCTGCCATTTCCATGGAAATGTAAAGAACATTATGACCGAGCTGTAAATAATCTGCTG
CCAATGAACACAATCCTAATGACTTACCAACGTTAACACCAGCCATTAAAACGTTCAGTG
TTCCAGTCTCAGCTCCGCCTTTAGTAATTTTGTTTAGAATTCTGAGTTTAAATGGAACCT
TACGAGCTTTATTCATATAAGATAGCCAACGCGCTTCATAGTCATCCATCCAATCATGAC
CAACGTAGCTATCAAATGAAATTGATAATGCTTGGCGCATGATGTCAGGAATAGCACCTA
CATCTGGCATTTTCTTATTTCGTTTTTCCGGAGGAAGCTCAGCATTAGTTTGAATTTCGA
TTATTTTAGATGTAGCATTAAACATCGCCCTTTGCTGAACATATTTTTCTGTTTCTTTTA
CTAACCAGCTGTGGTCTTCTGGAGAATCAGCCAGTTTTGAAATAAGTGTTTTTACACCAG
AATATTCTGTTTCAGTAAATGAACTATTTTCTAATGCAACATTTAACGCATTAATAGATG
GAACGCTATGATACTCATTAACATGAGATTTAATTAATTTGAATGTATTTTTAGCTGGAC
CACTTTCAAAATATTCTGAATCCATATATGGCCAAACTTTTGAAAAATAAGCTTGATCAA
ATATGAGATGAGAAAGAATAATTTCTACCACACTTACTCCTTAAAAGAATTTAAATTTTT
TCTTTGACCTTTTATTAAATGCATCTTGCAGTTGCATTGTAATACATTTTTCTACATGAG
GAGCTAACTCAGCTTTTCTTTCTTGGTCAAGAACAGCAAAGTCCATTACGACTTTTCCAT
CAACCCAATCTAATTTTGTCACATACACAATGTGTGTAGAACCATCTTCTAGTTTAATGA
CAATCTCCTGGATAACATTTTCCATAGCGGATTTAATTATCTTAAGAGACTCATTAAAAA
GACGTTCTTTTCTTTCTTTTTCCCCCTCCGAAGAGGGGGATTCATCGATAATTTCTAGAT
CTAAATCTAAATCATCTTTATTCATTAAATTCTTCCATATCACTTAACTGTTCGAGGTCA
GTTTCTAAATCAGCTGCTGATTTACTTTTACTTTCTGGAGATTTAAATTTTTCAACCTTT
GAGTTAATCAATTCATCAACTTCAGCTTCAACAATTTCATTGCTATCAATAGCACCTAAC
TGATAAGCACGTTTAATAGCATCTCGGAATGGTTGATGCTTAAATAAAGGACCCCAGAAT
GTAGTGCAGTTGGTATCTTTTGCACGCCAAGATTTTTCTTCGCGAATCATCTCGCCGGTT
TCTTCGTCAAGAAATTCACGAGCATACCAGCCATTTTTAGGTTTTACCACGAATCCTAAT
TCTAGAGCCATATCTAACAATCCAGAATAAGGATCGATACCACCGTCAAATTTAACATCA
ATAAAGAATTTACTTTTTTCTTTAACGGTACGAGATTTTTCTACATTTAGAACAAATTGA
TACCCCTGAAGATCAGAACCATCTTTAATCTGACGTTTACCGATAATGAATACGGTATCA
GCCGAATACATTACGCCTGTACCACCTGTCATTACGGTTTTACTAAACATTTCAATTGTT
TCAATTGTATGGTTAACCGCAACGCACGGAATATTTTTAATGCTAAAATAAGGAGTAACA
ATACGGAATAATGACTTCAGTGATTTAGCACGAGTCATATCTGCCACAGATTTTTCATTC
AAGGCATCTTCCGTTTCTTTCTTAGAAGCCATATTACCGATTGAGTCGATGAATACAATA
ACCTTTTCACCACGCTCAATAGCTTCAAGCTGATTCACCATATCAATTTTCAGCTGTTCA
ACTGACTGAATTGGTGTATGAATTACTCGTTCCGGGTCAACTCCCATGGATCGCAAATAA
GCTGGAGTAATACCAAATTCGCTATCATAGAATAGACAAACCGCGTCAGGATATTTGTTC
AAATATGCCGCAACCATAGTCAAAGACATATTTGATTTAAAGTGTTTAGAAGGCCCTGCG
AAAATAGTTAAACCAGACTGCATACCGCCATCAATCGCGCCAGAAATAGCAATATTAAGC
ATTGGGATTTTTGTACGGATTACATCCTTTTCATTAAAGAATTTAGATGTAGTCAGTTCA
GCAGTCATTTTAGAAGTTGAAGCTTTAATCAAACGGGATTTTAAATCTGCAATAGACATT
CATTTTTTCCATAGGCATCATTATATTTTCCTCACTGGTTAAAGATAGAGTAATTATAAC
ACAATAAATTTAGGCATTAATCAACTGCTATTGGATGAATAGCATTAAACTTATGAAATG
CTTCTGATTTTTCTTTACGCGAAACACACATGCGAAGAACCTTTAGTGGTTCATCTTCTT
CACCCAACGATTTTCGTTTTTCAATATTAGAAGTTTTCCAACGAGCTTGCTCTGGAAACT
CTCTATTGATTTGCTCAAGCGCTCTATTATGTTTAGAATTACTACGAATTGAACTACATC
CGCCAGGAGCTTGTGCTTTTCCAGATACAACTAGATATTTGAACAAGGCCAAATGCGGAT
AACCTTGATTAATTAAATTGAGAAATGCATACATATCTTCGCATAAATCAATTTTTCCAT
ACCCAATTTGTTCTGTAGTAAGTTTTCCGAGGTCATACCATGTATTCGTGAATCCATATG
AATTTTCACGATAATTACCCCAAGATGAAGTAATTTTAAAAATAGGTAGACGAGCATGGC
CATGATAATACCCACAATCCATGGCATCCTCAACATATTGAATCAATTCATAGAACTGTT
CACGAGTCAATTGATTGACTTTATCCACACAACGACGATCATCTCTTTTTCGCATTGAAC
TCATACGAATAGTAGTATCATCGTCAATCATCCAGATTCGTTGACCTGCATACATATCAG
TAATTGCTTTACGAGTACCGGCAATTCCGTTTACATCATCAGGAATAGTTATAATTTTAG
CTCTAGACCCATAGGCATCATAATAAGCTTTTTCTTCGTGTTCACGCACTACAATATGCG
GTTCATAATCAGTCGGAAACATATCAAGGGCAGAAACTGCCCCGACACGCTGATAACTTG
GAATTACGAATTGAATCATTTCCACTCACCGTTATAATCTTTTTTCACAATATGAGTTTC
GCCAGTATTCCACCAATGATCAACCAAGTAAAAATGACGAGAATATACATGAAGACTTCC
AACATTCCATATAATAGAACCTGCTTTATACTGACGAGTTGAATCGCCTGCATTCAAATC
AGATACTAATTTATCTAATACGTATTTTTGCCATGCATAATCATTACGGAATCCGAAGAC
CACGTCATTTGAGCGCATGCTTACTACTGCATTGACTTTCTTATCACGAATCAGGTACTG
TACTGTATTAGTACACATGAAATCTGACATACCATCTTTATTGTAGTCAAATTGCATGGA
TGGACGAGTATAAATCATGATACCACGTCGAGAATCAGGATTTTGACCAAGTTCAGCTAA
ACACATATCATACTGGGCATAGTTATCTTCTGACCAAATAGCCCAACCATAATTCGAGTT
AATTTCGCCTTTAGAAGATGCTACCTGCTGCCAAATCTTTGGTGTTTCACCTGGAATATC
TTTAACAAACAAGCTCTTAGATTTATACCATTCAAGTTCACGCTGAATGTATTCATCATT
AAGAGCGCCAAAAATAAACGGTTCATCTGCTACAAATGATGCGCCAATAATTTCAATAGT
TTTAACACCAGTTTTATCAACTACGAAATCTTTTTCTTTTAATGCAAGCCCCAAATGAAG
ACGGATTTCTTCAACTGTCATAGAGTCACTAATCATTTAAACCTCAATTGATACATTCAT
ATTTAACTTGTAACAGTAATAAACCCCAACCTAAAATAATAGTTGGAATCATAAGAGGAA
CCGTTACACTATAGTATATACTTATTATAATCATCAAGATTAAAAGCAACACTGCTATAA
TTTTGCTTTTCATTCCTTCTCTCTGATGATAATTACCTGATTTGGTTGTGCAGACTTTTT
AGTTTCACCCGCAATTGACCAAATAAATGTAATAAACCAACCAATAATTGACCAGTTAAA
CAGTAAAGATGTGAAAAAGATTCCTACTGTCGATTTTGACCCACGCATCAAGGCGATAAA
CCATGGAAGCATGTATATAATAATAGCCAACACACCTGAAACTAAAACCATAAAAATTGA
ACCTGCTACTAAAGTTTCCATGTTTTCCTCACTTAGTCAAATTTTTTACACATGAATTAT
AAGAATTCACTACATACTCCATCGGAGCATTTTTACCAGTACGCCATTGGTAATTATTAG
CCCAATTAGCCCAAATTTCGGCGCAGTAGTTTTCAATTTTTTCTTCGCGTGTAATTACAT
CCGAATTACGATATGCTTGAGCAGATTCATCTGGACGAATAGCTTCGTCAAAATTCGCCT
GCATTTGTTCGACTGTTTGCTTTGGAGCTTCTTTATAACACTTGACATTAGGATTATAAA
ATTTGCTTGAACAGTTTACAATTTTTCCTACATCAGACTGATTTACTACCGGTCCTTGAG
CTACACAACCAGTAAGACCTAATGCAATAACCAAAATAGCGATTTTCATAATAATTTCCT
CAAATGCAAGTAGTAATTACTCCAGTAGTGCTTATGCAGGTATTACCCATTTGCACACCT
AAAGATCCATTTGTATTCACATGAAGATTATCATCAATTTTAACTGATATTTTACCATTA
GTGTGAATAACGGTGCTAGATTCAATCACAGGTTGAGTATCATTTTCAACACTAACAAAT
GGAACTGCTGCTAATGCAACTAAACACATTGCTAAGCAACCATAAACAATTTTCATTTTA
TTCTCCAAATCCGTATTAGTTGATAGTTGTATAGTACCACAGAGGAACAGTCTTGTAAAC
AGTTTTGTGAAAAATTTTTTAGGGAATTCTAAAGGTCCAGAATCATCTGTTTTTCATAAG
TATAGATTTATATTACTTGTATGAAAAAGGGACCCGGAGGTCCCTAGATTTATTCTATCA
ACCAAACAGGAAGTCTAACGAAGCTTTTTCTTCATAGTCCATACCAGCCGATTCACACAT
ACCCGCAAGCGGTTTAACAAACGATTTTTGGAACAAAGTTGAGTAGTCAATCCAAGACAG
TACATCAGAACGAATTTCTTTTGGAAGTTCTGTGCCCGACGGCCAAGCAATGCACTTGTC
ACCAAATGGATTTCCTTCACGCAATGGAAGAACCATTACCTTATTTCCATCCAAAATTGG
AGCTACACCTAAACCGCTAACAGCTCGACGATAAGTTAGCACACCACGAATATGGAACGG
GCATTTAAATCCTGGCCAACCTTTATCATCATATTTCGCTATATCGTTCGCAGTTTTTAC
TTCAGCAATAACTTTATAATCAAGTTGACGATATTCTTTCTCAAAGTTCTTGTAGTATTC
TTGGACAGACTCTTCACCTTCCTGAAGAATACGACGAATACTTTCTTCGAGAGCTTCTTG
CACTGCTTTTGGTGTTGAACTCTGCTGAGTTTCCATACCCATGATTTTTAGATGTGGTTC
AGCAAATCGCTTATCTTCCATATCATAAACGTTCAGAGCATAACGCTTTTTCGCTTTCCA
AAATCCACCAACGCCCTTTGAACCAAGTGGAGGGCAAGAAATAGCTTCACGGTCCATATG
CATCAGATGCTCGCGGTTATTCATATAATCACATAACTCACGATATGCAACATCAATCAT
AGGTTCCATCTTTTTCTTACCGAACTGATTCATGAATTCAACTAAATCATTTTGTTCTTT
AAAGCGGTCAAGACCGACTTTTTCAATAACTTTATCTACACAAACATATACCGAATCAGT
ATCACCTGCTGCAATGAAATCTTCACCATTAGTTCCGCATACTTTATTCAGATATTCATT
AATTTTACGAGCAATCCACTGAATACCGACTTGACCAAAAATTGTGATAGCAGTAGCATT
TCGCAAATCATAGTAACGGAAATGAATATTACCAAGAGCACCATAAAGACTGTTAATAAG
AATTTTACGGTTCAGCTGATTTGTGTTAGCAAGTGTAGCCGCTTTTTCACATTCTTCAAT
CAAACTATTGAGAACAGATTCAGTATAATTCGATAGTTCATTTAAGAAATCATCACTGAA
CTTAACATATCGTTCAACTTCAGGTTTAGTTGAACAAGACCCTGCGCCTTTCATAATAAT
CTTTTTAATAGCTTCGGCATTCATTTCTTCAGCGAACATTTTCTTTTTCCAATCTTTACG
CTGGAAAAATACTTTAGCGATTTCCTTTGGAATGATACCTTCTTGATGCTTATCATACAT
CCATCCATTCGGAGAACAAGAATATTCATCACTCGGTTTAGGAGCTGTTCCTGCGATATA
TTCATGAATTGGATGAACTTTAAACTGACCACGAATAGTCTCAGGACTAATGTTAACCTG
ACGAATAATGCTCGGATACAGAGACGTCAAGTCAAAACTCATAATATATCGACGAGCAAT
TGGTTTAGGTTCAAATACGAATGCACCCGGAAAACTCTGTTTAACGTGCGAACCTTGTTG
AGGAATAACCTTATGTTCACCTTTCAATGAGTTAAAAATAATAGCATCCCAGGTTTTAAT
AGGACTCATTACACCGGAAAAAGGCATTTTAGCGTAATAAGACATACTTAAAACTAGATC
GATAAACCCGCGAATTTTATCAATTGCTTGAACTGATTCTACGTCAATGATGTTATAACT
AATGTATCGTTGATGATTAGTCTCACGAAGTTTATTAATAGGACCGTCGTATGGTAATTT
ACCTTTTTTGGTTTCATGCTGAGCAACTGATTCCAAAGAGAATGACGGCAAATTAGTAAA
AGCGAATTTCTTGTACAAATCTAAATAATCAAGAATAGATACGCCATCAATAGAATAAAT
TTCTTTGCTGCCGTACATATTTTGAATTAGTTTAGATTTTACTCGACCGATTGGAGAGAA
GCGTTTCATACTACGTTCACCGAGAACCATTTTAACGCGATTCATGATATACGGAACGTC
AAACCCCTCAATATTCCAACCAGTAAAAATAGCAGGTCGTTTCTGTTCCCAGAGATTGAT
ATATTCCATGAGCATATCACGCTCATTATCGAATGGCATATAAATTACTCGGTCAAGAAT
TTCTTGAGGAACTTCATCACCACCTTCACAGTCAAGCTTAGCAGCTAACTTTGCATCCCA
TTTTGATACTGAACCGTACATTGAATTCAAAAGGTCGAAAACATAAAAACGATCATCAAT
TGAATCGTAATGAGTGATAGCATCAATTTCATATTCAGCTTTCATTGGGTCAGGAAATTT
ATCACCAGTAACCTCAATGTCACAGTTAGCTACACGAACAAATTTTCGGTCATAAACAAT
TTCTGAACCGTATGTATCACTGATATAAGCGAGTTTAAAATCGTTCATACCGAGAGCTTC
GAGACCGATGTCTTCCATTCGTTTCATCCAATCTCGGGCATCTTTCATTGATGGAAATTT
TTGAGGAGCACAGTTTTTACCGTAAATGTCTTTGTATTTTGATTCTTCCTTACAGTGTCT
AAACATAGTTGGAAGATATTCTACTTCACGAGTACGTTCCTTTCCATTTTCATCAATATA
ACGTTCAACAATGTTATTTCCGACTGTTTCAATAGAGATATAAAATTCTTTCATAGATAT
TCCTTAGTTTATAGCCCGAGTTATTAGGCTCTTGATATATTATACTCCAAATAAGGGGCC
GAAGCCCCTTTGCTTTAAATTTCTATTGTACGACGCGATATAACGGACTTGCCATCTTTA
TTTGTGGTTTTGATAATCGCATGAAATGCGCGTTGGCGTGGGTAAACTAATCGTTGGAAT
TCTTTTTGGAATTCTATTTGTTTATCTTCCGGGAGGTCAAAAACCAGTTGGGTAGAAGAC
AGACCATATGTTTGTTTTAGATTTTCGAATATTAGAAAAGCTTCGGTAAACTGAATCTCT
GATTGTGTCATATAATTTACCTTAATTACCAATCGTATATTTAGGAACGAGTTTCCATTC
ATGTTTTTGTTTAAAAGAAATAACTCGGAAGTTATTAGTTAAATCTTTCATAAAAGTTCT
TTGTCCAGGAACGATTTCAATCAGTCCCCAATCTTCTAACAGCCATGCAATCGAATCACG
ACGAACTTCATCTTCTTCTGTCATTTCAACTTGACGGCCATCCATACGAAGCATTTCTTT
AAAATGAACGATATAGTATAGTCCTTTTTTCTGAAGAATATGACAGGACTGATACAGAAC
TTTATCTTTATTATTAGCAATTCCCATACGAGTCAAAGTTTCTTTTACTTTCAGAAAATC
TTCAGGTTTTTTAAGAGTAATTTCAATCATTTTACCATTCCAATGCTAGTTTTTTGAGTT
GTTTCTGTTCTTTTACGTTCTTAGTCACTTCTTTTAAAAAATCATCCGTGACTAATCCTT
TAAGTTCTTTTAATACTAAAGGTAGTTTTCCATTTTTAGTAAGAATTGATTTATAGTTAA
TTGCATCATTTGTATTAACTTGATACCGCTTAGCAAGTAACTTAATAATCAATACTTCGG
TGGAATCTTCAACTAGTTTTGCCCATTTACCATATCTTTTACCACGAGGAACTGCAGCCA
TTAGATAATTAAAATGAGCTTCATCACTTAAGCCTGATCCAATTAAATTCATAGCATATA
CAGCTGGCATGCACTCTGGAAATTGTGATAATGCATTTTCAACCATGAATTTTGAATAAT
CTTTTTGAGCAATAGAGCATTTAGTTTTATTATTAATAGCTCCAATTATTTCAAAAAATT
CATTTTCAGCTTTTTCTTTAAAAGTATCAGCAGCAGATTGGACAGCTGTCCAATCTTTAG
AATACCAAGCAACTTGATGCTCGTTTAATTGAATATCATCTTCAAATAAGCTCATATCAC
TTCCACTGCATTTCGCATGCTAATTGAATGAAAAGATAAGCTAAATGCAATTCAGTATTA
GCTGCAATACCATGATACTGATTATTTTCGCCGACAATTTCGTACATACGAATAATACTC
TGTGGTGTTACACGTGAATAGATTTCTTCGGCAAGTTTACCAATAAACCAAGAATAATCT
GCTGCATATTTTGGTGCTAAAGCTCTGAGTTGTTTAACATCTTTATTTTTGAGAGACTCA
AGAACATCATCAATAGCACCACGATCGTTAGTAACCAGTGATAAAATACCAGCATCCAAA
ACACCTTTAGATGAATAACTATCGAGCTCGCCAATAGTTTTACGAAAATCAGGAAAATTC
TTTTTAACCAAAGCTGCTACAACTTTCATATCAGCTATAGCAATACCTTCATGTTTACAG
ATTTCAGTCAATCGACGAATCATCTGCTTCATCATTTCAATTTTATCTTCATCGGTCGGT
TGACCGAATGTAATAACTCGACAGCGTGACTGAAGTGGTTTAATAATACCATCAATATTG
TTAGCAGTAATAATAATACTACAGTTTGAACTATAAGCTTCCATAAAGGAACGAAGATGT
CGCTGAGACTCTGCTAACCCTGAGCGGTCAAATTCATCAATAACGATTACTTTTTGACGA
CCATCAAATGAAGCGGCGCTGGCAAAATTAGTCAAAGGACCACGAACGAAATCAATTTTA
CAATCTGATCCATTCACAAACATCATATCAGCATTTACATCATGACACAATGCTTTTGCT
ACAGTTGTTTTACCTGTTCCTGGAGAAGGAGAATGAAGAATAATATGTGGAATCTTACCT
TTACTTGTAATAGATTTAAAGGTTTCTTTATCAAAGGCGGGAAGAATACATTCATCGATA
GTAGATGGACGATATTTCTGTTCAAGAATGTGTTCTTTTTCATTTACGGTAATCATAATT
TCCTCATTCAAGTTTTAGTGTAAATTATAAAGGGCCGAAGCCCTCTATTAAAAATCGTGG
GTAGAATCAGCTTCAAGAGCTACTACATAATTCGCGTGTTCACCTTCAAATTTAGCAGCG
CCTTGTTTACCTTTTGCCCAGAGCAGAAGTTTATAATTTCCTGGTTGCATTTTCATATTT
GCCATATTGATAATGAAATTAAATGTATTTTCACCATCATAATCACCAAGAGTCAAAGAA
TATTTAACACGGGTAAGAGCAGAATCTTCTACTTTATTAAAACCATTAATTACGATTTTA
CCTTCTTTTACCGTGATAGCAATTGTATCAATTTGCAGACCACGAGATACACGCAACAGT
TGTTGAAGGTCTTCAGCTTTAATTTCAGTAACAACAGATGCTACCGGGAATGGAATTGGT
TTATTAGGAGCAACTACTGTACTCGGATCTGCTGCTGGCCAAAAAATTGTTGAGCGGGCA
TCAGCAATTTTAATATTTCCATCTTCTGACTGGGAAATTTCTGCATCATCATTAACTAGA
GACAGAATACCGAGAAAACCGTTCAAATCGTAAATTGCTACATCAAAATCAATAACGTCA
GAAATATTTGCTTCCGCATAAGTTGTACCATTAACCGCACGAGTCATAATAAATTGACCG
GATTTAAGCATAATACCGGAGTTAATAGTAGCGAAATTTTTAAGCAGAGCAGTAGTATCT
TTAGACAGTTTCATGTAATTTCCTTCAATTCAAATGAGATTTAATTTTATAACTAATTTA
ATAAAGCAATTAACGATTAAAATCAGCCGCAATTGTTTCAGCAACAATTTGAGCAGCAAC
AATTAGGCGTTCATCTGCATTACCGCAATATTCATCTTCAAGGCGTTCACCACATGAAGT
CATAATAAATTTAGCACCGGCGTTTAGGGATTCTGCAGTATGTTTGCGCATTAGTTCAAT
CCATTTATTACTTACTTCACGATCGATAGCTTCATAATACGCATGACGAGCAGGTGCAGA
TTTAATTTTGTTCTGAATAACTTCCATTGCGTTATCAGAAAGAGACAAAACCCATGCGCG
ACGAATTTTATTTTGGTTTTGCGGATTTGAGTCAGAACGCACGTGTTTTGGCTGAATATC
TTTTACATCAACAGTATAATTCACAGTAATTTTAGTCATAATACACCTTTAGTCATAATA
ATCAGTAACAGTCCAAGCTTCATTTCTATTGGACATTATTTTTGTATATTCTGCTTTAAA
TGCATTCCTAAGCATAGATTCAGTAACTATATGCTCTTCATTAGAAAAATTATTTCTCAG
AATATATCGTTTTATTTCAGGAAAAGTTAATAGATGCTGTCCAGTTGAATATTCCATGTT
TTTCCTCCATAGAGATTATACTCTAATAAATTAAAGCATAATCTCTTATAAATTAAACCA
TTACAGTAAATCGACCAACTTTCTTCATTTGAAGATGCTGACCATATGCTTGTGGGTCAT
GGTCTCTATGTGAAATAACAAAAACATTAGTATTTTTTAAACTATCTAAAATAGTTGAAA
TAGCTTTTACACCTTCAACGTCGGTCGCTGAATCAAAAACTTCATCAAGAATTAGTGTGT
TTATTTTAACACCTGAAACTTTTTCAGCAATATCACGCCAAGTAAATAAAAGAGCAATAT
CAATTCGTGCTTTTTCACCTTGACTGAATGAAGCATAACTAAAATCTTCACGACCACGGG
ATTTAATTGTCTCATTAAATTCTTCATCTAATGTAAACACATAATCCGCTTCCATTATTT
TAAGATAATGGTTAATCTGCTTATTAAATAATGGAATGTACTTTTTAATAATAGCACCTT
TAATACCAGAATCTTTGAGCATATCAGTCAAAATTCCTCGGTGGTATTTTTCCATTACTA
AATTAGTTTTTGTCTTAACAATTTTATCAAGTTCTTCTTGAAGCAGTGCTATTTCATCAG
CATGGTCAATAAACTCAGAAGATGCTTTTTCTATAGCCGCTTTAACTTTTTTAGCTTTAT
CTACTGTCGTGATTAGAGATTGCTTTTTATTGCGAATATCATTTGCCAACGACTGCTGGG
TTTTAATATTATCTCGGTATTCATCAACAAGAACTTTTAAATTATCACGGTGTGTTGAAA
GCTGTTCAAACGAATGCGTGCATTCAGAAACTTTATCTTTAATTTTAGAAACAACTTTAT
CACCGGAACTCAATTGTGACAAACAGGTTGGACATAATCCACCTTCGTGATACATATTAA
TGACTTTATTATACGAGTCAATTTTTGATTTAATTAAAACTGCTTCTTGACCGATTTTAT
TAAATGCATCAGTCGGGTCTTCGTCTAAAACAATATTAACTAATCTTTCATTAGCTTCTT
CTATTTCCGATTTTAGCGTTCTAGCTTCTTTTGCCAAATCATCATACATATTTTGCAGAC
GAGTAAGATTGTCACCCGTTAATTTTTTCTGGCGTTCAACGTTATCATTATATATTTTAA
TTTGTTGGATAATACTATCTTTTTTAACATCAAGCACTTGGTTTTGTGAATTTAATTCAC
GTATTAGTGCTTTATTAAGCTTATCCATTTCAGCTAATGTTCCTACCTCAAGCAGGTCTT
CCACAAGCTTTCTTCGTGCAGGGGTCGACAAACCCATGAAAGGGGTATACCCTGCTGTAC
CAAGGACAACAATCTGCTTGAAACTGGCATATGACATTCCGATAAGCTGTTCAAATTCTG
CTTGGAAATCTTTACTGCTGGCAGATTCATTAAGACGTGTACCGTTAACGGTGATTTCGA
AAACGTTTGGTTTTTGTCCTCTTTTGATATAGTACTTTTTCTCATCATATTCCATCCACA
GTTCAACTAAAAGTTCTTTCTTATTTGTGCTGTTTATTAATTGACCTTTCTTTACATCAC
GAAATGGTTTGCCAAAAAGCCCAAATGTGATGGCTTCTAACATAGTAGACTTACCACCGC
CATTTCGTCCAGTAATAAGAGTTTTTTGAACCTTATCTAATTGAATGTCAATAGGATTTC
CACCTACTGACATTATATTTTGATACCTAACTCGGTTTAGTTTAAAATTCTTCACAAAAG
ATTCCTTTTAATGTATCTTTTAGACCATTCTATCATATCATCATAATCTAAAAAGTATTC
ATCAAATTCAGCCATGCAAACAACACCTTGTGCTGCTTTTGATGTGATATAAATTATTCC
AACATATCTAGAATCTTCTTCGGTGTAATCAATATTTGCTATGAATTCATCATTAATGTC
AAATGTCGAAAACTTCACAGTATGCATCCTTAATACAAGATACAGCCATATCTTGTAATG
ATTTAGGTGTGTCATTATCTAAAATGTTGAAGTTAAAAGATACAGCCCAGTCAGTGCAGA
CTGTAACCTTTTTAATACAATTATCTTCAACCTCTAACGGTTCAAACCAATATTCAATAA
TTTCTTTATGCCCAATATCATCTTTTACTTCGCATTCAAAATGCTGACTCATCATAACAT
TTTTAAATTCATCAAAAGTCATTGTGTTGCCTCTACATATAGCTGGTTTGCATATTGAAT
AAGTGCTTCACGGTCAGAATCAGTGATGTCTGGAATTGCATTAATGTATTCTTCCATCAA
CGTCTGAAGAGATTGAACTTCAACTTCTTCACTGTCATCTGACTCGACAGAGTTATCAAT
TTTTGACACAACTCGTAATGAATGCACAACTTTTTCTAGTTCAGATTCGAACTTCGTCAG
ATTTTTGTCTACTTCAGTTACTATAACACGTACTGATAGATTTGTAAAATCTTTATAGTC
AATTTTTCCTTTAAACGGATAATGAATTCTACGATGCCAGGTAGTATTGTTTGGAATAAA
TTCCATTCGTTCTGTTTCTGTATCAAACATCCAGAACCCGCGAGGGTCATTCTCGTCACC
TGCAGTTAGTGTCCATGGTGTCCCAATATATCTGACGTTAGCAGCCTCAGAGATAGTATG
GAAGTGACCAGACCACACTTCTTTATAAGTCTTAAGGAAATCAGGTTCAAGACCGTGAGA
TTTCATTCCTTTATAAAAATAAAATCCATTCAGTTCCCAGTGACCAACACAAAAAGAAGC
AGATGAAGTTTTGATGTGTTCAAGAATTTCACCAGTATTTTCTTCGCACATCCAAGGAAT
CAAATCAATCAAACACCCGTCAAAATCTACCGTAGTAGGCTTATCATATACTTTAACATT
AGGATATTTAGCCAAAAGCTCAGTAGAGGCATTTGGAGTTAAAGTATTTTTAAAGTGCAT
ATCATGGTTTCCTACAACAGTATGTAGGGTAATACCAGCATCATCAAGCATTTGAACTAT
TTCACGAGCGAACTCCATAGTTTTATGCGTGATTGCTTTTCGCACATCAAAAATATCACC
ATATTGAATCCAGGTAGTAATTCCATTTTTCTTAGAATATTCTATTGCTTGTTTAATTCC
ATCCAACTGAATGGACTGAACCCACTCATCATCAGCTTTAACGCCTAAATGCCAATCACC
TAAATTTAAAATTTTCATATATCAAGAACCGTCATTGAAATGCAAAATAAAATTATTGAA
ATAAATCCATCTGGAGTACTAAAGAATCCAATCCAACATGCTCTAGTGAATAGATAAAAT
GCAAGAAAAAGTATCACGTATCCAAGAAATATCATTATATCAAACTCCGTATAAAGCTAA
AGGGCCGAAGCCCTTTATTTTGTAATAATGTCAAACTGTTCTTTAAAGCAGAAGCTTGAA
TCTTGATGCTGATACAAAAATTCATAAGCTTTTTCACGTTCGCGGTCATAAAGAGTTCGG
TCAGATGACAGTTCTTTAATACGTTCAAATGTTGATTCCATATCATTTTCATCAAACCAA
ATGATACCGCTATCATGCGAGGTCAAAGGAGTATTATCAACACGGAATTTTAAATTTTCG
CCAGTAGATTTCCAAAATACCGGAATTGTTCCGCATGCACCAAGCTCGAGATGAGTATAT
TCTAAAGAACGCTGTAGATATTTTTTGTCCAACTTACTCAGCTGATAACCAAATCCGGAT
TTACTCATACGTTCAAGCATTTCGCTATTTACATAACGGTCAAGAATTTGCGTTGGCAAA
TTAGGAGCAATTTTAATTTGGTCTACTTGATGAAGACGATAATACTCGTATGGAATTCCT
TTTTCTTTAATAGGAATGAACGCTGGAGAACGTTCCAGACCTTCCATAATAGTACTTAGT
CCTGCAGGTTTAAGATGTTTTTCGTGAAAATCAAACATCTGATAAAAACCTTTCCATGTA
GTCGTACGACCAATCCAACGGTTGATATTCATGTTAATTTCAGAAACATCTTTCCAGTAG
GTTGATCGAACCTTCGCAATATCCATAGGAGGCTGAAAGTTATATACGGTCGGTGCTTCT
TCAATATCATCAAACAGAGAAACAGTTTCTGGATACCACTCTTTCATCAGAACTTTATTA
AAATCACCATTATCAGAATGGCTAAAAATAACATCAGCTCGACGAACAGTTTCTTCTAAT
CCCAAATTTCGACGCAAAGAAAGAGAAGAATGGTCATGTTGATAAACTACAACACGAACA
GAAGGTTTAATGTTATCAATAATTTTTTTATAGTTATTAATCGTGTCTTCTTCAACCGAA
GAAGCAGGAACTGAATTGATAATTAGAATATCACAATCATTTACCAGCTTAAGTGTTTTA
TCATATTCTTTTGCCAATAAAACCGGAATTGAAAATGATTTATAATCATGCGCGCAATTA
CGAGTAAATGATTTATCTTTAGCATAAACCAAAGTTACTTCATGACCATTTTTAATAAAC
CAATCACGTTGCTCGAGTGAGAATTTTGTTACACCACAACCTTCAAGACCTCGAGCCATA
AAAATACATACTTTCATTTAATATCCTCTTTGTTTTGGTTTATTTTACCAAAAATTTATA
AAGCAATATAGGAGCCGAAGCTCCTATCCACATAATACGCCATACAGAGGCTCATTAGAA
CTTTTAAATTTTATGCGCTTATATTTTATAGTTCCTTCTGCTTTAGCTTTATCATGAGAC
TCTTTAAAGAGTCTCATCATTTCCTCTTTAGAGGAACGAATTTTATTATAATCTATTTTT
ATAATCTATTTCAGAAGTCTGGGTGTTCATCTTTCATAACTGCCACCATTTTTTGACTTG
ATAAGAATCAACCCACACTTTCATATTAGGGTCTGCTCTTACAATAGGAGGATTAACTTC
TTTAATTGAACTATCATGGTATTCTTTTTCAGAAATTTTCACACAAAGATGACCATTCAA
AGATTCAGTAAATCCTGCATTAATTTTAAGACGCTTGAATTTTACGTGTGTAAGCATCAA
TCATATCCTCAATTTGCGATCTAGTAGTCTTCCAAAGAATACTGATGAGTTCATCGTTAT
ATGGCTGTTTTAGAATATCCCGACTTTTCTTGATAGCATATTCGTATTGAGCAAAATTAT
TGTTTTCAGCTGCGATCTGAGCGTGCTTATAAAGACGATTCAGTTCGCGTTTGTTTTTAG
ACAATAACTTATTTGCTTTTCTTTCTGCTTCAAGACGGTTCTTTTCTTCAATAGAAGAAA
TAAGCTTTTCCACTTCATCATTAATTTCGGGTTTATCAGTCATATTATTTCTCTAATATA
AAATAAAAATCATCATCTGTTAAATGATACCTGTAATTTAATTCTACACCATTAGATTTA
AAAGCGGTATCATACGGATTTTCTGGATCAATATCAATGTCAAGAGCTAAAACTTCCCTG
AGATACATTTTAAGTAAATAGGGAATAGCTTCAACTTCAGGTATTTCTTCCAAGAATCCG
GAGAGGTTAATCGTTAGCCTCATATAAAAAATCCAAACTAGGAGAATCGTCTACAACACT
TTTCTTTTCAGCCCCCGGTGTTCTATAGGTTGATTCTTCGTAATGCGTCATTTTATCGTA
GATGTCTTGAATAAAAGTTTCATCTACTAACGCAACCATATCGTCGTCACGACTGTCATA
GACATTGTGAACGAAGTAACTATATTTCTTTGCAACTTCCTTACGTTCTTTTTTAATACG
TTGGACGAATGCATTAAAACAAGCTTGAGTTATATATGCATGCGGGTTTTTATATTTCGT
TTCATCAAAATTGTGAAGCCCCTTAATAGAAGCTTCTATACCATCTGCAATCATTTCTTG
TTTCCAAGACTGGGTGTATCCTGAAAAGTTGAAACGTTTAGATAAGCCTTCTGCAATAAG
CATAATGGCTAATCCGATAGTATCATTTTGACGAACTACTTTATTTGGGTCTTTATTATT
TGCTAATTCTGTTTTCCAATCAATAATAGCTTGTAAAAGCTCTTTATTGTTTACGTAATT
ATATTTAGGCTTAGTTTCTGACATTTTCACCTCTTAGCTCAATTCATAGATCTATTATAT
CATAATATTTGAAGATCTATCTTAAAGCATAGAGAATATCAGTTATCTAAGTAAACAGTA
TGCTTGGAATACTTTCTCCATCATCTTTTTAAATTCATGAATATCTATATAATGACTAGT
TAGATCAGCATGATATAAAAAGTCTAAAAACTTTTCATGTGTACTAACATATTCACTTTC
ATTTAATTCAGAAACATGGCTTTCCCAATATCCAACACCAGTCTTATTTGGGAAAAATGA
AATTTTCATGTATTGGTCAACATAGAAAATGCCATAATTTTCAATAGTAATAGAAATATT
AATAAATTTCATACATTCATCAACTTAGCCGCTTCAAGAGCTGCATCTAGTGAATCAAAT
TGGTCAACATATTCAATCAATTCGCCGTAATTGGCATATAACCACCATTGGCTAAATTCA
TACTCAAGGATGAATCCATTTCCTTCAATTTGAGTTAAACCATTGCCGTTTGTATTTACT
TCATATCCGGCAAGACGCAAATCGTTAATAAGAGCTTCGTTCATAATTATACCTTAGTAA
TTTTCAGGTCTGCAAATTTTTTCTTGCGTTGATTTTTCATGCGACGAATAGTTTTATCGG
AAATTTCATGCTTTTGATAAGCTTTAGATTCTACACCAAAAGCTTTAACATCAAATTCTG
ACAAGATATATTGAACCAACAATTCACGGACAGTATTGCGTCCAATCTTCTGATCATTCT
GTTTCATCGTCTGATGAAGCTCTTTTTCCCATTTATCCAAAATTTGAGGAGTTACAATAT
CGCCTTTTTCTAGCAAAGAAACTACTTTATCATATGCGTAAGAATTGATGGCGTTTTTAA
TTTGAATAGTCATACATTATCCTCAATTGCATTAAAATTTTATTATCCAAAAAGGGCCGA
AGCCCTTAGCTAAACTTTTTGGCACCCTTCCAGCCTTCATACATCATTGCGGCTGATATT
AATATTGCTCCTGAGCAACTTGAATATTTGTGATTCCAAAACCAGTTTAGAAAAACTTCG
TCATCAATACCTTGTGCTATCATATTTTCAAAGAACTGACGACGAGCTTCGGCAATTCGC
TGCGATAATTTAGATTCAGGATTCATTTAAATTTTCCAATTACCGTTTTCATCAATAAAT
TTAATCCAGTCATTTACTGACCACTTAGTTGTATCGCCTTTTGGAGTAACATTTAAAGTA
TATAGCCCTTGCTTAAAAAGCATTCGTTTGATATTCATATTTTCCTCAGCTGTAACGATA
ACACTCGTTTGATTTACGTTTAGCAACTCGTTGAGAAGTATTATAATCAAAATCATCGTC
AATGTAAACTGATTTTTTCAACTTTCTTACTTCACCACGTAATTGGCGATTTAGCTCATC
TTTAACTTCTGAATCAATACCTTTCATTCTACGCCATTTATCTGAGCGAAAAATGTTTTC
AACCATATCTTTATGACTTACCCCATCAGGAGCTTTACGCTTTCCGAAATAGTCATAATC
ACGAACTTTCAAGTCTTTACGACGATACGTTTTACCCATGGAGTTTAATTTCCTTAGCAA
CTGAACTAAATACAGCACGATCACAAATCATGTGTTTATGTAACTTGAGTATAATATAGC
AAACTTCAAAACTATTTACATGAGTAACACGAACAGCATTACCATTAATGAGATAATACT
GTCCCTTTTTAATTTCTTTATCAACCACAACCATATCAATTCCTCAAAGGTAATTCATGT
GTTAATAATACCACAGTTTGAGCTCGTTGTAAACAACTTTGTGAAAAATATTTCAGGGAA
TGATAAGAAAGGAACGATAGCTTAGAATGGTAATATACAGAATGTAAGAAAGATGGGCCC
AGAGGGCCCATCTTAGTCTTCTATGATATCTCTATCATATCCAAGTGAAATGAGAGTTTC
TTTGAAGTGTTTAATGTTCTTTTGTCTGGAATCATTAATGAAAATGACTGGATAACGAAT
GTTAAGAGATGTGAATCCAGCGCGTTTAGCAAGAGATACAATCAGTTGACGATCATACTC
AATCTTACCATTATTAGTAAGAACTTTATAAAAAGTAAAAGAAGCATTGAGCTCCTTTAG
AAGTTTTGTAACTGATTGACATCCAGGACAACGACCTACTTCATCTGGAATTCCATAGAC
TTCAATCTTATTCTTTAAGTTCGAGTTTTGTTCCACGAGAAATAATTCCTTGGTAAGCCC
AATAAGGAGGATTAACAGAATCCTCACCAGAGTTTTCTTCAGGAAAATAAACCTGGATAA
CAAATCCAGATGCATCAAAGGTAAAATAAACCGTAGGCAGTTCACCTAACAATTCGGCAC
GAGCATTAATTTCTTCGAGATCTCGTTCACGTCCAGCCCAAAAACTAGGATTTAGACTAC
ATTCGTAAAAATAATAGTCATTACCGAACATATCAAAACCATTCCAACTCTCTACTACAT
ACCGCTCAAAACTAATCATAATTAATCCTTTTTATCAAGAACCGCATTCAGCTTGTTAGT
AATTTTATCCAGACGCTCATTGAACTCACTAGAAGATAAGCCCTTTTCTGGAGAAATTAA
ACTAATCACGAAAAATATAGCAATAAAAGGAATAAGGAAAATAGCTCCAACTGCCATAAA
CAGAAAGAATGTTACAGTTGTAAGAAAATCAGCTAAACCTTTACGAAATTTATACATATT
TTACCCTTAATTGATTAACCAAGCATTGATAAGCACTAAACTATATTGCGAATAAAATTC
TGGACCAAAATGAAAAATCATATCATTTATAGTGTCCATAATATAATTCAATTTAATCAT
GTTTCCACACCCCATCGGTATTTGACCAAAGTCGCTGATTATCTGATCCTCGCCACAGCT
TTTTAGTCGGAAGATTTTTCTCATACTTCCCATCAATAATAACATCAACATATTTAAGCA
TTTCTAGTTGTTTAATATCTTCAAACTTATATCCTGTCCACAACCAAATGCTTTTATTGG
GATAAAGATTTTTTACTGTTTGAACCACAGAGTGAATCACGTCTCTGTTATCAGGATAAA
GAGGGTCACCTCCGGTTATAGTCAATCCTTCTATATAATCATTATTCAAACATTCAATTA
ATTGTTCTAGTGTTTCACCAGTGAATGGAACACCATTTCTAGCATTCCATGTTGATTTAT
TATAACACCCTTCGCATTTATGCAAACAACCTGTAACGAAAAGAACGACCCTGCATCCAG
GGCCATTAACAAAGCAGCACGGGTATATTCTGTCATAATTCATAATAATATCCAATTTTT
CCAAGCTTCATCAGTAGAATTACAGCGTTTTAGTATAAGATGTCTAGAAACTTTTATGGC
ATTTGAGCACTTTTTAATTGAATCATATTTAATACCGTCAACTGAAACGGTTTTGCTAGT
TGGAGAAATTTTTCCATACATTGGATTTTTTGAACCAACTTGAAGTCCTTTTAAAGCTTT
TGAAAGCTTTTGTCTAGATTCCAATGACATGGGAGAATTCTTTTTACCTTCAATAATTCG
CTTGCGATGAAGTTCGCGTTCTTCTTCACTCAAAGAATTGTAATATTTTTTAACACCGTT
TGATATAGATAATTTATCTTTCTCAGACCGCTCTCCAGCTAATTTACTTCTAACATCTTT
TCGCTTCATAGCTATGCTTACGGCTTTATTTAAATTTGCTTGATGCTCTGGCGTACGTTT
ATATTTCTTTAAAGCACGTGAAATAGCTATTTTAGTTTCTTCTGTTCTCTTTTTACCTTT
ATTTGCTAAACTATTTTTGTGGCGATGTTCAAGTGTCTGTTCATAGGCAGTTCCACCTTT
TCCACCAGGTTTAATATTATATGTATTTTCTTTTAGACAATACTCTTCAGTTACAAGTTC
AGCTTCTTTATCATACATTTGCTTTTCATTATCAAAAACATATAAAATTTCTTTATAAAA
ATTTTTTCTACCATATTTTAATAAAGCAGCACGAATCAATGTTCCTGATCCCATATAACC
GTCATTTATGTTATCGGTGCTATGCGCACCGATATATTCCTTTGAATTAATTATATTTGT
TATTTTATAAATTATATAATACCTATGCATGTTTTACTCGTTTTACCATTTCTTTCATTT
TACCTAAATTCCATGGAACAACGCTAGGAGTTCCAAGATATCCGCATGTTCTTCTTATGG
TGTTCATCTTTTTAGGATCAGTTTCTCCACAAATAGAACAAACAAATCCGTTTTCAGTAG
GAGTCATTTCATGGGTACTTCCACATGTAAAACATTTATCTACTGGCATATTAACACCAA
AATAATCTAAATGTTGTGCAGCATAATCCCATACGGCCTCAAGACCCTTTAAGTTATTTT
TCATATCAGGAAGTTCAACATAAGAAATGTGACCACCTGTCGCAATGAAATGATATGGCG
CTTCACGAGAAATCTTTTCAAACGGAGTAATATTTTCTTCTACTGAAACGTGGAAACTGT
TAGTGTACCAGCCTTTATCAGTAACATCTTTTACGCTTCCATATTTTTCTGTATCGAGTT
TACAGAAGCGATAGCAAAGGTTTTCAGCAGGAGTCGAATATAAACTAAAAGCAAATCCGG
TTCTTTCAGTCCACTGTTTAAGATGAGCATTCATCTTAGTTAAAATTTCTCGTCCAATAT
CACGACCGACAAGAATATTCAATTCGTGAATACCAATGTATCCTAAAGACACTGAACTTC
TACCGTTTTTAAATAACTCAATTATGTCGTCATCAGGTTTAAGACGGACCCCGAATGCAC
CTTCTTGGTAAAGAATAGGAGCAACAGTCGCTTTAACTCCTTTTAAGGAACTAATTCTAC
ACATCAATGCTTCAAAACACAGATCCATTCGTTCATTAAATAGCTCAACAAATTTCTGTT
CATTGAATTGTGTTCCAATATAAGAATCTAACGCGATACGAGGAAGATTCAGTGTTACAA
CACCGAGATTATTACGTCCATCAAGAATTTCATTGCCAGTCGAATCTTTCCACACACTCA
AGAAACTACGACAACCCATTGGAGAAACAGGAATAGATGAGCCGGTGATAGCTTTATTGT
TCTTAGCTGAAATAATATCAGGATACATTCTTTTGCTTGCGCACTCTAGAGCAAGCTGTT
TAATATCATAGTTCGGATCGTCTTTATAAAGATTAACACCTTCTTCAACAAACATAACAA
GCTTAGGGAAAATAGGAGTTATTCCATCACGACCAAGACCTTTAATACGATTTTTCAGAA
TTGCTTTCTGAATCATTCGTTCAGTCCAGTCAGTTCCCGTACCAAATGTAATTGTTACAA
AAGGCGTTTGTCCGTTTGAACTAAAGAGAGTATTTACTTCATATTCATAAGCTTGGAATG
CATCGTATACATCTTTTTCTGTTTTAGATTGAGCATAATTCAATGCATCAGCGATTTGCC
ATTTTTCTGCATCCTCAGTATGTTTTGCATAGGTGCGTTTAACATAAGGAGAAAGTACTT
TATCTACATTAGCAAAAGTCGTTCCGCCGTATTGGTGGGAAGCAACCTGTGCAGTAATTT
GTGCCATAATTGCAGTAGCAACGCCAATTGATTTAGGAGTTTCAATCTGCGCATTACCTA
GCTTAAATCCGTTCTCAAGCATTCCTTTTAAATCTACTAAACAACAATTAGTAAATGGAA
GAGCAGGGGAATAATCAATATCGTGGAAATGGATAATTCCGCTTTCATGCGCTTTCATAA
TAAAAGACGGGACCATATTTTTGGCAATGTGTTTAGACACAATACCAGCCATAAGGTCCC
GTTGAGTTGGAAAAACACGAGAATCTTTATTAGCATTCTCGTTTAAAAGGTCTTTATTAG
TTTTATGAATTAATCCTTCAATTTCTTTTTCAATTGTCATTTTAAACTCTTTCTAAGCTG
CTTCTTAAATGAAGCTATTAATTGTGTTTTGGTGTCAGATTCATTATATTCAAATCCTCT
TTGAAGCATCTCGGCCATCATTTCCTCTTTTCCTAAACGAGAAAATTCCTTTGATTTATC
TCCAACAAAGTTAGGGTGAATATTATTTTGGGTGTAATCGGATTTTAAATAAGTAAGTAA
ATTTTCTAACCATTCAAGATAATCAACACCTTGTCCCTTTAAGCCAGAACGATTAAATTT
ATGCTTCATTTGACCTTCTGCGGCATTACAGAGATTACAAAGCAATCCACGTACCTTTCC
TGCTTTTGGTCCATTTAATTCATGGTCATGGTCAAGATGATTAGCTTGAACATCAGGATT
TAGTTCTCGTTGGCAAATTAAGCATTTACCGTTTTGTGCATCATAAAATTTCTGTTTTTC
TTCTTTATATAATTTGCCAGTCAATAACATAATAAACCCTTACCTTAAATAGATAAGGGT
ATTTATTATTTTCAAGTATTGTAAAACATTTGATGCAATCGCTTATATTGCTGAATCATT
CGGTCAGAAAAAGAAATTTGAGTTTCAAGCCATTCAATGTATTCTGCGGCAGCTTGCATC
AGGTTACCTTCATAGCCATCGTTATTTTCTTGTGCAGCTAATTTAGCTAATGCGTATGAA
ATACGTTCACCTTGAAAATCGGCTTTAGGCTTCTGAACAACTTGATTAGTTCGCTCTACA
ACTTCTTCAATTTCGCCATTTTCGACTGATTCAGTATTCCACAAACACCAATACGTAATT
GGCTTATCGTAGATGTTAATAATCTTTCCATCAGAAAGTTCAATTTCAATAATTCCAGTA
TCAGGTTCTATATCATCTTCACATTCTTTTGCAAGTTCACGAACTTTAAAGACAGTACCT
GCACTAAGTTCCGGCCAGTAATTACACAGCCCTGTATCAGCACGATTAATTCTAAACCAC
TTATCTACTGTAATCATGTCCCATCTCCATATCAATTAAGTCATTTATCGTTGGTTCATT
ATACACCGTTTCTTCATCAGTGTAAACCGGTTCTTCCGGCTCTGGCTCTACAGTTTCCCA
TCTAGCCGCCCACCAAGGTTTTATAGCGTAATCCATTCTCTTACTGTCTGAGTTACTACA
CGTTCTCGAAGCTCAACCAGTTCAACGGTAGGAACTGCATAATACCAATCAGAATGATAA
GAACCTGACCGAGATTCATTTACCGCTACATGTACATTATGTTTTGGACTAAAGTAAACA
CACTGACGATATTGACATTTACCATCTTGCACCCAGTCTTCTATTTCGACAGGTTTAAGA
TAATCGGAAAAATCGAAATCATAGTTTTCCGAAAATGCATCATGGTCTTCAATAATTTCG
CTCAGAACTGCATCAACATCTAATTTATTTTCAATAGTCATTTTTCACCAATTAATTTCG
CAATTTATTAAGTTCTTCATAATCAATCCAGGATTCTAATCCTGATGGCAAATCAGATTC
AATTTCCCAAAGAAGTTCTTCAATTTTATGAAGACGATCTAGTTCTTCAGCAGGAATAGT
AACCATTGACGGAGCTCTTGCTACATTAATATCGTAAATCATATTTACCCCAGTTTGACC
ATACAATCGCCGTATTTCCACTTAGAAATAGACTTTTCACCGTTAGAATAATAAACTTCA
AGTTTAGCACGATTATTTTTAATTTGAATAACCTTTGCTGTCATCAAAGTTCCATACCCA
TAATAAACTGCAACTTCATCACCTACATATACCGCGCTTCCGCGGTAATCGTGAATATAG
TCAGTTCCTTCGAGCATCATTTAAAATATTCTCGCAGTTGGTCAAATCCACCAATATGAC
TTCCATCAGGAGCAAATACTTGTGGCATTGTCAAACCAATTTGAGTATCACGGCCTAGTT
TAGTCAGAAGCTCAGCGATTTTTTCATCATCAAAAACACCTTTTTCCGGCATAATGTTGA
TAAATTCAAACGGCTGTTTCTTCACAGTCAAAAGACGTTTTGCATTATCGCAATACACAC
ATTTATGGATGTTGCTATCATAACCATATACTTTAAACATATTATTCCTTAATTCCTAGT
ACTTGTTTAAAAGTCTCGTCGTAATCAAGACTTTGGCCCGTTTGTTCTTTATGTTTGTAT
ATAATATCACTTACTTCTGATAGCATATTTTTATATGAACGAGTTAAAGCAGATTTAAGC
ACGCTGTATCTATCAGGAAATTTACCATGTTCATTATAATAAGCTATTGCTAATTCACGG
ACTGCCTTTTCAGCAGTCTCCATATATTCTTTACGCTTGGTCATTTTTAATCCAAAATAT
TATTAGGCATTGGTTGAACACTCACAAGTTCTTTAAAGAACTCAGTAGAGTCAGGCAATT
TAACCATTTCCGGAGCATGCTTACTGAATTTATGTTTACATTGACGGCATTTATATTCAA
GCTCTGGTTTACGCCAGTTAATCAATTGAACTTGTTCAGTACCGCATTCAGGGCAATTAG
GAACGTTTTTAGAAGCTCTTTCACGTCGTTCAACCATAGCCATAATAGCATCCCATGCTG
GAGGTTTAAAATCTAAATCGTCGCAGCCGTGAATCTTTCCACGCATTTCCAAATCGTCTT
CTTCACCAGCCATAATAATTTTAATTAGACTAGAATTACTTGAAGCTGCAATGTCTTCTA
ATAAACGCTTTTTCATTTCAATACCTCAATAGCATTACGTAAACCATTTGCTTTTGCATT
AAGAGCTTTTAACAATTTGGTGTGTTCTGCAATTTGGGCTTCAACTTCAATCAAACGGGC
ATTGAGATATTCACGTTCTTCACTCAAATTATCAACCTTTTCTACTTTAGGCTCTTTTAC
AACTGTCTTATATGTATTAGGGTTCTTCAGTTTAATTAGAATGCGTGAACTGTATAACAT
TGAACCATTATCTTCGGTTTCGTCATACATTTCCACTACGTCCATAATTTTTAACATCAT
GCGGAGTTTATAAGACAACGAACGAATAGTTTTGTTGTGCTTATTAATTTCTTTAGCTGT
CATGGTGCCAAGATTACGCGAGTAATAATAAGGAACCTGGATATTAATTAATACTGATGA
ACCACCTGGCTTGTGTGTTACTTCATCAGCAATAACCCAGTCCTTAACATGAACTGTATT
TGTACGGTCATCGCCCGCGGTAAATAGTTTGCGAGCATGCTTAAAAAGCATATTCACTTG
GTCATTGAATTGACAAGCAAATTTATCAGCAAATTTAGTTTCAGGAATGGTAGAAAACCA
ATCAGCCAAATGAGTCTTTTTAACATCATTAACAATAGTAAATTCAACAAAATCGGTTAT
AGATGTCTCAGATTTAATGAAGCTCGGCTTCATAAAGTTTTTAATGTTCTCATGAGCTAC
AGTAGAAGATAACATACGAGAACGTTTAAACCATTCAAGCAAATTGCCTAACGAATGAGA
ATAAGCGTTTTGAGTATCTTTACAGATATGATTTTCCTGACCAACATATTGAAGGAAATC
ACGAAGAATATTATTGATTACTGCTCTGTGCCCGATCTGATAATTACGGTGTTTAGTAAT
AAGACTGTCAAAATAATCAATATAATGTTTACGAGTTTTCATGTTCTTCTCACTTGGTTA
ATGATTTATACTCCGAGCCATCCTTGGCTTTAAATTTTACTTAATTAACTGTAAAGCCTG
TTCTAAACGATCAAGACGATTAACAGATTCTTCCCAAATCCTTTTAGCCTGCTCATATTC
TTTCTGCGCTTTATTAGAAATTTCTAGAACTTCTTTATAAGCTTTTTCTAATGCAATAAC
TTCTGGACGAATTTCTACCGGTTCAGGTGAATCATCAAGATTATTCATTAGTTCCTCAAG
GGTAGTTTCTTCTTTAGGAGTATTCACAATTTCCTCACATTTTTGTTGATAAATTTCTTT
ATCAGTAGGTGAATAAGCACATTTCACTTCACGAAGACTAATTACAATTTTATATCCTTC
CCATCCGCATATATTCTTAAAAGGATATGTATGAATATTTTCTACTGTTTCCATACAAAG
TAATGCAGTCTCTAACTGACGAGTTATAGTGCTAGCAATTGAGAAAAATTTATTAATATT
CTTTTGGTTAGCGTTTGGTGTAAAAAATCCATAATTCACAAAAATAGCTACTTTATTTTC
ATCAAGCTCATATTCTTTTACGATAATCATATCAGAAGCCAAAGGATGAATTTGACGATA
ATCGCCATAACATAATTTAGAAGCTGATTTTAGAATTTGTCCTTTGAAAAGTCTGAAATT
ACTAATCCAACGGCGAGTAAAAATATTCTCAGGGTCTTCTTTATTAAGATGATAAGAATT
AACATCACCGAACCAATTATATCCTACTACATCTTTGGTTCGTTTAATTTCTTTCCCAAA
ATTACCAAGAATATCCCGATTAACCAAATATGAAAGAAGACGAGACTCTTTAAAGGTTTT
CTTGATAACATCTTTATCTACACGGCTAGAAATTTTACGAATTTCATGAATAAATTTAGC
AGAAGAAACAATACTTGCATCAACACTATTGAGCCACTGATTGATAATAGAAAGAACGCT
ATTTTGGCCAAACATCGGTATAGCTTTATCATCAATAACTCTATTGAATGATTTAATATA
TTCGTTGCGAGTCATATTAATCTCCTCAGTAGAAAGTAAGAACATTATACCACATCCTTG
TGGCGAAGTAAACTAGTTTAGTGCATTTAGTGCGTTGTTCAATTTAGAACGTTGCTTCGT
GAGATTTTTTACTTTTTCTTGAGCTTTTTCTAGCATCTTTTCAGCTTCTAACGCTTCATT
AGTTGCTTTAACGAGTTCATCATCTACTGCCTTGATAGACTTCTCAATCGCATCCGCGTG
CCATTTTTCAACAGGTTTAAGACTAGGATTTTCAACAGGAAGAAAATTCACTTTATTAAA
TTTCCATGCATCTTTATTACCTGAACTATACATCCAAAATTTAGGATCGTTTGATGAGCA
ATTAGATAAATTTAAGTTATCTTGTACTTCCTGCTTTTTCTCTTGCGTGACTTCGTCTTT
TCTCAAAAAATCATATTTAAATGAAACGATCATATCAAGTTCATATGTTGTTGTATGTTC
CCAATTTCGCTCAAAACGAGGTAAAATCTTAGATTGAACAGCAGCAACAACATCCATATA
CTTAAATGCTTCTGTCAGCTGTGATTTAAGACATTCACAAATTGAACGAGAATTTTTAGT
ATTAGGTTTAAAGCTAATTCGTGCAGTTCTATTATTTTCTTTAGATGGTCTTACTTCCAT
TTGAAGAGTATAACCATCAAATTTCAGATTCTTTAAGTTAATATCAGAACCTTTTAATCG
ACTAGCAGTAGACAAAATTTGCTTTAATTGTTTACGGAATAGAGCAATAAATCTCCATTC
AAGACGATAATGATTTGGATTAAAAAATCCTGTTGATAAATCAACCTTACTCTGACCAAC
GCCTTGAACAAATAGAGGATTTTTATAATCAATAGTTTTACAGAAATCGGTGAGCTGCTC
ACGAGCAGTCATTTGTGTAATATATCCCGCTTTACTAAAATGACGTAACCATTCACTGCT
ATTCATATACTTAAAGTGAATGGAACTATTAACTCTATCAGGGTCTAAATTATTTTGGCA
CAAAAATGTCATAACATTACGGGTATAGCTGGCATTACGAACCATATCTTCAATTTGAGA
ACGAGTTTTCATGGTGTTCCTTAAGATTTAAGTAAATCAATAATTTTAATTAATTTTTCA
CGCTCAGATTTAGCTTTACTACTCAATCCAGATAGTCTAAAGATTTCATCGTCATATTGT
TGAATAGAAATATTTAGCTCTTCTATTTGTTTACTGAAATAATCAATCTGCTCGGAATGT
TTTTCGTTACTACGAACTGGAACGGGGTTTATAGGCAATTTAGTTAAACTGGATTCATCC
GGGCGATAAATTAAAATACAACTTGAACCAATCGGGCATTTAGCACCAGACACATATTCT
AATGTTCCGGCTTCTTTTAAAACTTCAAAAGCTAAACAGAGATGATGCCCCATATTAACA
TAATCTGTAGAGCGAGCTCTGACGTAATAATCATCGCCGCGAATACTAAATTTAAAGCAT
TTAAGGTCTTCTGTATTATTGGTCTTAAAAATCATTTGTTTATCTAGACCTTTAGCTAAT
CGAGCGCCTAATGCTAATAATCGTCGTTGATTTTCCCACAAATCTGCGATCATTTGGTCA
AATGATAATTTCGGCATTAGTCGACCGTAAAGATCATAGCCTTTATTATAATTGCGAAGA
ATTTCACTTGCATTAATACGAGACAATGCTCCAATTTTATTAAGGGCTTTCATGATGCGA
TTAGATAAACCCATTCCAGACCCGTTTGTTCGCTTCAAATGTTTTTCTAATCCAAATCCA
ATATCAACTTTAAACTTATCTAAAATTTCTGCATGAACATCTCTGTCAATAACATTCAAA
TCCAAAGTTGGGTTAAATCTATGAAAAAATTTATCTGGCTCTCCACGACGAAGTACAGTC
CATTCATTCAATTTTTTATTAACTAAAGATTTAATTACTGCATTGACATTATTAATTACT
ACTGACATATTTTCCTCACTCAATTTCAATTTTACTAAATACGCAGAATATGATGGAAAA
GACTATATAAGCACCGCATACAGATTGAACTAATACCATTCCAAAGAACCAAACAATATT
ATCAAACAATGTCTGTTTTACGTCGAAAGGACGTAAACTTACAGTAATATTATCGCCTTT
TTCTATTGATGAATACATCTCTGGTGAAATATATTCGCTAAATCTATAACCGTCTTTGAG
TTCATATACAGCAATAAACGATAAACTAGACCCCTTTCCTTGAGTTCCTGTAAGGGTATT
AACTACAGTAACATCATAATCTTTATAATGCATATAATCATTAATTGCGTAATAACCATA
TGCAACTACTACACATAAACAACATATCAATAAATTCAATCTTTTAATTATCAACTGTTT
CATAATAATCTCAATTAAAAGGGCTTAGAACCATTATACCATCCTTGGTATAAAGCGGTT
ATGCGAGTACCGTCTTTAACCGTTCTTCAAACTTCCGAAGAGTATTCTGGCGTTCAGCTC
TTTGCTTTTTGTAAGTTTCAATACGCTCTGAAATGAGAGTGTATCGTTCATTTACTGATT
CTTTCATAAAATCAGGAATTTCACGAGAAGCTTTAATCTCGTCAAATTTATCAATAACAG
CTTGCTCTTCAGCAATTAAGTTATCATACATCAAAATATCTTTCTTGATGAACTCAATAT
CTTCTTGAGTTACACGAGATAATTTAGATGCTTTATCCTTTTTGTACTGTTCGTTAGTAT
CACGAGACCAGTGTAATGTACAATTTTTATTCGTATTTTTGTAAATTTCTACAATACCAA
TCTCATCGATAATAACGATCCAATTCCAACGAGATTTGTAAATTTGTCCTCCATCAACCG
TGATTTCACCTCCGATTGAGATGTCATTAAAGAACTTGCTTTGTGCTTCTGATTTAAATT
TACCATCATTGTAATTTACCAGGTTGAAAATATCTTTAGCGTTCATTTTCTGTTCCTCCG
TAGTTGATAGTTGTATAGTACCACAGAGGAACGGTCTTGTAAACAACTAAAAGAAACTTC
TTTCACAATTTTTTCCACTGAACCACGCGCTCACTGCTTTCTTAGTCTCAGGAGCAGTGT
TATCCATAAACCATTCAAAGGCAGCCTTTTTATGATTCTGGAGGGCTTCTCGGGCTTTAA
TCTGCTCACGGTCTATTAACACTAACATATGAGCCTTTCTTGTCACCATGGGCTTCTTAT
GATTTTTTGAATACTCCCAGTCATTTGTCCATCGCATTGTCGTTGCGAATTGAAATACAG
CTTCTTTAATTTTAGTTTCGTAAATTTCACGAGCCTTTGAGTATAACATCATTACCTCCA
TTTACCAGTTTAATTCTAGTCATCTTTTTGATGGCAGTCCATATAATCTATTTCTGAACT
GCCTTTTTATCTTAGAAGTCCTCTTATGAATTATTTCAGAAGAGTAACCTCAGCAATTTC
TTCCCAACCGTTTTTGTCTGTCATAATAAAGTCAGCAAGATAAAGAGCAGTACGCAGTGA
AACATTGCGTAAACGATTAACATTGACTTTCATCCATGATAATGCTTTATAAGTTTCTTC
ATCAGAAAGACCGCGCTTTTGCATCATGTCAGTTGAAAGAATAACATCTTCAACCCTGAC
CATAATTTCTTCATTAGTGTGAACACCCAAATCCAAATAAACTGAGCGGGACACTAATGC
TTGTAAATGTGGAGCAAGTTTAGTACCACGGTCTAATTCGCGGTCAATGTCAACGTTTGT
GATAAAAACAATCGTTCCTTTAAATTCAAACTCACGCTCAATGCCTTTTTCTTCTAAGTA
AGAAGATGCGGTGCTCCAGCAGACTTTACGGGTCTCTCCAGTGTCCAGAGCAGCTTTCAG
AAGATTAAGAATGTCCATATCAGAGAAAACATCCACATCATCAATCAAAAGGACAGAATT
CTCTTCACGATTATTCCAAAGCTGCTCATAAAGACCAATACCGGAGATTTTACCATTAAT
GCTTTTATATTCAATGTATCCAATATCATTTGCTTTATTTAAAGCTTTATCTAAAGAATA
CGTTTTACCAATACCTGCTGCTCCTGAGATAATTAATGAACGAATATTTCCATTAATAAT
ACCATTCGTCATCATTCCCATAACATTAAATCTTTTATTAATGCGGGTTTTCATATCTTC
ATACGATTCTTTAACTTCTTCAACTTTTACACCATCATATGAAATATCTGATTTGTAAAC
CCAAACACCGCGACGTTTACCGTCAATTTCAACAAAAACTTTACCATCTCCTTGCGCATC
TACCGGAGCATTATCTGGGAACCATTCGCCTAAGAGCTCAAAAGTTCCAGAGATTTCTTT
ACCGAAGTAGATACCCTTATTGATAGTTACAGTTTTCATTTTATTCTCCAAATCCGTATC
AGTTGATAGTTGTATAGTACCATAAAGCTTTATGCTTGTAAACAGTTTTGTGAAAAATTT
TTGAAATAAAAAAGGGAGCCCGAAGGCTCCCTATCATTTATAATAACTTCGGTGGTTTTC
AAGATAGACCTTCTCAAGGAAGTCATCCCAGAAACTCATGTCTACTGTTTTAGGCATACC
ATTCTTAGAAGCTTCAGTAGATGCTGCTTCTACTTGATCGACCACATCTTCCAAAAACTC
TTGAACTGTTTTAAATGGATGTTTACCCAACTTCACGTCGAGAATAAATGGAGCATCTTG
GAGTGGATAAATCAAGTCGCCAGTTTTGTAAATTTCCAATAGTTGAAGTCCACCACGACA
AGCATGACTTAGTGCTTTCCAATCAATACCTTCATTAGCTTCGGCCTTACGAGCACGTTC
ACCATATTCAGCATCTAATTTGTTCAGTGACTGCTTAAGCTCAATAAGAGAAAGCGTTGT
CTGATATTTACGACCCAGCACTGTATAGAACGTTTGTGGACCTGTTTTCTCATGATTATG
GAACACCCATTCACAGAATTCGTTTTCCGGAAGACGATGCTTAATATCTTCAACTTTAGT
ACGACGCTGCTTAATGGAACCGTCTTCTTGGTAATCAACCCATTGCTCAGGGATTTGATT
AACTACTTTCAATACATCACGTAATGCAGCCAAACGAGAACCCTTGACGCCGTATTTAGA
AGCTTGCTTGCGGACATATCCTAAATAGGATTTCATGTTAGTCGTATAAAAACGAGAACG
GTTGTCTTGAATAAACTTCCACACATCAGGCAAATCAGATTTAACCACTAGTTCAGGTGG
AGTGTGAAGCATATCCAATGCTACAGTTTCACCATCTGCTGCTAATTTAAAGAAATATTT
AAGACTGTATAGTTCATGGTCAATATCATCTTTAGTGTTTTTAGATGATGTGTTGTTAGT
GTTTTTACTCATGTGCTCTTTGACATTTCCGACAAGAATATCGCGAGCAGGAGGAACAAA
GATTTCTTTAAAATCTACATCAGATTCTGGGGTAGAAGTTCCATAAAGATGACTACCAAA
ATAGCTTTTCATTACTGTTTTCATCATTCAGCCTTATATTCAATAACAGGACATACTTTA
GCTTTACGAGCTTTTAAAAATTCAACGATAATCGATTTCTTGGGTTGAATAGGAGGTAAA
CCTTTATTTTTCCTATCAATGTTTTCTACGTGTAAAGCATAATCCTTTTTCCATTTATAA
TCTTTATATTTTTCACGCAAATGTACAGGAATAACAAATGAACCAATAATAAGTAAAACA
ACCAAAAGCGCAAGTATAAATGCTGATGGAAGCAAAGTCCATAAACTACCAAAAATAAGC
CAACGCTGTAAACTTTCTGCACAAATAATTGTTAGCCCTACGAGTATAGCACACCCAAAA
ATAGAAACGAAAAATGTAGGGATAACAATAGACCAAAAATATGCGCATAGTGTCTTAGGT
CGTTGCCATTCATCGTTAAACAATTTGAATAATTTATAGTGCCAAGAGTTTTCATTAATA
ATCATAACTATCCTTTCATTGAAGGCGTAACAGTTGTTAAATACTTAATCATAGCTTCAG
CTTCTGATTTTGATAGTGAAATTTCTTCACCGTTTTGGCGAATAGAAACAAAATCTGGAT
GACGATCACCACCAGCTTTTAAAACACATATAAGTATCAGCTTCGCCTTCAATATTTGAA
ATGATTGAAGCAGTTCCACATGAATGCGGTTTTTGATAAATCAATACAGCTTTTCTTCCA
CCATTTGACTGTTCATAGGCTTTTAATACATCAAGCAAATCAGTTCTTTTATCAATAGCT
AAGATGTTATTTTCATCTTCAATATTAAATCCTTCGGATACTTCATAAAGAGTTACCCAT
AAATCACCGATGTCAATAACAGCATTTACTTTTCCACGGCTTTCAAGAGTATGACAAATT
TTCTTGATTTCGTCATAACTCATTTTAATAATATCATCTCCTTGACTAAGGAAGATGTCA
TTTTTAAATTCAACACGAATTAAACCACTTCCACTTGAAATAAACATATTTCCTCACTTT
GAAATCATAATTGGAATGACAGAATCAAGATAAGTCTTTAGCGCAATAGCTTCGTCTTTG
GTAAATGTGACAATATGTGCTCGAAAATCGTCAATTTGACGAATAGATACTACATCTCCC
TCTTCATAGCATTTTGACACATTTAAAATAGTTTCATCATTCTGATTGCAAGCGTTAGTA
ATAATAGCATTGCAATTTTTAAACCATTTTAAACTGTGTTTTCTTTCATTAGAATAATAA
AAATATTTAATCTTATCTATAAAACTATCCCAATGGATAACTGATAAGCATATTGACTCG
CTTTCAATATTAAATCCTGGGCATGAAGAATAAAAATGAATTTTATGCTCATCATTAATG
CTTACAATTTTATCAGTATAAGGATTTTCAATTTGGGTTAAATGAATGATTTCACTAGGC
GTAAAATATAGCATATCGTCTTCTTGTGTCAAACGATACATATTATTTACTTTTTCTATA
GCCAATTCACCAAAAAGTGAACTAACTTCTAATACTAATCGTTTCATATTAATCCTTTTT
ATTGGCACGAATTTGTTCTAAAATTTTAGAGTATTCCTTTGTATCAGATTTACGTACAAT
CGATACACTATACGGCATACTATCGGTGTCTTTTATAAAGCGTTCCAAATGACACTCTAA
TAAAATTTCTGGATTATAAATCGTGTACATCAAATTACCTGTTGCTCCACGATATTGACA
GATTTCTACTGATTGAACACCATTCCATAATTTTGTTAAGACCAAATCACCTACTTCTAA
TTTAGGAAAGCCCATGTTATTCACCAATTAAAGTTTCAATATAAGAATCAAGATTTACTT
TAGCTTCTTCCATAAGAGTTTTGTATTTAATCTTGTTAGCATGTCCGGAGAAAGCTGATT
CATCAATAACTGTTGATGTATGAACAGCTCTACTATACGTCTCAATTAATTCTCTTAATT
TAAAAGCCTGCTCACTTGTCATTACATACTCCTTTGAATCATATCAATAATATTGTTCAC
CAGATTATAGGTAAACATTGGGTAATTATATTGAATCATCACATATATAACAAACAAAAC
TTTCATTCTCTTCTCCTTGACAGTTGACAAGATTACTATACCATAACCTTGCCAACTTGT
AAACCGTTAAATGTTGTTTTCAATAAAATTCTGAAGCTTTGTGTGAGCATCAACCATGAT
TTTCATTTCTTCCTTTGCGAAAGCTGTACCTCTTTCCCGAGCAGAATACTCATAGTCAGA
AACTGCATTAGCATATTCTTCAATTAGCTTCATTAAAAACATCTGCTTTTCAGTTTTCAT
TATTCCACCTAATCATTTCAAGATATTGAACTAACTTAGCTTTAGATTTATCCAAATCCT
TTTTAGCTGCTTCTATACCGTCGTATGAATATCCTTCACAATGCTCAACTGCTAATTGAT
ATGAATCTATTTCAATATCACGTGCTAATTTAATGATTTTTTCAAACTGTTCGCGTGTTA
GCATAATTAAACTCTCGTATTATGATCGATAATTTCATCAAGAAACATATCTAACGCTTC
TAAAGCATTATCAACTTTAGTTTCAAAGTCTTTAATGCCTTTATTCGAAATACCCGATGA
ATACCAAGCAAAGTCAATCAGCTCTTCATCTGCTTTACGAATTGAAGCCACTAATTCCTT
GATTTTATCTGCTTGCTCTATACTAATCATTATTCCACCACATATGACAGAGAGAATATT
GCACACGCCATATGCGTTGCAGCTTCATCACACATATTATAACGTTTCTTCAAAACTTCA
ACAAGTTCTTCACTAGTAACTTCATCCATGTTGACGAAAAAATCACCATTAATGATGACG
TAGATATTTCCTTCTTGATTGAGTGCTTCAATTTTCATGATGTTCTCCTCTTTATCCGAT
AGTTGTATAGTACCACAGCTCAAACGGAAAGTAAACCGGTAAAATGAAAAAAGTCTCCCG
AAGGAGACTAATGTTATTCGAGGGAAAGAAGATACTTACTCTGGTAAAACATTCCAGTAA
TATCATCTATCGTGCTTTGGATGGCTGGAGGCATTTCTTTATAAATGCTGTTAGATTGGT
CTAGTATGCGATCAATCATTTTAATTGTGTCGGTAGGAAGTTTACTGGCATCTGGAATTG
AAGGTGTGTATTTTCTACCAGAATACCCCAAATATTGCTCACCAAATTTATCAATCAAAT
CTGGCAACTCGGAGAAAATAAAATCGTATGCTTTGTGTCTAGCATAACTTTTAGTTTCAA
AATGTGCAGAATGAAAATAAGCTTGTGCAGCCATTAATAAACCTAAGTATTCATCCGCCT
TTGAAGGTTTTCCACTTTGTGAAAAGTCGCTGAATTTCATTCAGTCTCCAATTTAATGTT
CATAATTCTAGCGTATGATTGTGCCATCTCCGCGCCTCGCTCTATACATTCAAAATCAGA
AGAGCACGGGTCATTTTTATAGGTCGTTCTCATAAAACTATAGAATTGTTCAGACGATTC
TACGCTTTTATTTTCAAAAAGCATATAAACGTGCCTAATACCAGATTCCATAAATTTATC
AAAATGAGGATCGACATTCGCTTCAATCGATGGAGATAAAACAAATGACAATCCTAGCAT
GGCAAATAGTGCCGTTGCTTTTAAGGCCATAAAGGCCTCCTATCATTTTTGTCCTGTATT
TACTTTATGCCGATGCACGGCCTTAACTTTATCAAGGTATTTTTCAAAATTTCGCAATCT
AGTATAGTCTGCCGGAGATTGGTTGAGTGATACTTCTCGACGCAAAGCTGAAATAATATT
TCCAACTTCCCTACGAATTTCATCTAATTGAAGCACAGTAAGATTGCGAAGTTGCTTTTC
AGTTAATTGTAGCATATATACCCCTTTAGTTAGATAAACCTATTTATAACTTTTGCACTA
ACCGAGCTTTTTAGTTAATTCATTCCAATGTTTTCTACACAAAGAAACATAAATTTCATC
ACCAATACAGATTTGATTACCTTCTTTAACTGGTGTTCCATCTTCCATTAATCGAGCTGT
CATAATCGCTTTTTTACCACAATGACAAACTGCTTTTAGTTCAATAAGTTTATCTGCAAT
CGCTAAAAGTTCTTTAGAACCTTCAAACAATTTTCCAGCGAAATCAGTCCTTAATCCATA
AGCCATAACAGGAACATTATATGTATCAACAATTCGACTTAATTGATGCACTTGTTCAGT
TTTTAAAAACTGAGCTTCATCTACAAATACGCAATGAATATCTTTTTGTGCTTCAGCCCA
TTTATAGAACTCGAAAATATCCATATCATCTGTAATAATATTCGCTTCCTGTTTAATTCC
AATGCGAGAAACAACTTCACAGACAGAATCGCGAGTATCAATAGCAGGCTTAAGAACTAA
TACACTCATTCCACGTTCTTTATAATTATGTGCAGCAGTCAAAAGAGAAGCAGATTTTCC
AGCATTCATTGCTGCATAAGTAAAAATTAAACTCGCCATATCACCTTCTTAAAGCGTATT
CACATAAGCTATTAATTCATTTTCTTTCTTATCAAACCGATCAGCAAATTCTTCCTGCTG
TTCGGGAGATAGCGGGCCGTATTCATCATAAAAAGTGTTTGCTTCTATATGCTCATCTAG
AAGTTCATGGATAAGCTCAAACAATTTATCTTTTTGTTCTTTACTCAGACTCATATATTA
ATTTCCAGGAGTTTTAAAATAATTCGCTTTTGCTTAAATATTTCCATAGTTAAATGACCA
GTATCTTTTTGACCGATTCCAATGGCAAAACCTTTATTAACAGCGAGTTCAATTAAATTA
TCAAGCTCACGTAACACTTCGTATTGTAACTCAAAACTATTCATTTTGGTTTACCTTCTT
TAACGAAATCAGGATAAGGATAAAATCCTGAATAAAATCCTTCACCTTTATGATTGATGC
ATCCTTTATTAGAACAATAGCACCAATAATCGAAATCACAAGCCATTTCATCATTACATA
AAGCAAAAACAACAGGCCATTTACACTTTTCACAATGGGCATTTTTAAGAATACTAGTTT
GGCTCATAACCATGTAACCTTTAAGCAATATTCTTCTACATGTTGTTTACGACCTTTCTT
ATCAATAAAGGTATATTCAACGAATGTTCCAATGTAGTCTTTATCTACATCATGTGGACT
ATTAATTGGACATTTAGTACGGCAAATGCGTTCCCATTGACGAATAATTTCCACTTTGTT
TTTAGGATCAAACGGATGTGGGTAATGTACTTTCATAATCCACCACTATTAAATCAATAT
CAGGAGTAAACATGTCGATTAATTTAGAAACCTTATCCCAATCGCCGCCAGCAATACCAC
AACCTATGCGTGGAATGTAAATTACTGGTTTAAACAAAAGGGTTTCTGCCTGTAGATTTA
ATTCTATCATGCAGTTTACTAAAGCACCATAATCAAGATTAGGACCTGGTTCGTATTGCG
TATACAGGTTATAGCATATACCAAAACCATTAGGTTTATGTTTAAAAACAATAGACATAT
CGCCTAATTTATCACGAGAACCGTACTCAGTAGTGGTTTTATCTATTTCTAAAATTTTGG
GATAGGCTCTTGCTAATTGACCAGCTACACCTGAACCCATAGTATGAAAACAATTGCACC
CGTGCGCAATAATATTACCTTGAAGAAATAGGGCGACAATATCGCCCTTGATATATTTTA
CAATCATCTAGTACTCAATCCTCGATTATAAGAATCTACCAAACGGTCAACCATTGAATG
ACAAGCGGCTTTATCTTTCTCCTCCGCAACTGAACATTCTAAGGTATTCCACTTTTTAGC
ATATCGTTTTAACAATGTATCATTTTTGTATCTGCTTGATTTATCTCTTTCTCCGTCTTT
ATATGCATATATTAATTTCTGCGCAAATTCAGCTTGGCATGCTTTATTTTTCCCGCAATA
ATCCGCTGCAGTACGGTTTACATACTCTCTAATTTCAGTATATGATGTATCTGCTAACGC
AGAAAATGAAATTAATCCTATACATAAAACCAAAATTTTAGTCATTTACTATTTCCAAAA
GTTTATTATTTTTAAGGTAATTAGCCTTTTCTAGGACTTCAGAAGCATATTTAGAACCTG
CTTTAACATTCCATCCCGAATTATAAGAGGATATTGCTTTTCTTATATCGCCCTTATGTA
TATTTAACCAATAAGAAAGTTCAATGTACGCCCAGGAAGCTGAATTGGACCGTTTATTCA
ACATTCTTTTTATTTCAGCATCGGTCATATTATAACCAAGTTCCTTAACTCTTGCTCGCA
TAGTAGGCAAATAATTTTGGAACATTCCGTAGGCGTGATGCTTTGGTTTAGATTTTAAAT
TAACTCCGCCAGAGCTTTCTTGCCATAAAATAGCAGCCATTATATGACCTAATCCGCTCT
TGTGGATATTTTTGTGTGTTTTATATTTTCCATCCTTAGAAAATTGTTCCCCGAATTGAT
ACGCGTAACGCATGTTATCGAGTTGGACATTACTGAAAGTATGCTCGGAGCTATGTGCCA
TCATTGAAATGGCCAATAGACCAGCGAGTAGTGCTTTTCTCATGCTTACCTCATTGAGTT
TTAATTACTGCTTTAGAAGCCTTTCCTGGTAAACGACGACTGTTGATAATTGCCATCCTG
CATTGAAGTGACGGGTTTTTGAACTTCTCATTAGGCTTACAAACCGTAAATCCAAGCCAA
AGATTTCCATCTGTGATTTCTAAACGTCCAGGACGATATTCAACCCCATCAATAAAATCC
TCGTCAATGTCAGGACGCGGAGGCATACTCAGGAATTCATTAACTTCTAAAACATGGTCT
TTTATTTTATGGAATAATTCAAAAACATATGTCTCATCAATCTCCCGTTGAATTGCACGA
TCAAGAAGATGTTGAGAATATTTTAGATGAAACGATGAGACTCCTGCTGCTTTTGATGCC
TCACGAATCTCATTGTTAATTTGACGAAACTCCGACTCAAAGTGACGACGAAGCTTATTT
CGACGGATAAAAACTTCTGTATTGATAGTCATGTTATTCTCCTCTTAACTGATAGGAAAA
TTATACCACAGTCAAGAGGAAAAGTAAACAGTTATTCTTTAAATCTAATCAATTTATTCA
TAGACTTTGAAACTTCTGCACGAACCTCATGCAAGTTTTTAAGCTGTTCAAGACGCTGTT
CATAGTAAGCAATTTCATCTTCTTCGAGACAGTCCTGTGAATCTTCTTTAAGATAGCGTG
CATAGTCCTGGAAAGCTTTACGGACTACTTCCTGGAAGTCATCAAGACTTTGAATTTTCT
TAGGAGCAACAGATACACGACGAGGGGCAGTATAATACTCATAACCAAACCCTGCGCTTA
ATTGAGCCATTAGTATTTTTCCTCTGGTTGGAACACTGCACGACAAGCCCACATACTGGC
TTCTTTGAGTTTCGTTTTAGCAATAGTTAACTGATCGAGGCTTTCGGCGTAATTCTTCGC
GAGTTCATCATCTTCACAGCTATCAAATGCTTCCCAAAATTCATCGTATAAAGCATCAAA
GATAAGTCCTAAACGAACTTCAGCGTCTTTAATAGCATTTACTTTACCGATTTTTTCGTC
GGTATGTGGCTTATAACCTTTAATATCTTCAATCATATTTGACTTCCTCACCAGTACATA
AATCGTATTCAACTAAACGAATAGGTTCATGAATGCCATATCCCTGAACAGAAATTTCTG
TAGTAGGATAAATTCCATCAATATCACCCATATTCCACGCTTCGTTAAATTGCTGTTCGC
CTGAATTACTAAACCACTCGGCGAAAGCATTTAGCACATCTTTAGAACCTTCAATAATTA
TCTTTGCCATTATAAGCTCTCAGTAAAGGTACGAGCAATAACGTCGCGCTGCTGTTCCGG
AGTCAGAGAGTTAAAGCGAACTGCATAACCGGATACACGGATGGTCAGCTGCGGATATTT
TTCCGGATGCTTAACTGCATCTTCCAGAGTTTCACGACGCAGAACGTTAACGTTCAGGTG
TTGACCACCTTCAATTTTAACTGTAGGCTGTGGCTCAATTTCAATTTCACGAGCATGCAA
ACCGTAGAAAATTTCTGGGTCTACAAAAGAGTCCTCTTTAAAGGTTTTAGAGACAATAAT
TCGTGCTTGAATACCATCTTCAAAATAAATAGTACCTTTATGTGTGCCTTCAAGAATTTG
ATATGCTTTCATATAAACCTCAATTAGAAAATAAATTTATCCAAGATTGTTCTTTAATTA
AAAATGGCTCAGAATCATATGCCATTAAACTTTGGGTGATTAGTCCTTTAAAAGGTCCAT
CAATAAATTCCATGGTAAAATATGGAATTTTATTCATTAGCCGTGCATTAGGAGCAGTGC
ACAAAACTCTGCATCCTTTGAATACACCTTTTTGTAATTTGTATTGCTTGGGATAAAATT
CGCTCAAAATGTTATTATTTGCTAAAATTTCAAAATGATTCACCAATTTATTTTTAATAG
TTTTTGGCGAAAAATAAAGATATTCGAAAAGCTGAGTGTCTGTCATCATTGCATTCCGAT
TACGAAAAACTGTGGACGAGTAATACCACCAATGCAACATTTACTATTACAGCAGTAGTG
TACAGTGTCAATATGGACACTATAAATCTTATCCATATCAGGAGATTTGACAGGCTCGTC
AATTATATACAAAATTCGCGAAAGCGATAAACCTCTGAACTTGCTTCCTTTATTACCAAT
AAAACTGCGCACAGAATCAGTAAATAAACGAAAACGTATATCATCATTAGAATAACGCGA
AAATTCCTTTTTAATGTTATTTGCAGAAATTTTAGCGTAAGCTGAAGTGTTAGAAAGAAC
AATAACTGTTCCGCCATCATACAGCCAATTAGCAGCAAAGTTAGTCACAGCAATTGATTT
ACCAGATTGACGTCCACCATCTATACGAAGTGTACAATATTCTTTAAATAAATGCGACGA
ATCAGGTACATAAAATCCACTATTACAAATTTCTTCTACTCTAGCATCAGAATGGTGTGT
AAAAGCATTCATCAGGGATAGATAAGGACCAGTTAAAAATGTTCTCATTTCTTCTCTCTA
AGTTTGGGCCATTCCGTGGCGCATGAATTGTCCATTTCTGTATTTACCCATTACCGCACT
CAGGCTCGACCTTATTACAGGTTGGCGGGAATCCCTCATAGAATCATGAGGTCCAGGTTG
TTCCCATATTATTTGAACGATTTAACGTACTGAATAGAACCTTTACTATTCACAAAGGCA
ATTTTACCATTTTTATTATACATGGTAGCAGTACGTTGATAGCCATAAGTTTGTTTACCA
GATTGATAACCAACTAATGCGAAATTATCTTCACCCATTTTATTCTGTTTAGCGCGAATG
CGTTCATGACCATGCGCCATAAGAACCTTAGCATCACCAGTTGCAATGGATCGACGAGTT
TTTTCATCTTCAACTGCATTAACAAAGTCGTCAAATGAATCAAATTTAGCATGAGATTTA
TTATACAGTTTTCCATCTACTGCATAATTATATCCCTGTACATCCATCTCAACTTCTGTA
CCATCATCCAATACAGCAGTGATTTTTTGACCTTTTTTAAATTTCAAAAGATCAGTAAAA
GATTCAGCAATAATTTGAGAATTAATAGCTGCTTCAGTGATAAATTCTTGATATGTTTTC
ATATGTTTCCTTTAAATGTAAATATTTTTACCGTAATACTTATACCAATGTGGTTTCATT
AAAATTTTTTCATCAAGTCGTTGTTGACTCAATTTAATAGCTGATTTGCATGGATTATAA
TCATTTTTCCATTCTACTGGAATATCGCTGATGTCAGGAACTTCAGTATCTTTTATACTG
AACCCGCGTTTTAAGCATTCCGTTATAATGTCCGATTGACGCTTTCGCAAAAATTCTAAC
TTATCGTAAAAGAAAGTAACATGACCAGAACCTAAAATAAATTTAGAAGATATTTTAAAA
TCTTTAACGCGCTTACCGTTTGCCACATGCTTACGAACTATACCAAAAACACGCGGCAAT
TCACGGTATTCTGCGATTAAATGTTGATCAGCAAGTTCAGATACTAAAGTCAAATTAATA
CGAGTCATTTTATCCCTCCAAGTAACTGTGAATATACTATCACAATTCTAGGAGAAAGTA
AACAACTTTATAGATTTTTATACGCGTCCCAAGTGCCAGTTCTAAACGTTGCAATGACTC
GTTTTGCGCGATTAGGTGTTTGATTATACCATCTACTTTTAGCTAAGTTAACTGCTGCTT
CATCCCAGCGTTTTTGTTGAAGCATACGCAAAGAGTTAGTGAATCCAGCTACGCCAGTTT
CTCCCATTTGGAAAACCATATTAATCAATGCACAGCGACGAACAGCATCAAGAGAATCAT
AAACTGGTTTTAATTTAGCATTTCTCAGAATTCCACGAACAGCAGTATCAACATCCTGAT
TAAAGAGTTTTTCAGCCTCATCTTTTGTAATTACACCATTGCAATTACGTCCAATAGCTT
TATCTAATTCAGATTTGGCAACACTTAGTGATGGACTTTTAGTAAGCAAATGACCAATGC
CAATAGTGTAATAGCCTTCTGTGTCTTTATAGATTTTAAGTCTAAGACCTTCATCTATAC
GTAACATTTCAAATATATTCATAATACCTCCTAAGTATTTATAGAAGGTATTTATAAAAT
TAAAAGAGGTTGTTCATTATTCGGTAAAGTGAAGGACCCATCACATATTGCCACTGAGTA
CGAGGAATAAGAGCAAAAGCATCCATCTCTGGAATCATAACACCATCTTTATTTTCAAAA
TAAGACTCACAATAGCAATTTCTGAACATCTCATGCTCTACTGGAATCGTATAATAAAAT
AACTGTAAGTCTTTATTACTAGAATATTTAAATACACCTAGGTCTTCTAGAAGGTCTGGA
TTATAATTGCTAAAACCGGTCTCTTCTAAGCATTCTCTTTTTGCAGCTTCCAGTGCATTC
AAATCAGAACTTTCTACACGCCCCTTTGGAATATCCCAGCGATGTGCCATCATTCCAGGC
TTACGAGAACCAGTAACCCGACCCATAAATAAATCTCTATCTTCTGTCATAAAGATAATA
CCAGCTGATAGTGTTTTCATTTTAATTTCCTGCATTCAGTGATAAAGTTATTTAAATTTT
GAGCGTATTTCTTTTCATCAAAAATCTTTTGCTGTCTGCGTAAACGCCATGGCATTTCAA
TGAACGTGTACCATATCCCAGATAATATTGCTGCTGTAAAAATATTAACAAGTATGGTTA
AAAGAATCCAATCTCCTATTCTGTCCATTGGATTTTTTATAAAAAAGTAAAATACGAATG
ATGTCACAGGAAGACTAATAATATACCACAGAATCATAATTTTATCTGTGAACCATTCAG
CGTTCGTTAACTTAGCGCGACCATTATGAATACACACGAATTTATCATCTGTTATAATAG
ATGGCTTAGCTGCTTGATATCCCATTCTAAACTCCCTAATCAACAAATTTTTCATATCTT
CGGAACAACCATTCCAGTCAACTCTATCAACTGAAATGCCATCATCCCCATCATCTAAAT
CATACCAGCGAGTTTTTAAAATCATTTAATTTTCCTACAATCACTCACAAACTCTTCCAT
TGATTCTTTTTCAATATAAGACATGTAGCTATTATATTCCTTTAATTGTATTTTGTAATC
CTTTTTTCTTTGCCAATTTATTTTAAAATTATCATAATGAAAATATAACATTGTACCAAA
GAATGAAAATAATGAAATCGCTATAGTAAAACGAAGTTCACTCCAAACCTCTGTTATAAT
TACTGTGCCGTCGATGTTTAAAATAAAACAGTCAATTAACAATCCAATAAGACTACCTGC
AAGAGCTGCAAATGCTGATACGGCAAGAATTAATAGTGCCTCAGGAAACGAATATTTAAC
TTTATTTAGTTTTGGCTTTTGCATCGTGATTCCTTAACAAATTTCATAATTTCATCAAAT
TCATACATATCAAGTTTAAGCTGATGTTCTTTTTTAATCTTTTTGCACTGGGCTTTCCAA
TCACGTACACGTTTACGATAGTGTCTTCCTTGATACCAGTATCCTATCCAATTTATAGGT
ACTAATAAAATTGGAACTACAAATGGAAGAATTAGCGTTGACGCAAATATTGTATTAGAT
TCAATATCAGTCATAACGTCTATAACCATTCCAGCAATCAGCAGAATCACAAATGATACG
GCTACCACAGGACCTATTAACACATCAGTAGAAATTATCTGACGCTTTAATTCATACTTC
AACGGTTTACTTGGAAGGTATAGTGATGGCTTTGACATATTCTCTACATTCCTTAACAAA
TTTTTCTAGTAATAAATCGCTTTCAAAATTGGGATTTTCCACAAATTTATCAAAAAGATC
ATCAACAATAGTTAAGATATTCTTTTTACTAAGAATACGTTTATTTTCATGCTTCGTTTC
AGAATCAACTATAAGAGTAAAGAAATATTTCTTGCCCTGAAATTTTACAGTAGTATCAAT
ATAAAATAAATTTGACTTTTGTAAATTACGTTTAAACCATGCATCACTTAAACTATAAAC
GCCAAGATAATCATAATCGTCGTTTAAATAACAGACCGTCCATTCAGGAGAAACAAAATC
AGTAAATTCAACGTCAAAATCGCATGTTAATAAATGAATTGATTCAATACTGTTAATAAG
TATTCCAGGACGTATTAAAGACTTTTTACCTCTAGAAAATCCTCTAGAAAGACTTTCATC
AGTTTCATATGAAGAACCCCAATAATAATTACGTCCTTCTGCCATACGTTTAAGAGCATT
TAATAATTGATCTGGAACATCAACCTGTCTTTGGAACTCTTCAAACATTGAATTGAAATC
ACTTTGCATTTTCATTCCTACTTACTCCAAGTAATAGGGGCCGAAGCCCCTTATCATTAT
TTCAGAGAATTAATATATTCCTGAACATCGGCAGAGGTAGTTTCAACCCCAGAAATATTA
CCATTAAAGGTTTCAACTCGGGCTAGAGTATCTTCAATATCAACTTTAGTTAGCGCTGCA
ATTTCAACTACATCATCAGCAGTACTAATTCCAAGGGCATTTGCTGCACGAGTTTCACGG
ATATATTCCAATTTAACTGCAAGTTCTTGGCGAGCATCATCCAATTCAACTACTTTCTTG
GCGATTTCAATTCGCATTTCAGCATAACCATCAGCTTTAGTAGTCAACTGTTCAGCTGTT
CGACGATATAGCAAGCCGAGTTTAGCATGCATTGTTACATCTTGACCTTCAGAAAGAAGC
TTGCGAATTTCACGCTCTTTTGATTCGGCCTGTCGATTCTTTTCGACAATAAGTTCACGA
ATACGTTTTTCTTCATTAATAGATTTAACAGAAGCAGTTTTTAGATCTTTAATCTTATCA
AGTAGTTTTGCTGCCGCAGCAGTATACTGTTCTTCAACAGATAGATTTTTAGCCATAGCA
GAACCAAGTTTAGTGCGAATAAACTCAACAATTTTCTTCAGTGTGTTCATAGTATTTCCT
TAGGTTGGTATAATTAGATAATATCACGTTTCTAATAGATTGTAAACTTATTCTTCGTCT
AGCTCGTCGATAAAGGCGTCGATGGCCTCGACAACGGCATCATTGATAGCCAATAAAATA
AAATCATCGTCAGTACCTTTAGAAGATTTTAAAGCATTGATATATGCTTGGTTGGCGAGT
TCCCAAGCCTTTTTAAAATAAGGAGTTTCATCATCGGGGCCAACGAAACGTACGCCTTCA
AAGATACGGTTAGCATAATCCAATACCCACTGTACAGGCATGTTTTGAGAACGTTCGTTA
AACTCTTTAAATTCCTTAGATTCAAAAAGCTCTTCAGGATAATCATTTCTATTACAAAAA
GCTTTACTAAAGTTACGTTTCATAATGTTTTCCTTGTGATGATAAGTCTATAGTAACGCC
TTCATACTTAGATGTAAACTATTTCAACATCGCCTTTTGCTGTTTTATAACCTTCAGCCC
AAGATACAACCGAGTTTTTATCTGAAGATTCAAATTCTGGCATTGGGCTTTCGCCAATGT
TCACGCAGTATGTTTCTTCATTTTCGTCGAACCAAATAATTAATGTAGTCATTTATTTCT
CCGTTTCTGTATTTGTTTTGATAAGTCTATAATAACACCGTCCTTGGTGTTTGTACACAA
TTATTTCATATTATTGAAATATTCTTCTGCGATTTCATCGTTATCATGGTAAACTTTAGA
AGACAGTTTAACATAACCTTCAGCAGTGAACATGTTAATCACAACCTTTACAGTATACCA
CTGACCATCTTCATTACCCATTACTGCGTAAGTTTCAAACATCGGATGGTCAGGACCGAT
AACTTTAATATCATTCACTGTACGACCGAAATCTTCTGAAACACATTTCATAAAGAAGTT
GAACAGCTCACCGTAATTATCCATTTCATTCTCCAAGTTGTTTTCTGTATCAGTAGTTGA
TATTGATATAGTACCATGGAAGGACAAGGATGTAAACCATTTTGTGAAAAAATTTTTAAA
AAGTTTTGGGGAATTCTAGGGCAGGAAGGGGAAATCAAAGGATAGGATAATATATTATAA
AGGGTAGAAACTAAATGATGTCTAGAGAGGCCTGGAAAGGCCTAGATACCAAAAAGCCCC
AACCTTTCGGTCGGGGCTAAGAATGTTATTTGATTTGTTTAGCAGACCAAATGCGGTCTT
TAATAATTTTTTGGATGTCTTCAACATACTCAAGAGAGTGAACATGTGGGTTATCTTTGA
AACTATAAGCACGAGCTAGCTTTTGGCCTTCAGTTTTGATTACTAAAAGCTCTTTAAGGA
TAGCTTCATATTTGGAGATAATTCCTTTAACGATATTTTTCTCTTGTGTGACTTTAGGAT
CTGCTTTAGGAGCAGGTTTACCTGAAGCCTTTGCAAAAGCAGCGCCAGTAGCAACTAAAC
TTTTCCAGGCCATACTAACAGCATTCCCCGTAAATCCTTCTGCTTTCATGTCGCGAGCAA
ATTGGAATCGTGATTCATCAGAAGCATCTTTATAGGAATATTTACCCGCTGCAATGGCTG
CTTTTGCGACAGCTTGAATTTCGGTGCTAGACGCTTCATTTAACACCGCTTCATTTAAAA
ATTGAGTATATGATTTCATCTTATTTCCTGTTTTAATTTGTAGATTTAATATACTTATTT
ATACTAAAAAGCCCCAACCTTTCGGCTGGGGCTAAGCCTTGCGGCAACCTTGTCGGGGTT
CCACCTGCTAAGGCAAGTGTTTGTACGAAACGCCGGGATTCGAACCCGGTTATCAAGCAG
TTGACGCTACTCAATATTTTTAAAAGGCCATATCTCGACCATATCCGAACGTTCCGTCAA
AAACGCTACTCGGCTTACGGCAAAGATATTTCCTCGAATCGATAATTCGGTGCGCCGTTT
CTGCTGTGATGTAAGAGGGCATCAATAAACGCAAGGATTATTAACGCAATTCCTTACTCA
GGGAACATCAGTCCGACGACTTGCCGGTAGCGACCCGGCTTCTTGTCTGGTCGAGGCAGT
AGGGATCGAACCTACGACCCAGGACTTAGAAGGTCCTTGCTCTTCCTTCTGAGCTATGCC
TCGTATTTGGCGGACGTGATAGGATTCGAACCTATAACCAATCGCTTAACAGGCGATCGC
TCTGCCATTGAGCTACACATCCAAATTGGTGGGGAGTGGTGGAGTCGAACCACCCGAGTC
GCAATGACAATGAATTTACAGTCCACACCGCTACCTCTACGGGATAACTCCCCTAATTCA
TAATTTGGTGGCCCTGGGTGGAATTGAACCACCATCTGGCGATTATGAGTCGCTTGCTTG
AACCTTCCAGCTACAGGGCCTTGGTGCTGATTGACGGAATCGAACCGCCGACCTTCTCAT
TACAAGTGAGTTGCTCTACCTACTGAGCTAAATCAGCAAAACTGGCGGAGGCGATAGGAT
TTGAACCTATGAGTCGCCGGAGCGACTGCCGGTTTTCAAGACCGGTGCATTAAACCACTC
TGCCACGCCTCCAGTCTCCATACAAGGATTTGAACCTTGGACCTCCTGATCCCAAATCAG
GCGCTCTACCAAACTGAGCTACACGGAGTAAATTAAATTGGAGCGGATAATGAGAATCGA
ACTCACATCATCAGATTGGAAGTCTGAGGTAATACCATTATACGATATCCGCAAATTTGG
TGCGAGAAGTGGGACTCGAACCCACAAGGAAATCATTCCGCAGCATTTTAAGTGCTGTGC
CTTTACCAATTTGACCATTCTCGCGCTGGGAATAAAGGACTCGAACCTTTGCATCCTGGA
ATCAAAATCCAGTGCCTTACCAACTTGGCTAATTCCCAATTATTAACAAAGGCTCTTTAG
CAAGAACCCTTGATGATAGAGGGTATTAATCAGTGCGGTATGAGTTAATAATAACAAATA
ATTCTTAAAGCATATTTACCATTTATGATAATACATATTTACGATGCATTCAAGACCCAA
AGGATTCTTGAAAATATCATATTCAAGAGGACCTTTTTCTGTTTCAATAAAGAAATCAAA
ATTTACTGTATTAAATTTACGGTCTTCCTTCACTAATTTAACTTGAGAAGATGAACGGTC
AACATAAACCTTTTCAACTTCAAAACATGTTAAAATGCCATAATCATCAATCAAGGCTTT
AGCTGCTTCTTGATCATATTTATATCCATTTTCAATGGATGATACTTTAGCATAAAGAAT
CATTATCAACCTTCATCAACAATAGTATGAGTATGGGCATTTACAATTTGCCACCAATCA
AAGCGATTAGAACCATACATCGGTTTGTTTTCATTTTCTTTGATAATATCACGAAGTTCA
TCTTCAGTAGCGGCTTTCGCGATTAAATCAGCATATCCACCACGAGGATAATAATTATCA
CCTGCAAAAAGTAAAAAGTTTGGTTTAATGTTATTGAACTCTTCAAGAGTAATAACTGTT
CCTGATGGTAGTTGAACAATCTCTACATATTTATATCCTAATTTTTGAGCAGCATCTACT
GCTTCAAGCAAAGTATCATGAGCCCATCCAATTTGACAACCTGGCTTTTCAGATGGATTA
GCCTGATAATCCGCGTACACTTTATACATTCTATTCACCTTTAGAAATTTTATCCATAAC
GACAGCAATTAAACCAATTAAAAATGCTACTACAAGTGAAAAAACATTTTCTGCTGTAGT
TAATAATCCGCATATAAATCCAACAAACATTGAAAAACTAAAAGCAGAAGCAGAAATTGC
AATAGCAACATTTCGAATTAATTCACAACGTTTCATTTTATTCTCCTCAGTAGTTGATAG
GGTAATAGTATCACAACTAAAACCCTATGTAAACAACTTTGTGAAAAATTTATTACAAAA
GATTTTTAGCAATAATTTTAAGCTGAGCTACTGAAATATGCTTGGCTTTAAACAAAGCAG
TTTCTTCAGCAGGAGAGATAACGATTGTAGCACCATCTTTCTTAGCGGACCATCCATCAC
CCAGGTAAACAGTACCTTTGACTTCTTCGCCATCAACCAGGCTAATCATCGGTTTACCTT
CACGTCCTTTGTTTGCTTTAATAACTTCAGAAGTAAGGGTCGCTTCAGTCAAAGTAGAAG
CGTTAGTCGTTGAAGTGAATTCTTGATAAGTTTTCATTTTATTTTCCTAAATTAATAAAT
GTGTTGATGGAGATAATATCACTTCTCCATCATCGTGTAAACAACTTTGTGAAATTATTT
TAAATCGTCTGCCCAATCGAGTTTAAGAGGTTCTTTGTATTCACGATCTAATACAACCGG
AATTTGTACATCACCGCTAAATGATAAGGGCCCAACATTATAAGACAATGTTATATGCGG
TGTGTAATCATCAAAATCATGTGTAGCACCTAGTGCCCGCGCATACATGTGTCTACAGCG
CAGATATTCAGAATCTAGCACAAGTACAAGAGTCGATCCATCTTGTGTTTTCCATACTTC
TAAATGTCCAGAAGAAGCTACTTCAAAACTTCCGCTTGATGGAACATACGGAACATTTAC
TCTTGAATAACATATGGTCGAATGAATTTTTTCTCTAGGAACTGGATTAGGAACACGTAA
AGAGCGCTGAAGTTCTTCCAGCGCATCAAGTGTTAATTCTGAAAACTTAGCTGCTACATA
AAGACCCGTTGAAAAGTCTTTAAATTCCATTATTCTTCATCTTTTGCTTCATCAGTAGAT
TCAGCAGTAAGATTCTTAACAGCTTCAACGATTTCTTCAACTTTGATAGTATCGCCAGTG
ATACCTACTGCACGAGCAATTTCAGCCAAAGTTCCTTGCAGAATTTTGGATTCTTCCATC
AGACGAGCCGCCTGGTCCTGCGTATCAAGAATGCGAGACTTCAGAGTTACGATTTCAGCA
GACAGTTTTTGTTCAATAGTTTGTTCAGACATTATAGTACCTTTAGTGTATTTTTAATTT
TAGAAAAAAGTTCTTCAAGAGAACCATCGTTTGTAATTACTAAATCGCCATCACGAATTG
GCAATCCAGCTTCTGTAATATGAGTATCATTGGATTTTTGACCAGGACGAACTACATGAA
TTACTGTAGCACCCATCGCCCTAGCCGCATCCATTTCATGATCTTGACGAGTATCAGGAA
CGATATAATAATCATAACCTGAGTTAAATTTATCAAGATAATCTAAAGCAAATAATTTTA
CCCAATACATGCGGTCGAAGTTATTAACAATCAAATCCGTACCTAGGGCTTGCATCAGAC
GACGGACTGACCATTGATCTTCAATATTATTTATAACGTCAATAATCTTGTTAAATGCTA
CGAAATTAACTGATTCTTGTCCTTCGTCATCAAAAACAAACACGCCTTTAATTGGGCTTT
TACTATTAAGATAGCAAAATGCTTGTTCCATAATCGTGATTACTTCTGATTTAGTCAGAT
TTAAATTAGTCTCACGATCATAGTCAATTCCTTCAAACTCTTTACGAGTTAAGCAAGGAT
AGTCAGTATTTGCTGCAAATACACCCCATGCATAAGCCAATGCATCTTTAATAGGACCAG
CAAGTTGATATTTAACTGCAGAATAATTATTCATGATAAAATCTGCAGTAGTATCTTTTC
CACTACGCTTTACACCACTTAAAAAGATTAGTTTCATATGTTTCTCCTCAAATTTAGTTA
AGATTATAACACATGAAACTGAAGCATTAAACTTCTGCTATAATTTTGCCATCTTTTTCT
ACTTGAAAATACGTATAAGGAATCGTAGCTGTACATACTAAAGCCGGGTCTGAATCTTCC
GTGTAGCTAAATTCTACTTCAGACAGATCAGAAACCCAAGGCTTATAAAAATTTATTGAC
ATCACGATTTCAGTTTTGCTATTATCTAAGATGTAAAGCGTAATGTACTCAGGACCTGTT
TTTTGGGCAGTATTTTCACCTGTAAGATAGTTACTAGTTCCTAGCATCCATTCATACATT
CCTATCCACGACTTAAGTTCTTCATCAACTATAAATCTCACAATGAGTGGATCATACTCA
AATGTAACACCAGGTCGTTGTGCTCGACCCAGGCCAAACGGCCCAGTCACGGTATCAGTA
ACAGGTATTCTAATTCCTGGAATAGGAACTGACTGAGCATTTAAAGTAAAAGCAGATGTA
GTATTACTATGTGGTATTGATACTACAAAGTTAGTTGTATTTGCTTGGTTAAAAATTTGT
TGCAGAGCTTGCGACATATATTCCTCATAATGCTTTATAACTGTTGGTGGTATAATGGGT
CTAAGTCCCTTCCATTCAATTCCATTTAGAACAAACAACAGAAAAGAATGGAAGATAATA
GAATTAAATATTTGACCAGACTTTGTTTGCAGAGAAACGTTTTCCTTTTGAAACGAACTG
CTGAAGTGGCATCAACACAACGTTCGCCCAGTCTTTCGGGGCGATTTCAACAAGGCTACC
CATAATATTACCAGGTATATATGCCTTAATCATTTGGTCTGCACCTCTAAATCCTTTCAC
TTGACTCCAATCAATTTTTAATTTCGTTTTATTAGTAATAGTAGGTGTATTTGCATATTG
CTTTAAAAGCTCTTCTAGGAATTGCTGACGAGCTTTAGGTGGAATATAGTGCAAGTTCAA
TCCGTACATTAAATTATGCTTACCTAAACCAAGGTAAATTATCAAAGGAAATTTATCCCA
GTAAGGAAGAGTTTCCTTGTGTTTAGCATCATAAGCAAAAGCATATATTCGTCCCGGCTG
CGGGCGAACAACTTTATGTCCTTTTACTTGCTTAATAGTTTCAGCAAACCACTTTCTAGT
TTTATTATTAATTGCTGCACCTTCATTACGAATTTTATCACGCAATGTTTGTCTGAATGA
ATTTATCATAAGCAGTTGTCTTTCTTGCTTATTGAGTTTATTCATTGGTTTTGATTCAAG
CTTTTGAATCTTTTCAGCCGTTTTAATTCCTGAAGCATATTTTGACATTGCCGAAGTAAA
CGTAGAGTATTTGATTCCTCTTTCTTCAGCAAATTGCTTTCCTGTCATTCCTTTTGCTTT
GGCCTTTTTATATTCAAGACCTATCTGAATCCATTTCTTTTCGTTTAATGATTGCTTAAC
CTTTGGAACTTGGGGAGTGCTTTCATTAATTATTTGAAAAATAGCCATTATGCCCCCTTA
AAGCCAAGAGCTCGTAATCCATCTTCTGTTAGAATTCTAAATTTTATTCCACGCTTTTCA
GCTAAAGCTTGCGCTGCTTTCCATTTGTCAGTATTAACTGAATATGTATAAATTTCATTC
ATAAATCTTTTCTTCGCTGCAGTTGTTAGATGTGCTGGTTTAACTGGTGGTTGTGTTTCT
TTTTTAGGCTTTATTTCAATAAAAAATTCTTGTCCAGAAGAATCTTTCATCCAAATATCC
ATGAAGTATCTACGTTTTTTCCCTTCTGCATTACAAAAATAAGGAATTACTGCTGTTTCA
CTACCCCATGCAATAATTTCTGGATTTTTATCTAACCATTCAAAAAAGAATTTTTCCCAA
TTTGATCTATACGTAATTTTTTTAGGGTCACCTCTATATTTTGATATATTTTTAGGAACC
CATTTTCCAGAATATGCCATTGGATTCTCCTTATAAATAGATAATATATTTATAAACAGG
AGGGCCCATGCTCTTTACATTTTTTGATCCGATTGAATATGCGGCCAAAACGGTGAATAA
AAACGCGCCGACTATTCCTATGACAGATATTTTTAGAAACTATAAAGACTATTTCAAACG
TGCTCTTGCGGGATACCGCTTACGTACTTATTATATTAAAGGTTCACCACGCCCGGAAGA
ATTAGCAAATGCTATATATGGAAATCCGCAGTTGTATTGGGTTTTATTGATGTGTAATGA
TAATTATGATCCGTATTATGGATGGATTACTTCGCAAGAAGCTGCTTATCAAGCATCTAT
ACAAAAATACAAAAACGTAGGTGGAGACCAAATAGTATATCACGTGAACGAGAACGGTGA
AAAATTTTATAATTTAGTATCATATGATGATAATCCATATGTTTGGTATGACAAAGGCGA
TAAAGCTAGAAAATATCCTCAATATGAAGGAGCACTTGCTGCGGTCGATACGTATGAAGC
TGCTGTTCTTGAAAATGAAAAACTTCGTCAAATAAAAATAATAGCAAAATCAGACATCAA
TTCATTTATGAACGACCTTATACGTATAATGGAGAAATCTTATGGAAATGATAAGTAATA
ACCTCAATTGGTTTGTTGGTGTTGTTGAAGATAGAATGGACCCATTAAAATTAGGTCGTG
TTCGTGTTCGTGTAGTTGGTCTGCATCCACCTCAAAGAGCACAAGGCGACGTAATGGGTA
TTCCAACTGATAAATTACCATGGATGTCAGTTATTCAACCTATAACTTCTGCAGCAATGT
CTGGAATTGGAGGCTCCGTTACTGGTCCGGTAGAAGGAACTAGAGTTTATGGTCATTTTT
TAGACAAATGGAAAACTAACGGAATTGTTCTTGGCACATACGGCGGAATAGTTCGCGAAA
AACCGAATAGACTTGAAGGATTTTCTGACCCGACTGGACAGTATCCTAGACGTCTAGGAA
ATGATACTAACGTATTAAACCAAGGCGGAGAAGTAGGATATGATTCGTCTTCTAATATTA
TCCAAGATAGCAATCTAGACACTGCGATAAATCCTGATGATAGACCATTATCAGAAATTC
CAACTGATGATAATCCAAATATGTCAATGGCTGAAATGCTTCGCCGTGATGAAGGATTAA
GACTAAAGGTTTATTGGGATACTGAAGGATATCCGACAATTGGTATTGGTCATCTTATCA
TGAAGCAGCCAGTTCGTGATATGACTCAAATTAATAAAGTTTTATCAAAACAAGTTGGTC
GTGAAATTACCGGAAATCCAGGTTCTATTACAATGGAAGAAGCGGTAGCTTTATTTGAAC
GTGATTTGGCTGATATGCAACGTGACATTAAATCACATTCTAAAGTTGGCCCAGTTTGGC
AAGCAGTTAATCGTTCTCGTCAAATGGCATTAGAAAATATGGCATTTCAGATGGGCGTTG
GCGGTGTAGCTAAATTTAACACAATGTTAACTGCTATGTTAGCCGGAGATTGGGAAAAGG
CATATAAAGCTGGTCGTGATTCATTGTGGTATCAACAAACAAAAGGCCGTGCATCCCGTG
TTACCATGATTATTCTTACAGGGAATTTGGAATCATACGGTATTGAAGTGAAAACACCGG
CTAGGTCTTTGTCAGCAATGGCTGCTACTGTGGCAAAGTCTTCTGATCCAGCTGACCCTC
CTATTCCGAATGATTCGAGAATTTTATTTAAAGAACCTGTTTCTTCATATAAAGGTGAAT
ATCCGTATGTTCACACAATGGAAACTGAAAGCGGTCATATTCAGGAATTTGATGATACCC
CTGGGCAAGAACGATACAGATTAGTTCATCCGACTGGAACATATGAGGAAGTATCACCGT
CAGGAAGAAGAACAAGAAAAACTGTTGATAATTTGTATGATATAACAAATGCCGATGGTA
ATTTTTTGGTAGCTGGCGATAAAAAGACTAACGTCGGTGGGTCAGAAATTTATTACAACA
TGGATAATCGTCTCCACCAAATAGATGGAAGCAATACAATATTTGTACGTGGCGATGAAA
CTAAGACAGTTGAAGGTAATGGAACTATCCTAGTCAAAGGTAATGTTACTATTGTAGTTG
AAGGTAATGCTGACATTACAGTTAAAGGAGATGCTACCACTTTAGTTGAAGGAAATCAGA
CTAATACAGTAAATGGAAATCTTTCTTGGAAAGTTGCTGGGACAGTTGATTGGGACGTTG
GTGGTGATTGGACAGAAAAAATGGCATCTATGAGTTCTATTTCATCTGGTCAATACACAA
TTGATGGATCGAGGATTGACATTGGCTAATATACTTCCAATGAGCGCTGATTTAGGAGAA
TCCATGGAAGGTTCTTCTATCGACGTCACCTTTACCGCTCAATTAGAAACAGGTGAAACG
TTAGTATCTATAAATATAACTAGTTACGAAGAAACTCCTGGGGTTTTAGTAGAAGAAAAT
CGTTTATATGGAACGTATGAATCTGTATTTGGATTTGGAAATGATGCATTGAAATATCGT
TTAGATAATGAATTTAAAACTGCTGCTTCATGGGAAGACCTTCCAACTGATTCTAATACT
CAGTTATATTTATGGAAAGCTCCTCAAAACCTCCAGAAGACATTCACTTACGAAGTAACA
TTAATATATGACTATCAAGAACAAGGTGAATCTGGAGGTTCTGGTAGTAATTCTAGGTCA
TCTTCTGATACTACTGAACCGACAGATCCTCCTGCTCCAGTAAGAAAAACTCTCGTTAAA
AATTATACTAAAACTATAGTTGGAAATTGGAGTCGTTGGGCTAATAAATTGAGAAGCTAT
GTGTATGAGAGGCCATAAATGTCAGGATTAAGTTATGATAAGTGTGTTACTGCTGGCCAT
GAAGCGTGGCCTCCAACAGTTGTGAATGCTACACAAAGTAAAGTATTCACTGGAGGAATT
GCTGTTCTAGTAGCAGGCGATCCAATTACAGAACATACAGAAATTAAAAAGCCATATGAA
ACACATGGCGGAGTGACACAACCTAGAACTTCTAAGGTATATGTCACTGGAAAGAAAGCT
GTTCAAATGGCTGATCCAATATCATGCGGTGATACTGTGGCTCAGGCATCATCTAAAGTA
TTCATTAAATAGGATTTAAAATGGCAAATACCCCTGTAAATTATCAATTAACAAGAACAG
CAAATGCTATTCCCGAGATATTCGTCGGGGGTACATTTGCTGAAATAAAACAAAACCTCA
TTGAATGGCTTAATGGCCAAAATGAATTTTTGGATTATGATTTTGAAGGCTCAAGATTAA
ACGTTCTGTGTGACCTTTTGGCTTATAATACGCTGTACATTCAGCAGTTTGGTAATGCTG
CTGTGTATGAAAGCTTTATGCGTACTGCTAACTTACGAAGTTCAGTTGTTCAAGCTGCAC
AAGATAACGGATATTTACCTACTTCAAAATCCGCTGCGCAGACCGAAATTATGTTAACAT
GCACCGACGCATTGAATAGGAATTACATTACTATTCCTCGCGGAACTCGCTTTTTAGCAT
ATGCAAAAGATACTTCTGTTAATCCATATAACTTCGTTTCTACCGAAGACGTTATTGCCA
TTCGTGATAAAAATAACCAATATTTTCCGCGTTTAAAATTGGCCCAGGGACGTATAGTAA
GAACTGAAATCATTTATGATAAATTAACACCTATTATCATTTATGATAAAAATATTGATA
GAAACCAGGTTAAATTATATGTTGATGGAGCGGAATGGATTAACTGGACAAGAAAGTCAA
TGGTTCATGCTGGTTCAACATCAACGATTTATTATATGCGTGAAACTATTGATGGAAACA
CTGAATTCTATTTTGGTGAAGGTGAAATTTCTGTTAATGCTTCTGAAGGAGCTTTGACCG
CTAATTATATTGGAGGTCTTAAACCTACCCAGAACTCTACGATTGCTATTGAGTATATCA
GTACTAACGGTGCAGATGCGAATGGTGCAGTCGGATTTTCATATGCAGATACATTAACAA
ATATAACTGTCATCAATATTAATGAAAATCCAAACGATGACCCAGATTTTGTTGGGGCAG
ATGGCGGCGGCGATCCAGAAGATATTGAACGTATTCGCGAATTGGGTACTATTAAACGCG
AAACCCAGCAACGCTGCGTAACTGCGACTGACTATGATACATTCGTTTCAGAGAGATTTG
GTTCTATTATTCAAGCAGTTCAGACGTTCACTGATTCTACTAAACCCGGTTATGCATTTA
TTGCTGCTAAACCTAAATCAGGTCTGTATTTAACTACCGTACAGCGCGAAGATATTAAAA
ATTATCTCAAAGACTATAATTTAGCTCCTATTACACCATCAATTATTTCTCCTAATTATC
TTTTTATTAAGACTAATTTAAAAGTCACATATGCTTTAAATAAGCTGCAAGAATCCGAAC
AGTGGCTCGAAGGTCAAATAATTGATAAAATTGATCGTTATTATACCGAAGATGTAGAAA
TTTTTAACTCATCTTTCGCTAAATCTAAGATGTTGACATATGTAGATGATGCAGATCATT
CTATCATTGGTTCATCAGCGACAATTCAAATTGTTCGTGAAGTACAAAACTTCTATAAAA
CGCCTGAAGCAGGTATTAAATACAATAATCAAATAAAAGATCGTTCTATGGAATCTAATA
CGTTTTCATTTAATTCTGGACGAAAGGTTGTAAATCCTGATACTGGTTTAGAAGAAGATG
TATTATATGACGTTCGCATAGTATCAACAGACCGAGATTCTAAAGGAATTGGTAAAGTTA
TTATTGGTCCATTTGCTTCTGGCGATGTTACAGAAAATGAAAACATTCAGCCGTATACAG
GCAACGATTTTAACAAATTAGCAAATTCTGATGGACGCGACAAATACTATGTTATCGGTG
AAATAAATTATCCAGCTGATGTGATTTATTGGAATATCGCTAAAATTAATTTAACATCTG
AAAAATTTGAAGTTCAGACCATCGAATTATATTCTGACCCAACCGATGATGTTATTTTTA
CTCGCGACGGTTCACTGATTGTATTTGAAAATGACTTACGTCCACAATACTTAACTATCG
ATTTGGAGCCTATATCACAATGACAGTAAAAGCACCTTCAGTCACTAGTCTCAGAATTTC
CAAGTTATCCGCAAATCAGGTGCAAGTACGCTGGGATGACGTTGGTGCTAATTTCTACTA
TTTTGTAGAAATCGCTGAGACAAAAACAAACTCGGGGGAAAATCTCCCGAGTAATCAATA
CAGATGGATTAACTTAGGATATACTGCAAATAACAGCTTCTTTTTTGATGATGCTGACCC
ATTGACATCATACGTTATTAGAGTAGCTACAGCTGCACAAGATTTTGAGCAGTCTGATTG
GATTTATACCGAAGAGTTTGAAACTTTTGCTACAAATGCTTATACATTTCAAAACATGAT
TGAAATGCAATTAGCCAATAAATTCATTCAGGAAAAATTTACTCTTAATAATTCTGATTA
TGTCAATTTTAATAATGACACTATAATGGCTGCATTGATGAATGAATCTTTTCAATTCAG
TCCATCATATGTTGATGTTTCATCAATAAGTAATTTTATTATTGGTGAAAATGAGTATCA
TGAAATACAGGGTTCTATTCAGCAAGTATGTAAGGATATTAACCGAGTTTATTTGATGGA
ATCAGAAGGGATTCTATACCTTTTTGAGCGCTATCAACCTGTAGTTAAAGTATCCAATGA
TAAAGGACAAACTTGGAAAGCTGTAAAGCTCTTCAATGACCGTGTAGGATATCCTTTATC
TAAGACAGTATATTACCAATCTGCGAACACAACATACGTTCTAGGATACGACAAGATTTT
CTATGGCCGTAAATCGACTGATGTTAGATGGTCAGCTGATGATGTCAGATTTAGTTCTCA
GGATATAACATTTGCTAAACTTGGCGACCAGTTACATTTAGGATTTGATGTAGAAATTTT
TGCCACTTACGCGACTTTGCCAGCGAATGTATACCGCATTGCAGAAGCTATTACTTGCAC
CGATGATTACATTTACGTTGTCGCCAGAGACAAAGTTAGATACATAAAAACGAGTAATGC
ACCTATAGATTCTGATCCATTATCTCCAACATATTCGGAAAGACTTTTTGAACCTGATAC
CATGACTATAACCGGAAATCCTAAAGCAGTATGTTATAAAATGGATTCTATCGGTGATAA
AGTTTTTGCTCTTATTATTGGTGAAGTTGAAACATTAAATGCTAATCCTAGAACATCAAA
AATAATTGATTCCGCTGATAAAGGAATATATGTTTTAAATCATGACGAAAAAACATGGAA
AAGAGTTTTTGGTAATACCGAAGAAGAAAGAAGACGTATTCAACCCGGATATGCGAATAT
GTCAACTGACGGTAAATTAGTTTCTCTGTCTTCGAGTAATTTTAAATTTTTAAGTGATAA
TGTTGTTAATGACCCTGAAACTGCAGCAAAATATCAGTTAATTGGTGCTGTCAAATATGA
ATTTCCTCGTGAATGGCTAGCTGATAAGCATTATCATATGATGGCATTTATAGCAGATGA
AACATCTGATTGGGAGACTTTTACTCCTCAACCAATGAAATACTACGCAGAACCATTCTT
TAACTGGTCTAAAAAATCTAACACACGTTGTTGGATAAACAACTCTGATAGAGCTGTAGT
AGTTTATGCTGATTTAAAATACACTAAAGTTATAGAAAATATTCCGGAAACATCACCAGA
TAGATTAGTTCATGAATACTGGGATGATGGTGATTGTACTATAGTAATGCCAAATGTTAA
GTTCACCGGATTTAAAAAATATGCATCAGGAATGCTTTTCTATAAAGCCTCCGGTGAAAT
AATTTCTTACTATGATTTTAACTATCGTGTGAGAGATACAGTAGAAATTATTTGGAAGCC
AACTGAAGTATTTTTAAAAGCATTTTTACAAAACCAAGAGCATGAGACTCCTTGGTCACC
AGAAGAAGAGCGTGGATTAGCTGACCCTGATTTAAGACCATTGATTGGTACAATGATGCC
TGATTCTTATTTGTTACAGGATTCGAATTTTGAAGCATTTTGCGAAGCATATATTCAGTA
TCTTTCCGATGGATATGGAACTCAATACAATAATTTACGGAATCTTATTCGTAATCAGTA
TCCACGAGAAGAGCATGCATGGGAATATTTGTGGTCAGAGATATATAAAAGAAACATCTA
TTTAAATGCTGACAAACGTGATGCTGTTGCAAGATTTTTCGAATCACGTAGCTATGATTT
TTATTCTACTAAAGGAATTGAAGCATCATACAAATTTCTTTTTAAAGTTCTTTATAATGA
AGAGGTTGAAATTGAAATTGAATCTGGGGCTGGTACTGAATATGATATAATCGTTCAATC
TGATTCTTTGACTGAAGACTTAGTAGGACAAACGATTTATACAGCTACAGGAAGATGTAA
TGTTACTTATATAGAAAGAAGCTATTCTAATGGTAAATTGCAATGGACCGTAACTATTCA
TAATCTTTTGGGACGATTAATTGCTGGCCAAGAAGTTAAAGCAGAAAGACTCCCTAGTTT
TGAAGGCGAAATTATTCGTGGGGTTAAAGGAAAGGATTTGCTTCAAAACAATATAGACTA
TATTAATAGAAGTAGATCATACTATGTAATGAAAATTAAATCCAATTTACCTTCTTCCCG
CTGGAAATCTGATGTTATTCGTTTTGTTCATCCAGTAGGATTTGGATTTATAGCAATTAC
ACTTTTAACAATGTTTATTAATGTTGGTTTAACTCTTAAACATACAGAGACTATAATTAA
TAAATACAAAAACTATAAATGGGATTCTGGATTGCCTACTGAATATGCTGATAGAGTAGC
TAAATTAACTCCAGCTGGTGAAATTGAGCATGATTCAGTAACAGGCGAAGCAATTTATGA
GCCTGGCCCAATGGCTGGTGTAGAATATCCTCTTCCTGATGACTATAATGCTGAAAATAA
TAATTCAATATTTCAAGGTCAATTGCCGTCTGAACGACGTAAATTAATGAGTCCTTTATT
TGATGCATCTGGAACAACATTTGCGCAATTTAGAGATTTAGTTAATAAACGTCTAAAAGA
CAATATAGGAAATCCAAGAGACCCTGAAAATCCAACACAGGTTAAAATAGATGAATGATT
CAAGTGTTATCTATCGTGCGATAGTTACTTCAAAATTTAGAACAGAAAAAATGTTGAATT
TTTATAATTCAATTGGAAGTGGTCCGGATAAAAACACTATCTTTATCACATTTGGAAGAT
CAGAACCGTGGTCATCAAATGAAAATGAGGTGGGCTTTGCCCCACCTTATCCAACCGATT
CTGTATTAGGCGTAACTGACATGTGGACGCATATGATGGGAACAGTAAAGGTTCTTCCAT
CAATGCTTGATGCTGTTATTCCTCGCAGAGATTGGGGAGATACTAGATATCCGGATCCAT
ACACATTTAGAATTAACGATATTGTAGTGTGTAACTCAGCTCCTTACAACGCTACTGAAT
CTGGCGCGGGTTGGTTAGTGTATCGTTGTTTAGATGTTCCTGATACCGGAATGTGTTCAA
TAGCATCTTTAACTGATAAGGATGAATGCCTTAAATTAGGCGGAAAATGGACACCTTCTG
TTAGGTCAATGACTCCTCCTGAAGGTCGAGGAGATGCTGAAGGAACAATTGAACCTGGGG
ACGGATATGTTTGGGAATATCTTTTTGAGATTCCGCCTGATGTATCTATAAATAGATGCA
CGAATGAATATATCGTGGTTCCTTGGCCTGAGGAATTAAAAGAAGACCCGACTAGATGGG
GATATGAAGATAATCTCACTTGGCAACAAGATGATTTTGGATTAATTTACCGTGTTAAGG
CAAATACTATCCGTTTTAAAGCATATTTAGATTCAGTTTATTTTCCTGAAGCTGCATTGC
CAGGAAATAAAGGATTTAGACAAATATCAATAATCACGAATCCTCTTGAAGCTAAAGCTC
ATCCAAATGACCCAAACGTTAAAGCTGAAAAGGATTATTATGACCCAGAAGATTTAATGA
GGCATTCGGGTGAAATGATTTATATGGAAAATAGGCCACCTATTATTATGGCAATGGATC
AGACAGAAGAAATCAATATTCTGTTTACATTTTAAATTAAGGGAGCCCATGGGCTCCCTT
TTTCTTTATAAATACTATAAACTCATAAGGAAACCGCTATGTTCATTCAAGAACCAAAGA
AATTGATTGATACCGGCGAAATTGGTAACGCTTCTACTGGTGATATCTTATTCGACGGTG
GTAATAAAATTAATAGTGATTTTAATGCAATTTATAATGCGTTTGGCGATCAACGTAAAA
TGGCAGTAGCAAATGGCACCGGAGCAGATGGTCAAATTATCCATGCTACTGGATATTATC
AAAAACACTCTATTGCAGAGTATGCAACTCCAGTAAAAGTTGGCACTAGGCATGATATTG
ATACCTCTACTGTAGGTGTTAAAGTTATCATTGAAAGAGGCGAACTCGGCGATTGTGTTG
AATTCATTAATTCTAACGGATCAATATCAGTTACTAATCCTTTGACAATTCAAGCTATTG
ATTCAATTAAAGGTGTTTCAGGTAATTTAGTAGTAACTAGCCCATATAGTAAAGTTACTT
TACGCTGTATTTCATCTGATAATTCTACGTCGGTTTGGAATTATTCTATTGAAAGTATGT
TTGGACAAAAGGAATCACCAGCTGAAGGTACATGGAATATTTCTACATCTGGATCAGTTG
ATATTCCACTATTTCATCGCACTGAATACAATATGGCTAAATTACTAGTTACATGCCAAT
CGGTAGATGGAAGAAAAATTAAAACAGCAGAAATAAATATTCTTGTGGATACTGTCAATT
CAGAGGTAATTTCTTCTGAATATGCTGTCATGCGAGTTGGGAATGAAACCGAAGAAGACG
AAATCGCTAATATTGCATTTAGTATTAAAGAAAATTACGTAACGGCGACTATAAGTTCTT
CAACTGTCGGTATGAGAGCAGCAGTTAAAGTTATCGCTACGCAGAAAATCGGGGTGGCTC
AATAATGAAACAAAATATTAATATCGGTAATGTTGTAGATGATGGTACCGGTGACTACCT
GCGTAAAGGTGGTATAAAAATAAATGAAAACTTTGATGAGCTTTATTATGAACTCGGTGA
TGGTGATGTTCCATATTCAGCCGGTGCCTGGAAAACTTATAATGCTTCATCAGGACAAAC
ATTAACAGCAGAATGGGGAAAATCATACGCTATTAATACATCTTCTGGAAGAGTGACTAT
AAATCTTCCAAAGGGTACAGTTAATGATTACAACAAGGTAATTAGAGCTAGAGACGTATT
TGCTACATGGAACGTCAACCCAGTTACACTAGTAGCTGCTTCCGGCGATACGATTAAAGG
GTCTGCAGTACCAGTTGAAATTAATGTTCAATTCAGCGATTTAGAACTAGTGTATTGTGC
CCCAGGACGTTGGGAATATGTCAAAAATAAACAAATTGACAAAATTACCAGTTCAGACAT
TAGTAATGTAGCTCGTAAAGAATTTTTAGTCGAAGTCCAAGGACAAACGGACTTTTTAGA
TGTTTTCCGTGGAACTAGTTATAATGTAAATAACATCAGAGTAAAACATCGCGGTAACGA
ATTGTATTACGGTGATGTGTTTAGCGAAAACAGCGATTTTGGCTCTCCAGGTGAAAATGA
AGGAGAACTGGTTCCTCTTGATGGATTTAATATTCGATTAAGACAGCCTTGTAATATTGG
TGACACTGTTCAAATTGAAACATTTATGGATGGTGTATCGCAGTGGAGAAGTTCATATAC
AAGACGTCAAATTAGATTGTTAGATTCAAAATTAACGTCAAAAACTTCTTTAGAAGGAAG
CATTTACGTTACTGATTTATCAACAATGAAATCAATTCCATTTTCTGCTTTTGGATTAAT
TCCAGGAGAACCTATTAATCCCAACTCTCTTGAGGTTCGTTTTAATGGGATTTTGCAGGA
ATTGGCTGGAACAGTTGGAATGCCATTATTTCATTGTGTTGGTGCCGATTCAGACGATGA
AGTAGAATGCTCTGTTTTAGGTGGAACTTGGGAACAATCTCATACCGATTATTCAGTTGA
AACTGATGAAAACGGCATACCGGAAATTTTACATTTCGATAGAGTATTTGAGCATGGTGA
CATTATCAATATCACCTGGTTTAATAATGATTTGGGTACATTATTAACAAAAGATGAGAT
TATTGATGAAACTGATAATCTCTATGTATCGCAAGGACCAGGGGTAGATATTTCCGGTGA
TGTAAATTTAACAGACTTCGATAAAATTGGTTGGCCAAATGTAGAAGCGGTTCAATCTTA
TCAACGCGAATTTAATGCTGTTTCAAATATCTTTGATACGATTTATCCTATTGGAACTAT
ATATGAAAACGCTGTTAATCCAAACAACCCTGTTACATATATGGGATTCGGCTCATGGAA
ATTATTTGGGCAAGGAAAAGTTTTAGTTGGATGGAATGAAGATATTTCGGACCCTAACTT
TGCTCTAAATAACAACGATTTAGATTCGGGTGGAAATCCTTCACATACTGCAGGTGGAAC
AGGCGGTTCTACTTCTGTTACATTGGAAAATGCTAATCTTCCTGCAACTGAAACAGATGA
AGAAGTTCTAATAGTTGATGAAAATGGATCAGTCATTGTTGGTGGGTGTCAATACGATCC
AGATGAATCCGGTCCAATTTACACTAAATACCGTGAAGCTAAAGCATCTACTAACTCTAC
TCACACTCCGCCAACATCAATAACTAACATTCAACCATATATTACAGTTTATCGTTGGAT
AAGGATTGCATAATGAGTTTACTTAATAATAAAGCGGGAGTTATTTCCCGCTTAGCCGAT
TTTCTTGGTTTTAGACCTAAAGCTGGTAATATAGATGTAATGAATCGTCAATCAGTTGGG
TCAGTGACAATTTCTCAATTAGCGAAAGGATTCTATGAACCAAACGTAGAATCAGCTATT
AATGATGTTCATAATTTTTCTATAAAAGACATTGGTACAATTATTACTAATAAAACTGGT
GTTTCTCCTGAGGGTGTTTCTCAAACTGATTATTGGGCATTTTCTGGAACTGTAACAGAC
GATTCTCTTCCTCCGGGTTCTCCTGTCACAGTATTAGTATTTGGTCTTCCAGTTTCAGCA
ACAACTGGAATGACGGCAATTGAGTTTGTTGCAAAAGTTCGTGTTGCCCTTCAAGAAGCT
ATTGCGTCATTTACTGCTATCAACTCATATAAAGACCATCCGACAGATGGTAGTAAATTA
GAAGTTACTTATTTAGATAATCAAAAACATGTATTAAGCACATATTCTACATATGGAATA
ACTATTTCACAGGAAATTATTTCTGAGTCTAAACCTGGCTACGGTACATGGAATTTATTA
GGCGCACAAACTGTAACTTTAGATAATCAGCAGACTCCTACAGTACTTTATCATTTTGAG
AGAACAGCATGAGTAATAATACATATCAACACGTTTCTAATGAATCTCGTTATGTAAAAT
TTGATCCAACTGGTACAAATTTTCCGGAAGAGATTACTGATGTTCAGGCTGCTATAGCAG
CCATTTCTCCTGCTGGCGTAAATGGAGTTCCTGATGCATCGTCAACAACAAAGGGAATTT
TATTTCTTGCCACTGAACAGGAAGTTATAGATGGAACTAATAATACCAAAGCAGTTACAC
CGGCAACGTTGGCAACAAGATTATCATATCCAAATGCTACCGAAGAAGTTTATGGACTTA
CACGTTATTCAACAGACGATGAAGCTGTAGCTGGTGTTAATAATGAATCATCTATAACTC
CGGCTAAATTTACTACAGCAATTAATCACATTTTTGATACACGAATTTCTTCTGAAAGTT
CACTTGGTGTTATTAAGTTATCATCTCTACCGCAAGCATTAGCTGGTGCAGATGATACTA
CTGCAATGACTCCATTAAAAACGCAGCAGTTAGCTATTAAATTAATTGCGCAAATTGCTC
CTTCTGAAACCACAGCTACCGAATCGGACCAAGGTGTTGTTCAATTAGCAACAGTAGCGC
AGGTTCGTCAGGGAACTTTAAGAGAAGGCTATGCAATTTCTCCTTATACGTTTATGAATT
CATCTGCTACTGAAGAATATAAAGGCGTAATTAAATTAGGAACACAATCAGAAGTTAACT
CGAATAATGCTTCTGTTGCTGTTACTGGTGCAACTCTTAATGGTCGTGGTTCTACAACGT
CAATGAGAGGCGTAGTTAAATTAACTACAACTGCCGGCTCACAGAGTGGAGGTGATGCTT
CGTCAGCACTAGCTTGGAATGCTGACGTTATCCATCAAAGAGGCGGTCAAACTATTAATG
GAACACTCCGCATTAATAACACGCTTACAATAGCTTCAGGTGGAGCAAATATTACCGGAA
CAGTTAACATGACCGGTGGTTATATTCAAGGTAAGCGTGTCGTAACACAAAATGAAATTG
ATAGAACTATTCCTGTCGGAGCTATTATGATGTGGGCCGCTGATAGTCTTCCTAGTGATG
CTTGGCGTTTTTGCCACGGTGGAACTGTTTCAGCATCAGATTGTCCATTATATGCTTCTA
GAATTGGAACAAGATATGGCGGAAGTTCATCAAATCCTGGATTACCTGATATGCGTGGTC
TTTTTGTTCGCGGCTCTGGTCGTGGCTCTCACTTAACAAATCCAAATGTTAATGGTAATG
ACCAGTTTGGTAAGCCTAGATTAGGTGTAGGTTGTACTGGTGGATATGTTGGTGAAGTAC
AGAAACAACAGATGTCTTATCATAAACATGCTGGCGGATTTGGTGAGCATGATGATTCTG
GAGCATTCGGTAATACCCGTAGATCAAATTTTGTCGGTACACGTAAAGGACTTGACTGGG
ATAACCGTTCATACTTCACCAATGACGGATACGAAATTGACCCGGCATCACAACGAAATT
CCAAATATACATTAAATCGTCCTGAATTAATTGGAAATGAAACACGTCCATGGAACATTT
CTTTAAACTACATAATTAAGGTAAAAGAATGACAGATATTGTACTGAATGACTTACCATT
CGTTGACGGCCCTCCTGCGGAGGGCCAGAGCCGCATTTCCTGGATTAAAAACGGCGAAGA
AATATTAGGAGCTGACACACAGTATGGAAGCGAAGGTTCAATGAATAGACCTACAGTTTC
TGTACTAAGAAATGTTGAAGTTCTTGATAAAAACATTGGAATACTTAAAACATCTTTAGA
AACCGCAAATAGTGATATTAAAACCATCCAGGGCATCTTAGATGTATCTGGTGATATAGA
AGCTTTAGCACAAATAAGTATCAATAAAAAGGATATTTCTGACCTCAAAACGCTAACCAG
TGAACATACAGAAATATTAAATGGAACTAATAGTACAGTTGACAACATTCTTGCTGATAT
TGGTCCATTTAACTCCGAGGCCAACTCTGTATACAGAACGATCAGAAATGATTTACTGTG
GATAAAGCGTGAACTTGGACAATACACTGGTCAAGATATTAATGGTCTTCCTGTTGTAGG
AAATCCTAGTAGTGGAATGAAGCATCGCATTATTAATAATACTGATGTCATTACTTCGCA
GGGAATACGTTTAAGTGAATTAGAAACAAAATTTATTGAATCTGATGTAGGTTCTTTGAC
CATTGAAGTTGGTAATCTTCGCGAAGAGCTTGGACCGAAACCACCGTCTTTTTCACAAAA
CATTTACAGCCGCTTAAATGAAATTGACACTAAACAGACAACAGTTGAGTCTGACATTAG
TGCTATTAAGACCTCAATAGGATATCCAGGAAATAATTCGATTATTACGAGTGTTAATAC
AAACACTGATAATATTGCATCTATTAATTTAGAGCTAAATCAAAGTGGAGGTATTAAACA
GCGTTTAACCGTTATTGAAACTTCTATTGGTTCAGATGATATTCCTTCGAGTATTAAAGG
CCAAATCAAAGATAATACAACTTCAATCGAATCTTTAAATGGAATCGTCGGTGAAAACAC
TTCATCTGGTTTAAGAGCGAATGTTTCGTGGTTAAACCAAATTGTTGGAACTGATTCTAG
CGGTGGACAACCTTCTCCTCCTGGGTCTCTTTTAAACCGAGTTTCTACAATTGAAACTTC
TGTTTCAGGCTTGAATAACGATGTTCAAAACCTACAAGTAGAGATTGGTAATAACAGCAC
AGGAATTAAAGGACAAGTTGTAGCGTTAAATACTTTAGTAAATGGAACTAATCCAAACGG
TTCAACTGTTGAAGAACGCGGATTAACCAATTCAATAAAAGCTAACGAAACTAACATTGC
ATCAGTTACACAAGAAGTGAATACAGCTAAAGGCAATATATCTTCTTTACAAGACGATGT
TCAAGCTCTCCAAGAAGCCGGTTATATTCCTGAAGCTCCAAAAGATGGCCAAGCTTACGT
TCGTAAAGACGGCGAATGGGTATTGCTTTCTACCTTTTTATCACCAGCATAACATGGGGC
CGCAAGGCCCCAAAGGATTTTAAATGTCAGGATATAATTCTCAGAATCCAAAGGAACTCA
AAGATGTCATTCTAAGACGTTTAGGGGCTCCAATTATTAATGTTGAGTTAACACCCGATC
AAATTTACGATTGTATCCAGCGTGCCCTAGAATTATACGGTGAATACCATTTTGATGGAC
TTAACAAAGGTTTTCACGTATTTTACGTAGGGGACGATGAAGAAAAGTATAAAACTGGAG
TCTTCGATTTAAGAGGTTCTAACGTATTTGCAGTAACCCGCATTTTACGCACAAATATTG
GGTCAATAACGTCAATGGACGGAAACGCTACATATCCATGGTTTACTGACTTTCTTTTAG
GAATGGCTGGTATTAATGGCGGAATGGGAACGTCTTGTAATAGATTTTATGGACCAAATG
CCTTTGGTGCCGATTTGGGGTATTTTACTCAACTTACCAGTTATATGGGAATGATGCAAG
ATATGCTCTCTCCTATTCCAGACTTTTGGTTTAATTCAGCAAATGAACAACTCAAAGTCA
TGGGAAACTTCCAAAAATATGATTTAATTATCATAGAAAGCTGGACTAAATCATACATTG
ATACTAATAAAATGGTTGGAAATACAGTAGGATATGGAACAGTCGGTCCACAAGATAGCT
GGTCATTATCTGAACGTTATAATAACCCAGACCACAATTTAGTGGGTCGTGTTGTTGGTC
AAGACCCAAATGTTAAGCAAGGTGCTTACAATAATCGTTGGGTGAAAGACTATGCAACAG
CTTTAGCTAAAGAATTGAATGGTCAAATTTTAGCACGCCACCAAGGTATGATGCTTCCTG
GCGGTGTTACGATTGATGGACAACGCTTAATAGAAGAAGCTCGATTAGAAAAAGAAGCAC
TGCGCGAAGAATTATACTTACTTGACCCTCCATTTGGAATTTTGGTAGGTTAATATGGCT
ACTTATGATAAAAATCTTTTTGCTAAATTGGAAAACCGCACAGGTTATTCTCAGACCAAT
GAAACTGAAATATTAAATCCTTATGTAAATTTCAATCATTATAAAAACAGCCAAATATTA
GCTGATGTATTAGTAGCTGAAAGCATTCAAATGCGAGGGGTAGAATGCTATTATGTTCCA
AGAGAGTATGTTTCCCCTGATTTGGTATTCGGCGAAGACTTAAAAAATAAATTTACTAAA
GCTTGGAAATTTGCTGCGTATTTAAATTCATTTGAAGGATATGAAGGAGCTAAATCGTTC
TTTAGTAACTTTGGTATGCAAGTACAAGACGAAGTGACTTTATCTATTAACCCAAATTTA
TTTAAGCATCAAGTTAACGGAAAAGAACCGAAAGAAGGCGATTTGATATATTTTCCTATG
GATAACAGCTTATTTGAAATTAACTGGGTTGAACCATATGATCCATTTTATCAATTAGGC
CAAAACGCTATTCGTAAAATTACAGCAGGTAAATTCATTTATTCTGGAGAAGAAATTAAT
CCAGTTCTACAGAAAAATGAAGGAATTAACATTCCAGAATTTAGTGAATTAGAACTAAAT
CCTGTTCGCAATCTTAACGGTATTCATGATATTAATATTGATCAGTATGCTGAAGTAGAT
CAAATTAATTCTGAAGCTAAAGAATATGTTGAACCTTATGTTGTTGTCAATAACAGAGGC
AAATCTTTTGAATCTAGCCCATTTGATAATGATTTCATGGATTAATAAATATTATAAACT
AATTAAAGCCCAGATTAGGAGAAATCATGTTTGGCTATTTTTATAATTCGTCTTTTAGAC
GATATGCTACCTTGATGGGCGATTTGTTTTCAAATATCCAAATCAAACGTCAGTTAGAAT
CTGGTGATAAGTTTATACGTGTTCCTATTACATATGCGTCAAAGGAACACTTTATGATGA
AATTGAATAAATGGACATCAATAAATTCACAAGAAGATGTAGCTAAAGTTGAAACTATTC
TACCTCGTATAAATTTACATTTAGTTGATTTTAGCTATAATGCTCCATTTAAAACAAACA
TTTTAAATCAGAATTTACTGCAAAAAGGTGCAACTTCTGTAGTATCGCAGTATAATCC

[0138] In another aspect, the invention provides a PG-I1 bacteriophage targeting Staphylococcus aureus. In certain embodiments, PG-I1 binds a molecule of peptidoglycan. In certain embodiments, the PG-I1 bacteriophage has a genome comprising at least one nucleic acid sequence selected from the group consisting of SEQ ID NOs: 10-12:

SEQ ID NO: 10
TCAGTGTCTACTGATTTAGAAACGTAACCTTCTACTTTCTTGCTCTCCGTTTGTAGATGT
TACTGATTTTTCTACAGCTTCTTCATCAGTGTCTACTGATTTAGAA
SEQ ID NO: 11
TTCTAAATCAGTAGACACTGAAGAACAAGCTGAAACTGGTGAAGCAAAATCAGAAGAAGC
TGAAGAAGTACAAGAAGATAACACATTTAAAGGATTAAGTCAAGAAGAACGAACTAAGTT
CATGGATTCTTACAAAGCACAAGCTAAAGACCCTAGAGCTTCTAAACATGACTTACAATC
AGCTTACCAATCTTACTTGAACATTAACACTGACCCTACTAATGCATCAGAGAAAGATAT
TAAAACTGTAAAAGACTTTGCACAAATTTAATTAATGCACAAAGTTGTGTTATATTATAC
GGTGTAACTAAAGAATATAAATAGGGTACATTTTACTGTACCCCACATAAAATAAAAAAG
AACACAAAATGAAAGGTGATAAATTTATATGACTATCGAAAAGAACCTGTCAGACGTTCA
ACAAAAGTACGCTGACCAATTCCAAGAAGACGTAGTAAAGTCATTCCAAACTGGTTATGG
AATCACTCCTGATACACAAATTGACGCAGGAGCTTTACGTAGAGAAATTTTAGATGACCA
AATCACAATGTTAACATGGACTAATGAAGACTTAATCTTCTATCGTGATATCTCACGCCG
TCCTGCTCAATCTACAGTAGTAAATACGACCAATATTTACGTCATGGTAACGTAGGTCAC
TCTCGTTTCGTTAAAGAAATCGGAGTAGCACCAGTATCTGACCCAAATATCCGTCAAAAA
ACTGTATCAATGAAATACGTTTCTGATACTAAAAATATGTCAATTGCATCAGGTTTAGTA
AATAACATTGCTGACCCATCACAAATCCTTACAGAAGATGCTATCGCAGTTGTTGCAAAA
CAATTGAGTGGGCTTCATTCTACGGTGACGCTTCATTAACTTCTGAAGTTGAAGGTGAAG
GTCTAGAGTTTGATGGTTTAGCTAAATTAATTGACAAAAATAACGTAATTAACGCTAAAG
GTAATCAATTAACTGAGAAACACTTAAATGAGGCGGCGGTACGTATCGGTAAAGGTTTCG
GTACAGCTACAGATGCTTACATGCCTATCGGTGTACACGCAGACTTCGTTAACTCAATCT
TAGGTCGTCAAATGCAATTAATGCAAGACAACAGCGGTAACGTTAACACTGGTTACAGCG
TAAATGGTTTCTACTCATCTCGTGGATTCATTAAATTACATGGTTCTACAGTAATGGAAA
ATGAACTAATCTTAGATGAATCATTACAACCATTACCAAATGCTCCACAACCTGCTAAAG
TTACAGCTACTGTTGAAACTAAGCAAAAGGTGCTTTTGAAAAATGAAGAAGACCGTGCAG
GATTATCATATAAAGTAGTAGTTAACTCAGATGACGCTCAATCAGCTCCTTCTGAAGAAG
TAACAGCTACAGTATCTAACGTAGACGATGGTGTTAAACTTTCAATTAATGTTAACGCTA
TGTACCAACAACAACCACAATTCGTTTCTATCTACCGTCAAGGTAAAGAAACAGGTATGT
ACTTCCTAATCAAACGTGTACCAGTTAAAGATGCACAAGAAGACGGAACAATCGTATTCG
TAGATAAGAACGAAACATTGCCTGAAACAGCAGACGTATTTGTTGGTGAAATGTCACCAC
AAGTAGTTCACTTATTCGAATTACTTCCAATGATGAAATTACCATTAGCTCAAATTAATG
CTTCTATTACATTTGCAGTATTATGGTATGGTGCATTAGCATTACGATGCTCTAAAAAAA
TGGGCTCGTATTAAAACGTTCGTTATATCGCAGTTTAATAGAATAAGAAAAACTGAATAC
AAGAGAATAGGGATAAACTTAGGGTTTATCCCTTTTTTATTAAATAAACTTGAAGGGATT
TAATAAATATGTTATACTATAAGAAACTATTAGATAAAAAAATGGCTACTGTTTATGGTA
CAGTGGAGATTGACAAAGATGGAGTAGTCAAAGGATTAACCAAGAACAAGAAAAGAATTT
GCCAATGTTCCAGGTTTTGAATTTGAAGAAGAAAAGAAAACTACTAGAAAACAATCAGCT
TCTACTAGTAAAGAAGAAGAGCCTAAGGAAGAGGAAAAGCCTCTACTAGAAAAACTACAA
ATACTACTAGAAAATCTACAGCACGTAAAACAACAGCCAAAAAAAAGATGAAAATAAGTA
AAGGGTGAATTAAATGGTTAACTCAATGTTTGGAGGGGACTTAGACCCTTATGAAAATCA
TTAAACTATGAATATCCTTATCATCCTAGTGGTAATCCTAAACACATAGATGTAAGTGAG
ATAGATAATTTAACATTAGCTGATTATGGATGGTCACCGGATGCAGTTAAAGCATATATG
TTCGGTATTGTAGTTCAAAATCCTGATACAGGACAGCCTATGGGTGACGAGTTCTATAAC
CATATATTGGAAAGAGCGGTAGGTAAAGCTGAAAGAGCATTAGATATATCTATACTACCT
GACACTCAACATGAGATGAGAGATTATCATGAGACAGAGTTTAATAGTTACATGTTTGTA
CATGCTTACAGAAAACCTATATTACAGGTAGAGAACTTACAGCTACAGTTTAATGGTAGA
CCCATATATAAATACCCTGCTAACTGGTGGAAAGTAGAGCATCTAGCAGGACATGTTCAA
TTATTCCCTACAGCACTTATGCAAACAGGACAATCAATGTCATACGATGCAGTATTCAAT
GGATACCCCTCAATTAGCAGGTGTATACCCACCATCAGAGCAACATCATTTGCACCTCCT
CAAATGATACGATTAGAATATGTATCAGGTATGCTTCCACGTAAAAAGCAGGAAGAAATA
AACCTTGGGAAATGCCCCTGAGTTAGAACAGTTAGTTATAAAATATGCATTGAAAGAAAT
ATACCAAGTATGGGGTAACTTAATTATTGGTGCCGGTATTGCTAATAAAACATTAGAAGT
AGACGGTATTACAGAATAGGTACTACTCAATCAGCTATGTATGGTGGAGCTAGTGCTCAG
ATACTTCAAATAAATGAAGATATAAAGAACTATTAGATGGTTTAAGAGCTACTTTTGGAT
ATAATATGATAGGATTATAAGGAGGGTTAGAAAATGGAAAACCGTATATGATAGGGCTAA
CTCTAACCCTAATGTTATTAATAAGTCAACAACATATACTACTACAACACAAGCAGATGA
ACAAGATAAACCTAAGTATACTACTAGACTAGAGTTTGATACGATTGACATGATTAGGTT
TATTAATGACCAATTATAAAAGTACTATGGGAAGAAGCATATTTCTGTCCTTGTCTTAAT
CTGATACAGGACATCCTAGAGTGGAATTGCCCTAGATGTCATGGTAAAGGTATTGCATAT
CTACCTCCTAAAGAGACGATAATGGCAATACAGTCTCAAAGAAAGGAACTAACCAGTTAG
ATATAGGTATATTAGATACAGGTACTGCAATAGGTACCACTCAATTAGAAAGAGAATTTC
CTATAGAGACAGGTTTACTGTTCCTGAGGTATTGATGCCCCAACAAATGATTTATTTTGT
GAATAAAGATAGAATTAAAAAAGGTATACCTTTATACTACGATGTAAAGAAATAACTTAT
ATAGCCACTCAAGACGGTACAGTCTATGAAGAAGATTATGAAATCAAGAATAATAGATTG
TATTTAAATGAAAATATGAGAATCATACAGTAACTTTAAAGATACTTATGACTTTAAGAT
ATGTAGTATCAGATATACTAAAAGAAAGTCGTTATCAATATACTAAGTTTAATCAACCTA
AATCAAAATTTGAAAACTTACCTCAAAATTACTTCTTAAAAGGGAAGATGTCATTGTACT
ACAAGACCCTTATAAAGTTAATGATGGTATAGAAGAAGACCTAGAAATTCAAGTAGATGA
CCCTAAGGCTTCGGCATCTAATCCTAGTAATTTAGGTGGATTCTTCGGAGGTGCATTTAA
ATAATGCCAGTTCATGGAAAGAGACCTAATTTATTTAAAATAAAACTATAAGCAGGTAGG
TAAGAGAACAATTGATGGTATGCGTTCAGAAGTTCTTGATAAATTACAAGCAACAGCACA
GCAAGTAGAGAATACTAGTATTAAACGTATGCCTACTTATCTACAAATAACAGAGAAAAG
CTTGAAAAGAAGGAGTAGTAGACCTTAAAAAAGCTTTGCTCACTCATCTAAAAAAGAAAA
CTAGTAAAGATGGCGGATGGTATTTAACTGTACCAATCCGCATCAAAACTAGTAGAATGA
ATAACAGTACTTATCAAGATATGAGAACTTTAAAAGTAGATAAAGGAACAGGTTCAGTTT
CGAAGATAACTGATTACCTAGAAGGACGTAGGAAGAATGTAAGCCACCCTTCAATGAAGC
CTGAACCTATGACTCATAATATGACTAAAGTTAAAAGAGGAAAGCAATCTTCTTACTTTA
TATTTAGAACTGTTTCTAGTAAGTCACCTGCTAGTTCTTGGATACTTAACAGAGATAAAG
TTAATGAAGATAACTTCTCTAAAACAACTCTAAAAACTGTTAAGCAATTAATGAACTGGA
AGATGAAAAATTTAAATTAAGAGGAGGGTTAGTATTAAATGGCAATAACATCAGTTGATT
CATATTTATTATCAGAAATAAAGCCTAGACTTAACACTGTGCTAGAAATTGTTATATTAT
AGATGAAGTTTTAAAGACTTTGATTATCAAACTAGAGAGAGCTTTAAAGAAGCTTTCTGG
TAGAAATGCACAACATGAAGTAACGGTAGGATTTAACTTCCCAAAATTTAAAATAACTAT
GAAGCTCATTACTTTGACAGCCAATTAGGTCAAGGACAAGAGACAAAAAACTCTTTAGAA
GGTATTCAGTCATCTTACTTTGAGGCAACAGGAGATACTTTAATGAATCTTCTACAGCAA
TAAGAGAAGATGATAAGTTAGTTTTACTGTTTCTAAACCAATAGGAGAGTTAATAAAGGT
AGAAGATATAGAGTTTGCTAAATACGATAATCTTCAGGTTGAAGGTAATAAGGTATCATT
TAAGTATCAAACAAATGAAGATTATGAGAACTACAATGCTAACATTATATTTACCGAAAA
GAAAAATGATTCTAAAGGTTTAGTAAAAGGATTCACAGTTGAAGAACAAGTAACAGTTGT
AGGTCTTTCATTTAATGTAGACGTTGCAAGATGTTTGGATGCTGTACTGAAAATGATTTT
AATATCTATGAGAGATAGTATAGAAGAGCAACAAACATTCCAATTACAGAATTTGTCTTT
GGTGATATTGCACCAATAATAGAAGATGGTGACTCAATGATTTTTTGGTAGACCAACAAT
TATTAAGTACACAAGTTCTCTAGATTTGGATTATACTATTACACAAGATATTAATAAACT
AACTTTTAAAGAAAGAAAGGATTGGAAGTAGGATGGCTGAAAAAAAGACACCTGAAAATA
ACACTCTAAATTTAATGGTTATGTTCATATAGATACATTCCTTGATACTGCAAAAGCCCT
TTTAATATGAAGGATTCACAAGTAGCAGGATTTAAAGCTTATATGGAAGGTAGTCATTAT
TTGTTTAGTGAGCAAGAATTCTTACCATCATTAGAGAAGTATCTAGGTAGGGAAATTAGA
TATATAATAACATTCAGATAAGGAGAATTAAATATGGCAGTAGAACCATTCCCAAGAAGA
CCTATTACCCGTCCTCATGCATCTATTGAAGTAGATACTTCAGGTATCGGTGGCTCAGCA
GGTTCAAGTGAAAAAAGTATTTTGCTTAATCGGTCAGGCTGAAGGCGGAGAACCAAATAC
AGTTTATGAATTACGTAACTATTCACAAGCTAAACGTTTATTCCGTTCAGGAGAATTACT
TGATGCAATAGAATTAGCATGGGGTTCTAACCCTAACTATACAGCAGGACGTATTTTAGC
TATGCGTATAGAAGATGCTAAACCTGCTTCAGCGGAAATTGGCGGATTAAAATAACATCT
AAAATCTACGGTAATGTTGCTAACAACATTCAAGTAGGATTAGAAAAAGAATACACTAAG
TGATTCATTACGTTTAAGAGTAATATTCAAGATGACCGTTTCAATGAGGTTTATGATAAT
ATCGGTAATATCTTCACAATCAAGTACAAGGAGAAGAAGCTAACGCAACTTTCTCTGTAG
AACATGATGAAGAAACTCAAAAAGCAAGTCGTTTAGTATTAAAAGTTGGAGACCAAGAAG
TTAAGTCATATGATTTAACTGGTGGAGCTTATGACTACACTAATGCTATTATTACAGACA
TTAATCAATTACCTGATTTCGAAGCTAAATTATCACCTTTCGGAGATAAGAACTTAGAAT
CTAGCAAATTAGATAAAATTGAAAATGCAAATATAAAAGATAAAGCTGTATATGTAAAAG
CAGTTTTGGTGACTTAGAAAAACAAACAGCTTACAATGGTATCGTATCTTTCGAGCAACT
TAATGCAGAAGGAGAAGTACCAAGTAATGTAGAGGTTGAAGCAGGAGAAGAATCAGCTAC
AGTAACTGCTACTTCACCTATTAAAACTATTGAACCGTTTGAGTTAACTAAGTTAAAAGG
CGGTACTAATGGTGAACCACCTGCTACATGGGCAGACAAGTTAGATAAATTTGCATGAAG
GCGGATACTACATTGTTCCATTATCATCTAAACAATCAGTTCATGCAGAGGTAGCTTCTT
TGTTAAAGAACGTTCTGATGCAGGAGAACCAATGAGCTATTGTTGGTGGAGGATTCAATG
AATCTAAAGAACAATTGTTCGGTAGACAAGCATCATTATCTAATCCACGAGTATCATTAG
TAGCTAACTCAGGTACTTTTGTTATGGATGATGGACGTAAAACCACGTACCTGCTTACAT
GGTAGCCGTAGCTCTAGGTGGTCTTGCAAGTGGTTTAGAAATCGGTGAATCAATCACATT
CAAACCACTACGTGTAAGTTCATTAGACCAAATCTATGAGTCAATAGACTTAGATGAATT
AAATGAAAATGGTATTATTAGTATAGAGTTTGTTCGTAACCGTACTAATACATTCTTCAG
AATCGTTGACGATGTAACTACATTCAACGATAAATCAGACCCAGTTAAGGCTGAAATGGC
TGTTGGGGAAGCTAATGACTTCTTAGTAAGTGAGCTTAAAGTTCAACTTGAAGACCAGTT
TATTGGTACTCGTACTATTAATACAAGTGCTTCAATCATTAAAGACTTTATCCAATCTTA
CTTGGGTCGTAAGAAACGTGATAATGAAATTAAAGACTTCCCTGCTGAAGACATTACAAG
TTATTGTTGAAGGTAACGAAGCAAGAATTTCAATGACAGTTTACCCAATCAGAAGCTTCA
AGAAAATCTCTGTTAGCTTGGTTTACAAGCAACAGACATTACAACCTAGTCTAGGTGACG
GAGTACCTGGATTAGGTACTCCTATTAATATAATTTGAATACTTTAGGAGAGTGAATACA
GATGGCATCAGAAGCTAAACAAACCGTCCATACTGGTAATACCGTCCTACTTATGATTAA
AGGTAAACCGGTAGGAAGAGCACAATCAGCATCAGGTCAACGTGAATACGGTACAACTGG
TGTATACGAAATCGGTTCTATCATGCCTCAAGAACACGTATACTTACGTTATGAAGGTAC
AATTACAGTAGAACGTTTACGTATGAAAAAAGAAAACTTTGCAGATTTAGGATATGCTTC
ACTTGGTGAAGAAATTTTAAGAAAGACATCATTGATATTTTAGTAGTAGATAACTTAACG
AAACAAGTTATTATCTCATATCATGGTTGCTCTGCAAATAACTACAATGAAACTTGGCAG
ACAAATGAAATTGTAACAGAAGAAATCGAGTTTAGTTACTTAACAGCAAGTGACAAAGCA
CGTACTTAATAGATTAGACCAACTAAAAGTTGGTCTTTTTATTGACACTTTAAAATTTAT
ATGTTATTATAAATATAATAATTTAAACAGGAGATGTACTAGATGGCAAATAAGAGAAAA
CAATAGGAAAAATGAGTAACACAAGAGCAACATGGAATATTAATCCGGTAACTAAAGTTA
AAAAAGATAAAACAAAATATTCTAGAAAAATAAACATAAAGGTCTTGACAATTATAATTA
ACTAAGGTATATTATTAGTATAACAAAAAAAGGAGATGGGTATATGAGTACATTTTGGTC
AGAAAGAAGAACAACTAATAAAGATAGGCAAGTTAAAAAACATTATACTCAAATGAGTAT
GTATGAAAGAAAGAAATGCAGAGTTATTACAAGAGACAATTACTGAAAATAGAATTATTA
ATTTTACACGACATAGTGCAAAAAAGGTTAAAGGTAAACCAACAACAAATATACCTAAAT
TAATAGGTTTTATTTTTTTAAAATAAGTTTGCCTACGAAAATATCATAGAGTACAATAAC
ACAGATTATAATGGTAATATTGAGAGGAGAATTGTTGTTAAACATCCTAAAGTTATAACT
GTAGAAGGAAAACCTAGCTATCAGTTTTGACAATTAGTCTTGAAGATGCTAGAGTTATTA
CGGTGTGGTATAACAGTGTAGATGATACACATAGAACACTAGATTTAAATTATTATAGTA
AAGACTTGACAATTCAATAAGGAGGTATTATAATGGGTATAACAATAGTAAATAGTTATT
TTATTCTGTCTAGCATTTTCCTCATCATATTAACCATATTAAAATGGTAAGGGTACAGTT
ACAAGGAATCATTAACTATGAGTAAAATATTAGTAGTAATAACATCAATTCAATTTTTTA
GCATGTTTAATTATTAATGGTATTTATTGGTCACTAAAATTTATGTAGTAGAACTAGAAT
AAAAGTATTGACAAATTAAAACTAATAAATTATAATAAAGGTATAACAAATTAAAGGAGA
AGATATAAAATGTCACAAGATAAATTAAGAGCAATTTACACAGAAATGAAAGTAGAATTA
CACAAATTTCCTAAAGAGGTAGATATAACAAGTAAATCAACTGCAATTGCAATCAATCAG
ATTTTAGATAAATTCAAAACATTAACAGAACAAGCAGGAAAGATTACTAGAAAATATTTA
GAAGGTCAAGAAATATTAACTATTGATTATGAGTATTATGATTCATTACAAGAATACTAT
ATTTACCTACTTAGAAATAGTGAAAAGATTGAACAAAGTTTACAAGAAATTACTAAGCGT
ACAGGTGAATATGTAAAGTAATTTTGATTTAAAAACAAAATATGATATACTATGTTTAAA
GTAGTAAGCCTACACTAGTCCGTGTTATATTAATATTGAATCGGATAAGCGTAGGCTTTA
TTAATATTTAAAAAGGAAGGTATATCATATTATGGCAGAAAGAAATTAAAAAGGAACAAG
ATGTACAAGAAACAACTAAAGAAGAAAAAAAAGATGTTAGTAAAATGACACCGGAAGAAA
TAGATAAATTAAAATATCAAGACAAACAAGAAAAGAACAAGTTATTAACAAAGTTATTAA
AGGCGTTAATGATACTTGGGAAAAGAATATAACTTTGAAGAACTAGACTTAAGATTTAAA
GTTAAGATTAAATTACCTAATGCACGAGAACAAGGTAATATCTTTGCGTTACGTTCTGCT
TACTTAGGTGGTATGGATATGTACCAAACAGACCAAGTGATTAGAGCATATCAAATGTTA
GCTACCTTACAGGAAGTAGGTATTGAAGTTCCTAAGGAATTCCAAGACCCTGACGATATT
TATAACTTATATCCTTTAACTGTTATGTATGAAGATTGCCAGGATTCTTAAACTCCTTTC
GTTACTAATAGTATAGAAACATTAGATAAAGATATAGAACGATTGGGCGGTATGGAATCA
ATTGTTAAACAACCTTTATCTAGAAATCTATGGGCTATTATGAAAGAGTTTAATGTTTTA
CCTACCGAGCAAAGATTTAAGGACTTAGACGATTATCAGATAGAGTTTATTATTGGGAAT
ATGAATAGAGATGTTTATGAACATAATAAACAACTTAAACAAGCTCAAAAGGTGGAAAAT
TCGATAGTCAATTCGAAGATGATGATAGTAGTTGGTGGAATGAATCTCATGAAGACTTTG
ACCCAGTACCTGATTTCTTAGATGCTGATGATTTAGCACAACAGATGGAAGCTAAATTAT
CCGATAGAGATAAGGAAGAAAGAGCTAAGAGAAACGATGCAGAGTTAAATGATGAAACAG
AAGGACTTACTACACAACATCTAGCTATGATGGAATACATCAGACAGAAACAACAAGAAT
TAGATGATGAAGTAGGAAATGGTAAGACTAGTGAAGATGACGCTACTATATCACAAGATA
GCGTTAATAAAGCACTAGAAGACCTAGATGATGACTGGTATATGTAAAGGGTGGTAGGTG
ATACTACCATCCTTATTTTTTTAAAATGGATGGTGAATAATGATGGCAATGAATGACGAT
TATAGATTGGTCTTGTCCGGTGATAGTTCGGATTTAGAGAATAGTCTAAAGGCAATAGAA
CTTTATATGGATTCTTTAGAGTCTAAGAATATTGATGCTCCTTTAGATAATTTCTTAAAA
AAATTAAAAGTAATTGCTAAAGAAGTTAAAATGTACAGAACGCAATGGATAAACAAGATG
GTAAATCTGTTATATCTTCTAAAGACATGGATGAATCTATTAAATCCACTCAATCTGCTA
CAAAGAATATAAATGAATTAAAGAAAGCTTTAGATGACCTTCAAAAAGAGAATATATCTA
AAGGTATTGCACCTGACCCTGAAGTTGAAAAAAGCATATGCTAAGATGGGTAAAGTTGTA
GATGAAACTCAAGAAAAACTTGAGAAAATGTCTTCACAAAAAATAGGTTCTGATGCCAGT
ATTCAAAATAGAATTAAGGAAATGAAAACCTTAAATCAAGTAACTGAAGAATACAATAAA
ATAAGTAAAGATTCTAGCGCAACTAAAGATTATACAAAACGATTAAGAGCTAATCGTAAT
ATGACTAGAGGTTACATGGAGCGTTCAGAAGGAACAGGACGATTAACATATGACCAAGGT
GCACGAGTTAGAAGTGAGCTAGGTAAAATAAGTTCTTATGAGAGCCAAAGAAAACAAAAC
CAACGTAATTTAGGACAAGCAAGAGAGCAATATAGCAACTATAGAAATCAACAACAAGAC
TTGACTAAACGTAGAGCTAGCGGTCAAATTAATAAGGAACAATATGAACAAGAGTTAGCT
TCTATTAAACAGGAAATGAAAGCTAGAGAAGAACTTATATCTAACTATGAGAAATTAGGA
GCAGAACTTGATAAAACAGTTCAGTATTATAAGGGTTCAGTTCAAAAGGATTTCCAATCT
AGAGACGTAGACCAACAAAGAGGAACATTTGGTAGAATGGTTCAAGAACGTTTGCCATCT
ATTGGTTCTCATGCTATGATGGGTACTACAGCTATGGCTACAGGTTTATACATGAAGGGT
GCCTCATTAAGTGAAACTAATAGACCGATGGTTACATCATTAGGTCAAAATTCCGATAAT
ATGGATATAGATTCTGTAAGAAATGCATATGGAGACTTGTCAATTGATAACAAATTAGGT
TATAATAGTACTGACATGTTGAAAATGGCTACTTCATATGAAGCATCAGTAGGACATAAA
AGTGATGAGGACACAATGGCAGGAACTAAACAGCTTGCTATTGGAGGACGTTCTTTAGGC
ATTAAAGACCAAGAAGCTTATCAAGAGTCTATGGGTCAAATCATGCATACCGGTGGAGTA
AATTCTGATAACATGAAGGAAATGCAAGATGCATTCTTAGGTGGTATTAAACAATCAGGC
ATGGTTGGTCGTCAAGATGAACAACTTAAAGCACTAGGTTCTATAGCGGAACAATCAGGA
GAAGGAAGAACTCTAACTAAAGACCAAATGAGTAACCTTACTGCCATGCAATCTACTTTT
GCAGAGTCAGGAAGTAAAGGATTACAAGGTGAACAAGGTGCCAATGCTATTAACAGTATA
GACCAAGGACTTAAAATGGTATGAATAGTTCTTATGCTCGTATAGCAATGGGATGGGGAA
CGCAATACCAAGGTCTTGAAGGTGGATATGATTTACAAAAAAACGTATGGATGAAGGTAT
ATCTAATCCTGAAAACTTGACAGATATGGCTGATATAGCTACTCAAATGGGTGGCAGTGA
AAAAGAACAAAAATACCTATTTAATAGAAGTATGAAAGAAATAGGCGCTAACCTAACTAT
GGAGCAATCTGATGAAATATTTAAAGATGCTCAATCCGGAAAACTATCTAAAGAAGAGTT
AGCTAAGAAAGCTAAGAAAATGGAAAAGAAGGTAAAAAAGAAGGAGAAGATAACGCCACT
GATTATAAAGAATCTAAATCAGGAAAAAATGACCAAAATAAATCGAAGACTGATGATAAA
GCAGAAGATACTTATGATATGGCTCAACCACTAAGAGATGCTCATAGTGCTTTAGCAGGT
CTTCCTGCCCCTATATATTTAGCTATAGAGCTATAGGAGCATTTACAGCTTCACTAATTG
CATCTGCAAAGTCAATTTGGAGCAGGTCACTTAATTGGTAAAGGAGCCAAAGGACTTAGA
AATAAATTTGGTAGAAATAAAGGCGGTAGCTCCGGTGGTAACCCTATGGCAGGTGGAATG
CCTAGTGGTGGTGGTTCACCTAAGGGTGGAGGCTCACCTAAAGGTGGGGGCACTCGTTCT
ACTGGAGGAAAAATACTTGATAGCGCTAAAGGTCTTGGAGGATTCCTAGTAGGTGGCGCA
GGATGGAAAGGTATGTTTGGCGGGGAGTCTAAAGGTAAAGGCTTTAAACAAACATCTAAA
GAAGCCTGGTCAGGTACTAGAAAAGTATTTAATAGAGATAATGGTAGAAAAGCCATGGAT
AAATCTAAAGATATAGCTAAAGGTACCGGTAGTGGTCTTAAAGATATCTATAATGATAGT
ATATTTGGTAAAGAAAGAAGACAAAACCTAGGAGAAAAAAGCTAAAGGTTTTGGTGGCAA
AGCTAAGGGTCTCTATGGTAAGTTTGCTGATAAGTTTGGTGACGGAGGTAAAAATGGTAT
TCTTTCACAATCACCAAAAGCAGGTGGAAGTGGCATAGGGAAACTTGGAAAACTTGCAGG
TGGACTTGGAAAAGGAGCCGGAGTTTTAGGTGTTGCTACGTCTGCCTTATCATTAATACC
TGCTTTAGCTTCCGGAGATAGTAAAGCTATCGGCGGAGGAATAGGCTCTATGGGTGGAGG
AATGGCAGGTGCATCAGCAGGAGCTTCTATAGGAGCTTTATTTGGTGGTGTAGGTGCAAT
ACCTGGAGCTTTAATAGGTGGAGCTATAGGTTCCTTCGGAGGAGGAGCTGTTGGTGAAAA
AGTCGGAGACATGGCTAAAAAAGCTAACACTAAAGAAGGATGGAACCTAGGATGGACTAA
CGGAGATAAGGATGGTAAGAATAAATTCCAAGATTCTTTATTAGGAAAACCTATATTCAA
AGCATGGAGCGGTATAACAGGTCTCTTTGATAATGACGCTGAAGCATCCGAAGAAGATAG
TAAAGATAAGAAAAAAAGGTGTTAAAGGCGTTAAAGGAGATACTAAGAAGAAAGAAAAAT
GACAGCAGAACAACTTAGAGAAAAGAATAACCAATCTGAAACTAAGAATCTTAAAATCTA
TAGTGATTTACTTGACAGAGCTCAGAAAATTATTGAGAGTGCTAAAGGTATTAATATAGA
TGGAGGAACTTCTGATAGTGGTTCTGATAGTGGAGGCTCTGCATCTGATGTAGGTGGAGA
AGGCGCAGAGAAGATGTACAAGTTCCTTAAAGGAAAAGGACTATCTGATAATCAGGTAGG
AGCTGTTATGGGGAACTTACAACAAGAATCTAATCTTGACCTAATGCTAAGAATGCTTCT
AGTGGAGCATTTGGTATTGCTCAGTGGTTAGGGGCTAGAAAAAACAGGATTAGAAAATTT
TGCTAAATCTAAAGGTAAAAAATCTAGTGACATGGATGTTCAATTAGATTACCTATGGAA
AGAAATGCAGTCTGATTATGAAAGCAATAATCTTAAAATGCAGGTTGGAGCAAAGGTGGA
AGCTTAGAGCAGAATACAAAAGCATTTGCTACTGGATTTGAACGTATGGGAGCAAACGAG
GCTATGATGGGTACTCGTGTTAACAATGCTAAGGAATTCAAGAAGAAATACGGAGGCTCC
GGTGGCGGAGGTGGTGGAGGAGCCCTATCCTCTACTTACCAAGAAGCCATGAGTAATCCT
GTATTAACTACTGGTTCTAATTATAGGGGCTCTAATGATGCTTCTAATGCTTCTACAACT
AACAGAATAACAGTCAATGTTAATGTTCAAGGTGGAAATAATCCTGAAGAAACTGGAGAC
ATTATCGGAGGAAGAATTAGAGAAGTTCTAGATAGTAATATGGATATCTTTGCAAATGAA
CATAAGAGAAGTTATTAGTAATTTTGTATTGACACAAGAGTAGTATCATAATATACTACT
CTTATACATATAAAAAAATAAAAGGAAGTATGTGTATATGCGTAGAATAAGAAGACCTAA
GGTAAGAATAGAAATCGTTACAGATGATAATACATTTACATTGAGATTTGAAGATACACG
TGACTATAATGGTGATGAGTTTGGAGCTAAACTTTTAGGATTCCAAACTAAAACTCTATG
GAAGATGATAGTTCAGTTTTCCAAATAAATATGGCAGGAGATACTTATTGGGATAAGCTA
GTTATGGCTAATGATATCATAAGAATATTTATTACACCTAATGATGACCCTAACGATAAA
GAAGGAAAACAAGAACGACTTATCAGGTAGGTATGGTTTCTCAAGTATCAAAGTAGGTAG
TTACGGTAATGACCAAACTCAATTTAGAATAACAGGTCAATCTTTGTAAAACCTTTTATG
AAATTTGGATTAGGCGTTATTCAGGAAGTTCAAGCTGTATTACCTGAAGTAGGTTGGCTT
ATTGATGGTGATGGAGATAATGAAGTAAAATTTACTGGTAGCTCAGCTCATGAAGTAATG
ACTGGTATTATACGTAGATTTATACCTTATATGAAATATAACTATACTGAAAAACATATA
ATACAATTGATAACTATCTTGATTATGATGATTTAAGTAGTTGGGATGAGTTTGAAAACT
TACAGAAGTTTCAGCCTTTACTAATTTTGATGGGTCATTAAAACAGTTAATGGATATGGT
AACAGCTAGACCTTTTAATGAGTTATTCTTCAAAAAATTCAGAAAAAAACACCTGGAAAG
GCTCAACTTGTATTAAGAAAGACCCCTTTAATCCTACTGAGTGGAGAGCTTTAGATATGA
TTAAAGTACCTACTGAGGATTTTATAGAAGAGGATGTAGGTAAAAGTGATGTAGAGACAT
ATTCTATATTTACAGCAACACCTGCAGGTATGTTGAAAGAGCTTAACGGTGATGTATTTT
CTAAACCACAATTCCACCCTGAATTAACTGATAGATATGGTTATACTAAATTTGAAGTAG
AAAATATTTATCTTAGTACAAAATCAGGTTCAGCTACTGAGGATTCAGATTCTTCAGGTG
ATGATAATGGCACAGAACGAGGAACTTATTCTAAAATTATGAAAGATTTAAGTAACTATG
GAAGAGATAATATATCTAAAAGGTATAGATAAGTATACAAGTAAATTATCTTCAAAATAT
AAAACTTAAAAAAAGCCCAAGCTAAAAAAATTATAGAGAAGTTTGTTAAAGAAGGAAAAG
TAACAGAAAAAGAATATGAAAAAAATAACAGGTAATAAGGTAGATGATGAATTAACATCA
GATAACAGACCGAAGTTGACAAAAGATAAATTAAAGAGTATACTAAAAGAAGTTTAAAAC
ACAAGATGATTTTAATAATTCTAAGAAAAGAAAAGCTAAGACAGATGCACTTAAAGAATT
GACAACTAAATATCGTTTTGGTAATAAAACACATGCTACAACTTTATTAGATGAATATAT
TAAATATAAAGGAGAGCCACCTAACGATGAGGCTTTTGATAAATATCTTAAAGCTATTGA
AGGTGTTAGTAATGTAGCTACAGACACAGGTTCAGATGCAAGTGATAGCCCTTTAGTTAT
GTTTTCTAGAATGCTATTTAATTGGTATCATGGTAACCCTAACTTCTATGCAGGAGATAT
TATTGTTTTAGGAGACCCTAAGTATGACCTAGGTAAAAGATTATTTATTGAAGATAAGCA
ACGAGGAGACACTTGGGAGTTCTATATTGAATCTGTAGAACATAAATTCGATTATAAACA
GGGGTATTATACAACTGTAGGAGTAACTAGAGGTTTAAAAGACGCTATTCTAGAAGATGG
TAAAGGTAGTCCGCATAGATTTGCAGGATTATGGAATCAATCATCAGACTTCATGGGAGG
TCTTATGGGTGAAGATACTTCTAAAGAACTTAAAGAAAAGGTGTAGCAGAGAAACAAAGT
AGTGGAGATAAAGATGGTGGTTCTGATAGTGGTGGAGCTCAAGATGGTGGCTCTTTAGAT
TCACTTAAAAAATATAACGGCAAACTTCCTAAGCATGACCCAAGTTTTGTTCAACCTGGT
AACCGACATTATAAGTATCAGTGTACATGGTATGCTTATAATAGAAGAGGTCAATTAGGC
ATACCTGTGCCTTTATGGGGACGCCGCCGACTGGATAGGTGGTGCTAAAGGAGCAGGTTA
TGGTGTAGGTAGAACACCTAAACAAGGTGCTTGTGTTATATGGCAAAGAAGGAGTTCAGG
AGGTAGCCCACAATATGGTCACGTAGCGTTTGTAGAGAAAGTATTAGATGGAGGTAAAAA
TATTTATCTCTGAACATAACTATGCTACCTAATGGATATGGTACTAGAACGATAGATATG
AGTTCAGCCATAGGTAAGAATGCACAATTCATTTACGATAAGAAATAAAGGAGGATAGTC
TATGGCAACAGATAAAGAAGCTAAAGATGTTATTGATAAATTTATAGACAATGTATTTAA
TTTTGATGTACTTACAAAAGAAAGAATAAAAGAAAAAAGATGAAGAAATTAAAAAAATAA
CTACAGATGATATGTATGAAAAGGTTGTGTATATACGACCTTATGTTGGAGTAATACAAA
GCCTTAACCCTCAGCATGTTCAGTATGAATCATTTTCTAATAATGGTTATGATATAGAGG
CAGAATTAAGTTTCAGGAAAGTAAGTTATTTAGTTGATAAAGGGTCTATACCTACAGATT
CTTTATCTACTTTAACAGTTCATTTAGTAGAACGAAATCAAGAACTATTAATAGATTACT
TTGATGAGATACAAGATGTGTTGTATGGAGAATATATGGAAGAAGAATATGTATTTGATG
AAGATGTACCATTAAGTACGATACTAGCATTAGACTTAAATGATAATCTTAAATCCTTAT
CAAATATAAAGTATATGTTCAAAGGTGCTCCTAAAGAGAATCCATTTGGAACAGATAAAG
ATGTTTATATAGATACTTATAACTTATTATACTGGTTATATTTAGGTGAAGATGAAGAGT
TAGCATATCCTATGAATATTAACTACTTCTTTACAGAGGGAAGATTCTTTACTATATTCG
GTAAAGGACATAAGTATAAGGTAGATGTTAGTAAATTTATAGTTGGAGATATATTATTCT
TTGGTAGAAGTGATACTAATATAGGTATTTATGTAGGAGATGGGGAGTTTATATCTATGA
TGGGTAAATTCCCCTAAAGATGAAACACCTATAGGAAAATATAAACTTGATGATTACTGG
AATGAATTTAACGGAAGAGTTATGAGATTCGATGAAGAGGTGTATATTTAATGGTAGTAA
GATTCCAATCTTCCATGGGGAGAAGTTTAAAAGAGTAGATTCGGATGATTTAAATGTAAA
AGGATTAGTTTTAGCTACAGTTAGTAAAATTAATTATAAATATCAATCAGTAGAAGTTAA
AGTTAACAATTTAACTCTAGGAAGCCGTATAGGTGATGATGGTAGCTTAGCTGTACCTTA
TCCTAAATCTTTCATAGGAAGAACACCTGAAGGAAGCGTATTCGGTACAAAACCTCTTAT
TACTGAAGGTTCTGTAGTATTAATAGGGTTTCTAAATGATGATATAAATAGTCCTATTAT
TTTAAGTGTTTATGGTGATAATGAACAAAATAAAATGATTAATACCAATCCTCTAGATGG
AGGTAAGTTTGATACAGAAAGTGTTTATAAATATAGTAGTTCACTATATGAAATTTTACC
ATCTTTAAATTATAAATATGATGATGGAGAAGGAACAAGTATTAGATCTATAATGGTAAA
TCATTTTCTCTATGACATCAGGTGAAGAAGAGAAACCTCAGGCAACAGATTTTATACTGA
ACTGAGTATCAAGATTTATTTACTTCTTATTATGGTAATAAGACATTAATTGAGCCTAGA
ATACAAAAGGCTCCTAATATGTTATTTAAACATCAAGGAGTTTTTATGATGATGGCACGC
CGGATAATCATATAACTACTTTATTTATATCTGAAAGAGGGATATAAGAGCCTCAGTTTT
AAATACAGAAACACAGAAAAGAACTACACAGGAAATGTCAAGTGATGGGTCTTATAGAGT
TATCAAACAAGATGACGATTTAATGTTGGATGAAGCTCAAGTTTGGATTGAGTATGGTAT
TAGTGAAGATAATAAATTTTATATTAAAAATGACAAGCATAAATTTGAATTTACTGATGA
GGGAATCTATATAGATGATAAACCTATGTTAGAAAACTTAGATGAGAGTATAGCAGAGGC
TATGAAGAATTTGAATGAAATACAAAAAAGAACTCGATGATATAAACTACCTTCGAGGGT
GTAGGTAAAGACAATTTAGAAGAATTAATAGAGTCTACAAAAGAGTCTATAGAAGCTTCT
AAAAAAGCAACTTCAGATGTCAATAGACTTACAACTCAGATAGCAGAAGTGAGTGGTAGA
ACTGAAGGTATTATAACACAGTTCCAAAAAAATTTAGAGATGAGACTTTTAAAGATTTTT
ATGAAGATGCTTCTGTTATTAATGAAGTAAATCAGAATTTCCCTACTATGAAAACAGATG
TTAAGACCTTAAAGACTAAAGTTGATAACCTAGAGAAAACTGAAATACCAAATATTAAAA
CTAGATTAACAGAACTAGAGAACAATAATAACAATGCTGATAAAATAATCTCAGATAGAG
GAGAACATATAGGTGCTATGATACAGTTAGAGTGAAAAATGTCACAGTACCTATGAGAAA
ATATATGCCAATACCATGGAGCAAAGTTACTTATAATAATGCAGAGTTTTGGGATTCCTA
ATAATCCTACTCGATTAGTAGTACCCTAAAAGGAATAACAAAAGTAAGAGTTGCAGGTAA
TGTTTTGTGGGACCCCTAACGCCACAGGACAACGTATGTTGAGAATATTGAAAATGGTAC
TTATAGTATAGGATTACCTTATACAAGAGATGTAGCTATATCTACAGCACCTCAGAATGG
TACTAGTGGAGTTATTCCTGTTAAAGAAGGAGATTACTTTGAGTTTGAAGCTTTCCAAGA
CTCAGAAGGTGACAGACAATTCAGAGCAGACCCTTATACATGGCTTAGTATTGAAGCTAT
AGAATTAGAAACTGAAACTATGGAGAAAGACTTTATGCTTATAGGACATAGAGGAGCAAA
CTGGATACACAGATGAGCACACGATAAAAGGATATCAAATGGCTTTAGATAAAGGTGCAG
ATTATATAGAATTGATTTACAATTAACAAAAGATAATAAGTTATTGTGTATGCATGATTC
TACTATATAGACAGAACAACAACAGGAACAGGTAAGGTAGGAGATATGACCTTATCTTAT
ATACAACCAATCCTTACATCTCTCAATGGTGAGCCGATACCATCTCTTGATGATGTACTA
AATCATTTTGGAACAAAAGTTAAATATTATATAGAAACTAAACGTCCGTTTGATGCTAAT
ATGGATAGAGAATTATTAACTCAATTAAAAGCAAAAGGATTAATAGGAATAGGTTCAGAG
ATTCCAAGTAATTATTCAATCATTTGCTAGAGAATCTTTAATTAATATTCATAATCAATT
CTCTAATATACCTTTAGCTACCTAACAAGTACATTTTCTGAAAGTGAAATGGATGATTGT
TTAAGTTATGGTTTTATGCTATTGCGCCTAAATATACAACTATAACTAAAGAATTAGTAG
ATTTAGCTCATAGTAAAGGGCTTAAAGTCCATGCATGGACGGTAAACACAAAGAAGAAAT
GCAAAGCTTAATACAAATGGGTGTAGATGGATTCTTTACAAACTACCTAGATGAATATAA
AAGATTTAATATTAAAGACCTATTAATTTAGGTCTTTTTTTTTAGTTGTAATTTAAACTA
GTTCGTGATATATTAGTAGTATGAGATTTATATACATGCTGAAAAGGAGAGGATAAAATG
CCACAATCAGATGGAATAAGTAATCTTCATAGAATAGCTTTACGCTTCCCTAAAGAAGGC
GGTGGTTATGATATGTATAGATTTAAAGTTAACCCTGAGAACTACACAATAGATTCACCA
CAACGTACGACAGCAATTAAAACAAAATCAGATATTGTAATAGAAGATTATGGTAAAGAC
ATAGAAGTTATTAACTTCACAGGTACAACTGGTTTTAGACCTGTTAGAGAAGCAGATGGA
TTAAAACAGGTAAGCAGAAAATGGAAGAGTTACAAAGTAGAGTTAGTGAATATGCTATGC
AAGGTGGCAGTGGTAATGTAAGTGGTTCTTACTTACAATTTTTTAACTTTACAGATGATA
GTTATTATAAAGTTCATTTAGCTCCTCAGGGGTTAAAGATAACTAGGTCTAAAGATGAAC
CATTACTTTTTAGATATGAAATAACATTAGTAGTTATTGGTTCATTAACAGAAGCAGATA
GAAGTGCTGTAACAACAGAAGAGTTTGGTAACGTTAAACCTAATGCTTCTCAAAGAGTAG
ATGAGGGTATAAAAGAATTAGATAAAATGCTCGTAAAACGAGAGATAGAAACAATCAAGA
AATATCTAGAAGAGAAAATACAATACCTAAATCTACAGGAGATAATACGAACGAGGGTAA
TAGACTTAAGCAAAGCTTCCCTAGTTCTATATATAATCCTAGACAATCTACTAACGGATT
AAAAGGTAATATTGACAATATGGCGCTGATAATAGGTTACGGTGATGGAGGTGTATCTAG
CTAATGAATAATTTTATACCACAACCTCAAGGTCTACTTAGATTTTAAATGCCCTAGATA
CAGATTTAACTTCTTCTCATATGAATTTACTGGATGAAGAGGTATCATTTGTATCTAAAT
TTTATACACCACAGCTACAATTAAGTGAATTAGCAAAAAAAGTATTGACAAATATAAAGA
CAGATGATATACCTGTATTAGAAAGAGAATTTAATGATAATACAATTATCCATAAAGCTA
ACGATACATTACTAAAGTACAGGCTCCAAGAATGTATATGATTCTACAGTCGATTGTACT
TGAAGCATATGCTATTGTTAATTGCTTTGTAGAAAATCCGAGCTCTTTAAAATACTTAAC
TGAAGAAGATGTTAGTATAACACGGAAAATTTTAAATTATGTAGCTGACTACTTAGGTAA
CTATGATGACTATAATAGTGTTGTCTTAGACTTAAGAGATTTAGACTTATGTTTTAGTGC
TATAGAATTACAATTACCTCTAATCAAAAGGAGGCTAACGTATAATGAGATTTAAGAAGC
ACGTAGTTCAACATGAAGAAACGATGCAAGCAATAGCACAGAGATACTATGGTGATGTGA
GTTATTGATAGACCTAGTAGAGCATAATAATTTAAAGTACCCTATTTAGTAGAAACTGAT
GAAGAAAAAATGAAAGACCCTGAACGATTGGCTTCTACAGGTGATACACTGATTATACCT
ATAGAATCTGATTTAACAGATGTATCAGCAAAGAAATTAATTCTAGAGATAAAGATGTAC
TAGTTGAATTAGCTTTAGGAAGAGATTTAAATATTACTGCAGATGAAAAGTATTTTAATG
AACATGGTACTAGTGATAATATACTAGCATTCAGCACAAATGGTAATGGAGATTTAGATA
CTGTAAAAGGCATAGATAATATGAAACAGCAATTACAGGCACGTTTATTAACTCCTAGAG
GTTCTTTAATGCTACATCCTAATTACGGTTCAGATTTGCATAATTTATTTGGTCTTAATA
TACCTGAACAAGCTACATTAATAGAAATGGAAGTATTGAGAACATTAACATCAGATAATA
GAGTAAAATCTGCTAATCTAATTGATTGGAAAATTCAAGGTAATGTTTATTCAGGTCAAT
TTTCAGTGGAAATAAAATCTGTTGAAGAATCAATAAATTTTGTCTTAGGACAAGATGAGG
AAGGAATTTGCTTTATTTGAATAGGAAAGGATTAAATTATGAAAACTAGAAAATTAACTA
ACATACTATCAAAATTAATAGATAAGACAATGGCAGGTACAAGCAAGATAACAGACTTTA
CTCCTGGTTCAGCTTCTCGTTCATTATTAGAAGCTGTATCATTAGAATAGAGCAATTCTA
TATTCTAACAAAGAAAATATTGATTGGGGTATACAAGAAGGTATCATTGAAGCTTTTGAT
TTTCAAAAAGACAATCTAAAAGAGCTTATGGTGATGTTACTATTCAATTCTACCAACCCT
TAGATATGAGAATGTATATACCCGCAGGAACAACTTTTACTTCAACACGACAAGAATACC
CTCAGCAATTTGAAACATTAGTTGATTATTATGCAGAGCCTGATTCTACTGAGATTGTTG
TTGAAGTTTATTGTAAAGAAACAGGGTTGCAGGTAATGTTCCTGAAGGAACAATTAATAC
TATAGCATCAGGTTCTAGTTTGATTAGAAGTGTTAATAACGAGTATTCTTTTAATACAGG
AACTAAAGAAGAGAGCCAAGAAGACTTTAAGCGCAGATTCCACTCTTTTGTAGAATCTAG
AGGTAGAGCAACTAATAAATCAGTAAGATATGGTGCACTGCAGATACCTGATGTAGAAGG
TGTTTATGTTTATGAAGAAACAGGACATATTACAGTATTATTTGCTCATGATAGAAACGG
TAATTTATCAGATGATACCTTAAAAGAAGATATAATTGATGCTTTACAAGACTATAGACC
AGGAAGTGGTATAATGTTAGATGTTAGGTGTAGGAAAAGAAGTTAATGTTTCTGCTACAG
TAACTATATCTAATAAATCTAGAATTGGTGATACATTACAAAAAACATATCGAAAGTGTT
ATTAGAAGCTATTTAAATAATTTAAAAACTTCTGATGACCTAATAATTACAGACCTTATT
CAAGCTATAATGAATATTGATGATGTATTAATATATGATGTGTCATTTGATAACCTAGAT
GAGAACATTATAGTGCCGCCACAAAGGAATTATTAGAGCAGGAGAAATAAAAGTAGAACT
AAAGTAAAGAGAGGTGAAACTTAAGTCGTGGCTAATTTTTTAAAGAATCTTCATCCATTA
TTAAGAAGAGATAGAAATAAAAAAAGATAATCAAGACCCTAACTTTGCTCTGATAGATGC
ACTCAATGAAGAGATGAATCAAGTAGAGAAAGATGCTATAGAAAGTAAGTTACAATCTTC
TCTAAAGACATCTACCAGTGAATATTTAGATAAGTTTGGGGATTGGTTCGGAGTTTATCG
TAAGACCGATGAGAAAGATGATGTTTATAGAGCAAGAATTATAAAATATTTACTCTTGAA
AAGAGGAACTAATAATGCTATAATAGATGCTATAAAAGATTATTTAGGTAGAGATGATAT
TGATGTAAGTGTATATGAACCTTTTACAAATATTTTCTATACTAACAAATCACATTTAAA
TGGTGAAGACCACTTAATGGGATACTATTATAGATTTGCTGTTATTAATGTCTCTATAGG
TGATTATTTCCCTGTAGAGATTATAGATGTAATTAATGAATTCAAACCTGCAGGTGTAAC
TCTATATGTCACTTATGATGGGGCTTCTACTATTAGAGGTGGAGCAATTATTAAGTGGTT
AGATGGGTTACCTAAAATAGAAACATACCAAGAGTTTGATAGATTTACAGGTTATGATGA
TACATTCTATGGTCATATTAATATGAATCAAAGTAAAGATACTGATAACAGTTCATCAGA
TATTTTTTAAAACAAACCATAGCTTAATTAATAGTTTAGATGTTTTAACAGGTTCATCTA
GTGTAGGGAGACAGTATATTAACTACGGATATGTAACATCATATGTTTATAATCCAGGTA
TGACATCTTCTGTAAATCAAATAAGCGCTAGTACAAAAGGTAGAGGTCAAGAAGTACCTA
CTGACTATTATATGTATACTAGTACTAAGAATAACAATACAGTAGAACTTAGTATGCAAA
CTACTTCCGGTGTGTCTTATTTATATAATAACTTTAATTTTAGGGACTATATGAGTAAAT
ATAGACCTCAAGTAGATTTACAATCTGATGAGGCTAGAAAAGAATTGTATCTGATTATAT
AAAAGAATTAAGTATTGATTACTATCTTAGTGCTGTGATACCTCCCTGATGAAAGTATAG
AAATTAAACTACAAGTTTATGATTTTTCTATTAATAGATGGCTTACAGTATCAATTAATA
ATTTATCTTTCTATGAAAAAAATATCGGGAGCAATATAGGATATATAAAAGATTATCTAA
ACAGTGAATTAAATATGTTTACTAGGTTAGAGATAAATGCAGGTAAAAGAGATTCAGTAG
ATATTAAAGTTAATTACTTAGATTTAATGTTTTATTACTATGAACGAGGTATTTATACAA
TAAAACCGTATAAAGCATTAATAGAAAATTATTTAGATATATCTAGAGAGACTTATGTAG
AAGCATTTAAAATAGCATCATTATCTAATGGAGATATTATAACTAAAACAGGTTTTCAGC
CTATAGGGTATTTAAAACTAGTTGGTAATTATGAAAATACAATACCTAGCACAATAAATA
TAGTAGCTAAAGATACAGATAATAACCCTATAGAATCTAATGAATTAGATGTATATAATA
CAGTAGAGAATAGAAATTTATTACAATCTTATAAAGGTGTAAATACGATAGCTAGAGAAA
TAACTTCTACAAAAGAGTTTACTGTATCAGGATGGGCTAAAGAGATATACTCAACTAATT
ATCTTTCTAAAGTATTAAAACCAGGTAAAGTGTATACGTTATCTTTTGATATGGAAATAA
CAGGTAATGACCCAACTCTTAAATCTTATTCTGATAGTCATGGTATATATTTATACAGTA
ATACTAAGGGAATTGTTGTTAATGGTGTTAAATCTATGGAACGTACTATAGGTAACAAAG
TATCCGTAACTCAAACTTTTACAGCCCCTACTATTACTGACCATAGATTACTAATATATA
CTGGAAGATATACATCTGATGGTAAAGCATCAACTCCTCCAGTGTTCTTTAATACAGTTA
AAATTACGGAATTAAAATTGACTGAGGGTTCTTCTAAGCTAGAGTACTCACCTGCTCCGG
AAGATAAACCTAACGTAATAGAAAAGGAATTAAATTTAATAATATCCTAACTAATATACA
GACTTTAAGTATTAATTCGGATACTATCTTAAAAATGTAACTTTTATATTATTCTTACTA
TGGTGATAGTTGGGTAGAACTAAAGACTCTAGGAAATATTAGTACTGGAGAAACAACAGA
AACCAATAACTTAATAGATTTATATGGATTACAGACAGTAGATTATTCTAATATAAATCC
AATGTCTAAAGTATCATTACGTTCCATTTGGAATGTTAAGCTAGGTGAATTGAACAATCA
AGAAGGTTCTTTATATAATATGCCTAATGATTACTTTAATGCTGTATGGCAGGATATAGA
TAAATTATCAGATATTGAGCTAGGTTCTATGAGAATGGTTAAAGACACTGAGGGCGGAGT
ATTCGATGGAGCTACAGGTGAAATTATTAAGGCTACTCTATTTAATGTCGGTGCTTATAC
TGATTTAGATATGTTATTTATGCTTTTGACTAATTATACTGAACCGTTAACGTTAGGCTC
TAGTCGATTAATAATTGAGCTAGAAGAAGAACTACTAACATCAGAATCATTTAATGTCGA
TAATAGAATTAAAGTAATTGACTCAATATGAGGAGTTACCAAATACAAGCATTATTAAAA
ATAGTTTGTTGAAAAGTTACAGGTTCTAAATATTTAGATTACGGTTTATATGAGCCTATA
GAAGATGGTACTAGATATAAACTTATTGTCGAAGGAGAATTTAAAGATAATATAGAATTT
ATATCTTTATACAATTCTAACCCTAACTTTAATGAAACATTTATATATCCATCAGAGATA
ATTAATGGAGCTGTTGAAAAGAATTTATTGCAAAACCATCTACTGAAGACAAACCAAGGT
TAAATACAGATGTTAGAATATATATACGACCTTATGATTCAACTATCTCTAAAGTAAGAA
GAGAATTAAGGAAAGTTTAATAAATAAGTTGACAGAAAGTTAATAATATGGTATACTTAT
AAAGTAATATTTAGTGGGTATACCATGTTATATTAATAAAGAAAACAACAGATGAAAGGA
ATTAAAAATATGGCAATTGCAACGTATAATTCTCATGTTGAGTTAGCAAATATCTAGTTA
GTGTTGATTCAGTTTACTTAACAATTGAAAGAGCACACCGTGGTCTAATGAAACAAACCC
ACCGCAACCTGATGAAAATGCAACAGTATTACAGGAGGTTATTGAATAAAAAAGCTACTA
AAGTTACTTTAGTTAGACCTCTAAATCACCTGAAGATGATAATAAATTTAATTTCTTATG
GTAATGGCAAATCGTGGGTAGAAGTAACACCTGAAAAATGCTAAAGCTGAAGGCTAAATA
GGTTTTACTTAGAAAGTAGTATTGTTGGTGACGAACTACCTCTTGGAACATATAGACAAG
TAGGATTTGTTATGGACCTCTAGTAGCAAAAGTATTAGTAAATTTAACTTAGTACCTAGT
GAAGTAGAATCAACTGGAACATTATTATTCTTTGATAATAAACAATTCAAAATAGAAGTG
AGCAGACAACTGCTAAAGAAAGATTTATTGTAGAAGTTTAAAGAAAGGGAGATAATTCTA
AATGGCAATTAATTTTAAAGGTTCACCTTTATTTAGATTTGACCCGTCTAAAGATAGAAC
AAAGTATTATTTAATCCTGATAGACCTCTACAACAGGCAGAATTAAATGAAATGCAGTCT
ATAGACCAATATTATTTAAAAAATCTAGGAGACGCTATTTTAAAGACGGAGATAAACAAT
CAGGGCTTGGATTCACATTGTCTGAAGATAATGTATTGACAGTAAATCCTGGTTATGTAT
ATATCAATGGTAAAATAAGATATTACGATAATGACGATTCAGTTAAAATAACTGGCGTAG
GTAAAGAAACTATTGGTATTAAATTAACAGAACGTATTGTTACACCTGATGAAGATGCTA
GCCTATTAGACCAAACTAGTGGAGTACCAAGTTACTTCTCTAAAGGTGCAGATAGATTAG
AAGAAAAGATGTCATTAACAGTTAATGACCCGACATCAACAACTATTTATACTTTCATGG
ATGGGGATTTATATATTCAATCAACTAATGCTGAGATGGATAAAATCAACAAAGTATTAG
CTGAACGTACTTATGATGAGTCAGGTTCATATAAAGTAAATGGTTTTGAACTATTTTCAG
AAGGTAATGCTGAAGATGATGACCACGTTTCTGTAGTTGTAGATGCAGGTAAAGCCTATG
TAAAAGGTTTTAAAGTAGACAAACCCGTATCAACAAGAATTAGTGTACCTAAATCTTATG
ACTTAGGAACAGCAGAAAATGAAAGTACTATCTTTAATAAGTCTAATAACTCTATTATTT
TAGCTAATAGCCCTGTAAAAGAAATTAGACGTGTTACAGGTCAAGTACTTATTGAAAAAA
AAAGAACGAGTTACAAGAGGAGCTCAAGGTGATGGTCAAGATTTTCTTTCAAATAATACA
GCATTTGAAATTGTAAAAGTTTGGACTGAAACAAGCCCTGGAGTTACTACAAAAGAGTAT
AAACAAGGAGAAGACTTCAGATTAACAGATGGTCAAACAATTGATTGGTCACCTCAAGGT
CAAGAACCTTCAGGAGGTACTTCATACTACGTTTCTTATAAATATAACAAACGTATGGAA
GCCGGTAAGGATTATGAAGTAACAACTCAAGGTGAAGGTTAGTAAGAAATGGTACATTAA
CTTTACACCTTCAAATGGTGCTAAACCTATTGACCAAACAGTAGTATTAGTAGACTATAC
TTACTACTTGGCTCGTAAAGATTCAGTGTTTATTAATAAGTATGGTGATATTGCAATATT
ACCTGGTGAACCTAATATTATGAGATTAGTTACACCACCATTAAACACAGACCCTGAGAA
TTTACAATTAGGTACAGTTACAGTATTACCTGATTCAGATGAAGCCGTATGTATTTCATT
TGCAATCACTAGATTGTCTATGGAAGACTTACAGAAAGTTAAAACAAGAGTAGATAACTT
AGAAGGTATAACCAAGCGGTAAATGCTCTAGATGATGGTGCTATGGAAGGACAGAACCCT
CTAACATTACGTTCGGTATTCAGTGAAGGTTTCATTAGTCTTGACAAAGCAGACATTACA
CATCTGACTTCAGGTTGTATTTAGTTTTGAAGATGAAGCTACTCTAGCTTATACAGAAGC
AGTTAACCAACCTAAGATTATTCCAGGAGATACAACAGCTCATATTTGGGGTAGATTAAT
TTCAGCACCATTTACTGAGGAACGTACAATCTACCAAGGTCAAGCATCAGAAACATTAAA
TGTTAACCCTTATAATATTCCTAACAAACAAGGTGTGTTAAAATTAACACCTAGTGAGGA
TAACTGGATTGATACTGAAAATGTTACAATCACTGAACAAAAAACTAAAAAGTAACTATG
AAACGATTTTGGAGACATAATGAAAGTTACTATGGTGAGACTGAGCATTACTTGTATTCT
AACTTACAGTTAGATGCAGGACAAAAGTGGAAAGGTGAAACTTACGCTTATGATAGAGAG
CATGGTCGTACCGGTACTTTATTGGAATCAGGAGGACAACGTACTCTAGAAGAAATGATT
GAATTCATTAGAATCAGAGATGTATCCTTCGAAGTTAAAGGACTAAACCCTAATGATAAT
AATTTATATTTATTATTTGATGGGTAAGATGTGCTATAACACCTGCAACTGGCTATAGAA
AAGGCTCTGAAGATGGTACGATAATGACAGATGCTAAAGGAACAGCTAAAGGTAAGTTTA
CTATTCCTGCAGGTATTCGTTGTGGTAACCGAGAAGTTACACTTAAGAATGCTAACTCTA
CAAGTGCTACAACTTACGGCCAAGGACGTAAAACCGCTCAAGATATTATTATCAGAACTC
GTGTAACAGTAAACAGTAGACCGTTAGCACAATCATTCCAATATGATGAGAATAGAACTA
TATCATCATTAGGATTATACTTTGCTTCTAAAGGTGATAAACAATCTAATGTTGTTATCA
AATTAAGTATGGGTGACCAAGGTTATCTAATAAAACAATCTATGCAGAAACAGTTATGAA
TGCTGATGATATTAAAGTATCTAATAATGCTAGTGCTGAAACTAGAGTATACTTTGATGA
CCTATGATGGCTGAAGGCGGTAAGGAGTACGCTATTGTTATTATTACTGAGAACAGTGAT
TATACAATGTGGGTAGGTACTAGAACTAAGCCTAAAATTGATAAACCTAATGAGGTTATT
TCAGGTAATCCATACCTACAAGGTGTATTATTCAGTTCATCAAACGCATCAACATGGACT
CCTCACCAAAACTCTGACCTTAAATTTGGTATTTATACTTCTAAATTTAATGAGACAGCA
ACGATTGAATTCGAACCAATTAAAGATGTATCAGCGGATAGAATAGTTCTTATGTCTACG
TACTTAACTCCTGAGAGAACAGGATGTACGTGGGAAATGAAATTAATTCTAGATGATATG
GCATCTTCTACAACATTCGACCAATTGAAATGGGAGCCTATCGGTAACTATCAAGACTTA
GATGTTTAGGTCTAGCAAGACAAGTTAAGTTAAGAGCAACTTTCGAATCTAATAGATATA
TCTCACCATTAATGAGCTCTAGTGATTTAACATTCACTACATTCTTAACAGAGTTAACAG
GTTCATATGTTGGTAGAGCTATTGATATGACAGAGGCTCCCTTGTACGGTAAGACTGGGG
TTGCTTGACTTTCTTACCTAAAAGGTACTAAGGATTCCTAAGTATTCTGCGGATGATGGA
AAAACTTGGAAAACATTTACCTAAATCCCCTACAGCTACTAGAGCCAATAATGAGTTTAT
TAATGTTATGTCATTGACGAGAAAGTAAAATCATCAGGAACAAATACTAAACTACAAGTT
AGATTAGATTTATCAACTGAAAATAGCTTTTTTACGTCCTCTCGTGTTCGTAGACTTATG
GTTACTACTAGGGATGAATAAACTAGAGGGTTGATTGACCCCTTTATTTAATAAGGAGAG
ATTTATATGCCTAGAGAAGTTAGAGACCCTTATTCTCAAGCTAAATTATTTATACCTACA
GTTGAGGAAAAAACCAATTAAGGAATTAGAAAACATACAAAGAAAAAAATTGATGAAGCT
ACTAAGTTAATCAATGAATTAAAGAAAGAGAGAGGAGAAAAATAGATGGCATTTAACTAC
ACGCCTCTTACTGAAACACAGAAGTTAAAAGATATGTATCCTAAAGTTAATGATATAGGT
AACTTTTAAAACAGAAGTTAACCTTAGTGATGTAAAACAGATATCACAACCCGACTTTAA
TAATATTTTAGCATCTATACCTGATAGTGGTAACTATTATGTAACTAATTCAAAAGGTGC
TCCTAGTGGAGAAGCTACAGCAGGATTTGTAAGATTGATAAAAGAAATGTAAATTATTAT
AATTTAATATTCACCATAGCAGTAACAAAATGTATATCAAGACTTCTTATGCTAATGGTA
CTGTGGTATATGATTGGATTAGTTTTTTAAATTAGATGACAGAAGCTTATACAATGAAGG
TAATACTTTGAATGTAAAGACACTGAATCCACAACTCAATATGCAACACTGATTAATCCT
CAAAGAACTTAAGCTGGGTTGGGTTAATTACAAAGAAGTAAAAATGGTGTTTCTTCTTTG
ATGAATTTAACCCGGTTAACTCCACTTCAACTTTTAAGATGATAAGAAAGTTACCAGTAC
AAGAACAAAAGCCTAACTTATTGAAAGATAGTTTATTTGTTTATCCTGAAACTAGCTATT
CTAATATTAAAACAGATAACTGGGATACGCCTCCATTTTGGGGATATTCTTCTAATAGTG
GTCGTTCAGGAGTTAGATTTAGAGGAGAGAATACAGTACAGATAGATGATGGGTCTGATA
CGTACCCTTCAGTAGTTTCTAATAGGTTTAAAATGGGTAAAGAACTTTCTGTAGGTGATA
CTGTAACGGTATCAGTATATGCTAAAATTAATGACCCTGTTTTACTTAAAGATAACTTAG
TTTACTTTGAATTAGCAGGATACGATACTGTAGATGATACTAGTAAAAAATCCCATACAG
GAGGACGTAGAGAAATAACAGCAAGTGAGATAACAACTGAGTGGAAAAATACTCTTTCAC
ATTCACTATACCTGAAAATACAATCGGAGCATCAGGCGTTAAAGTTAATTACGTATCTTT
ACTACTAAGAATGAATTGTTCATCTAGTAAAGGTAATGGTGCTGTAGTATACTATGCCTT
ACCTAAATTAGAAAAAATCATCTAAAGTTACACCATTTATTACACATGAAAATGATGTTC
GTAAATATGATGAGATTTGGTCTAATTGGCAAGAATTTATTAGTAAAGATGAATTAAAGG
TCACTCCCCTGTAGATATTGAATATAATGATTATTTTAAATATCAGTGGTGGAAATCTGA
AGTTAATGAAAAGAGTTTAAAAGATTTAGCTATGACAGTACCTCAGGATATCATACATTT
TGTGTCAAGGCTGTGCCGGGACGCCTAAGGGACGTTCTATTAGAGGAACCATTCAGGTAG
ATTATGACAAAGGTGACCCATATAGAGCTAATAAGTTTGTTAAATTATTGTTTACTGACA
CAGAGGGTATTCCTTACACATTATATTATGGTGGTTATAACCAGGGTTGGAAACCCTTAA
AGCAATCAGAAACTTCTACTTTACTATGGAAGGTACTTTAGATTTTGGGTCTACGGAAGC
TGTTAACTTAAATGACTCATTAGATAATTACGATTTAGTGAGGTAACTTATTGGACTCGT
TCAGCAGGACATTTTCTACAAAAGATTAGATATAAAAAATACATCAAGTTTACTGTATAT
TAGAGATTTTAATATTTCAAATGATAGTAAAGGTTCTAGTGTAGACTTTTTTGAAGGGTA
TTGCACTTTTCCTACTAGAACATCAGTACAACCTGGTATGGTAAAATCTATAACTTTAGA
CGGGTCTACAAATACAACAAAAGTAGCATCATGGAATGAAAAGGAACGATATAAGGTATA
CAATATTATGGGAATTAATAGAGGATAAAGAAAGATTGAGTCAAAAAAAACTATGGCTGT
TAAATATGATATAGGTAATAATGAGATAGTATTAATATTTAAGAGAAGGTAAATATATAA
CAGGGTTTACAACAGTAGGAGGGTATGATAAGGAGTTAGGACAAGTAAAAGTTAATAGAA
ATCTTACCTGCTTACTTCTTTGATAATTTTGCCTATGAAAGATATTTGTATTATAGTAAA
CCTGAAGAGGTTATAGAAAATAAAACTATGTACCACCACAAATCAATGATGATGATGAGG
AATCCCAACAAATTACTGTACCTAAAGAACAATATGATAGTTTAAAAGAAGAACTAGAGC
TTATGAGAAAACAACAAGAAGCTATGATGGAAATGCTTCAAAAGCTCTTAGGTCAAAAGG
GGTAATTATAAATGGCGGTAAATTTTACTACAATAACGGAAAAGGCAATGGTATTAGAGA
CCTGACTACTCAGGTCAATAACATTGGAGAAGAATTAACAAAGAAAGAAATATATTTGAC
ATTACCGATGATTTAGTTTATAATTTTAATAAATCACAGAAAATTAAACTAACTGATGAT
AAAGGATTAACTAAATCTTAGAAACATAACAGCCCTTAGAGATATAAAGAACCTGGTTAT
TACTATATAGGTGCTAGAACATTAGCAACATTATTAGATAGATCCCGATATGGAATCTCT
GATGTTGTTTTACATGTAGTACCTCTTGATACTTCTAGTAAGGTAGTTCAACATTTATAT
AATAATTCATCTACTAACAATAACCAAATTAAAATGTTATATAGATTTGTCTCAGGAAAC
TCTAGTTCAGAATGGCAATTTATTCAAGGATTACCTAGTAATAAAAAATGTTGTTATATC
AGGAACTAATATTTTAGATATAGCTTCACCAGGTGTTTACTTTGTTATGGGAATGACAGA
GGAATGCCTAGTGGAGTAAGCTCCGGATTTTTAGACTTAAGTGTAGATAATGATAATAGA
TTAGCTAGACTAACTGATGCTGAAACCGGTAAAGAATATACTAGCATTAAGAAACCTACA
GGAACATACACAGCCTGGAAAAAAAGAATTGAGCCAAAAGATATGGAGAAATATCTACTA
AGTAGTATTAGAGACGATGGTAGTGCATCATTCCCACTCCTAGTTTATACTAGTGATAGT
AAAACATTTCAACAAGCTATTATAGACCATATAGATAGAACAGGTCAAACAACCTTTACT
TTCTATGTTCAAGGCGGTGTATCCGGTTCCCCTATGTCGAATAGTTGTCGAGGGTTATTC
ATGTCAGACACACCTAATACTTCTAGTTTACATGGTGTTTACAATGCTATAGGTACAGAT
GGTAGAAATGTAACAGGTTCAGTGGTAATTGGACTTCACCAAAACATCCCCTTCTCATAA
AGAATTATGGACAGGAGCACAATCATTCTTATCTACAGGAACTACTAATAATTTATCAGA
TGATATTAGTAACTACTCTTATGTAGAAGTTTATACTACACATAAGACAACAGAGAAGAC
TAAAGGTAATGACAATACAGGAACTATATGTCATAAGTTTTATTTAGATGGTAGTGGAAC
TTACGTTTGTTCAGGTAATATTTGTTTCCGGGATAGAACCGATACAAAACCCCTATCACG
GAGTTTTATAGAGTAGGTATCTTTTAAAGGTTCTACATGGACTCTTGTAGATAGTGCAGT
ACAAAATAGTAAAACTCAATACGTTACAAGAATTATAGGTATTAATATGCCATAGACCAG
GAGAAATTTCAGTCTTTTTTTTCTTGACTTGAAAAGGATTCTGTGGTATACTATAACTCG
TGTAAGGATATAAGGAGATTAAAATGAGATTAAGAATTAAGAACTTATATACCTATGTAG
AATTTGAGGAGGATGATAAATACTTAAAAAAGATATTTTAAAGAGAGTCCATACGACTAT
AGGAGCAAGAGAAGAAGGATTTCAGTACAGCCCTGCGTACAAAAGAGGTAGTTGGATGAC
ATGTAGATTTTATGTTTATGAGGAAGATAAATTCCCCACTGGACTTTTATTTAAAATTGA
GTTATTATTAGGTGAGCTACAATCAAGGTATAATTTCCAGTTTGAAACAATTGATGAGCG
TGATGAAAGTTTCTTATCTGGAAGAAGATATTGATGATGAGATAACATTGCTTGATAATA
ATGTCGGTCAAATTACCTTAAGAGATTACCAATATGAAGCAGTGTACAATAGCTTAACAT
TTCCACAACATATTGCTCACTTAGCTACTAATGGTGGTAAAACTGAGGTTGCTAGTGGTA
TTATAGACCAATTATTACCTCAATTGATTAGAAAAAGGTGAGAGAGTAGCATTCTTCACA
GGCTCTACGGAGATATTCCATCAGTCTGCAGATAGGCCTAAGATGTTTAAATATTCCTAT
TGGTAAAGTAGGTGCAGGTAAGTTTGATGTTAAGCAGGTTACAGTTGTAATGATACCTAC
TTTAAATGCAAACAAGACTAACACAAAGGGGTAAAAGGTTACGCCTAAACAAAATATTAG
TAAAAAAAGATTGCTCAAGAGATATTACCTAAATTTGAAGGTGGAACAAATCAAAGAAAT
TACTAAAAGTATTACTTGATAACACAACACCTAAAACAAAAGTAGAACAAAATGTATTAA
GTGCCTTAGAATAATTTACCAAATAGTAAGACAGATGCAGAAGTTTTATTAAACTTAAGA
AATCATAATGCACATTTTCAAAAAATTGTTAGAGAAAGAACGAAAAGAAATATGATAAAT
ATCAAGATATGAGAGATTTTTTTAGACTCAGTTACAGTTATGATAGTTGATGAGGCACAC
CATTCTAAATCTGATTCTTGGTACAATAATTTAATGACATGTGAAAAAAGCTTTATCGAA
TTGCATTAACAGGGTCTATAGATAAAAGATGAATTACTTTGGATGAGATTGCAGGCGCTA
TTCGGTAATGTTATTGCACGAACTACTAATAAGTTTTAATTGATGAAGGTCATTCTGCTA
GACCAACAATAAATATTATACCTGTAGCTAATCCTAATGACATAGATAGAATTGATGATT
ATAGGGAAGCTTACGATAAAGGTATAACAAATAATGATTTTAGGAATAAACTTATTGCAA
AACTAACAGAAAAGTGGTATAATCAAGATAAAGGTACATTGATTATTGTAAACTTCATTG
AACATGGAGACACAATATCAGAAATGTTAAATGATTTAGATGTAGAGCATTACTTCTTAC
ATGGAGAAATAGACTCTGAAACTAGGAGAGAAAAAATTAAACGATATGAGAAGTGGTAAG
CTTAAAGTAATGATAGCTACATCACTTATTGATGAGGGTGTAGATATATCAGGTATTAAT
GCACTAATATTAGGTGCAGGAGGTAAGTCATTAAGACAAACATTGCAACGTATTGGTCGT
GCTTTACGTAAGAAAAAAAGACGATAATACAACACAAATATTTGATTTTAATGATATGAC
AAATAGATTTTTATATACTCATGCTAATGAGCGTGGGAAAGAGGTTGAAGGAAGATTTTG
AAATAAAGACTTAGGAAAATAGGAGGGTAAGAGATGGCAACAAAACACAAAGAAAGCTAT
ACCAATATCTAGAGGAAAATGCTACAGAAAATAAATTTCATATTTCTACTAAGAAAGAGC
TAGCAGATTCTCTAGGTGTTTCCATCTCTGCTTTATCCAATAACCTTAAAAAGTTAGAAG
AAGAAAATAAAGTCGTTACTGTTTCTAAAAGAGGAAAAACGGCGGGTAATAATAACTTTA
GTTAGAGAGTATGACACAGAAGAATTGAAGAATTCAATAATTCTACAGATAATATTATTA
CTTCCGATTTACAGTATGCTAAGGCATTAAGAAGAAAGCACTTCCCTTCTTATAGATATG
AGAGAAAAGAACAACGTAGACGTACTAAGATAGAAATGGCACAATACAATGCCATTAAGG
ATGAGAAGAGAAGAATTATAGCAGATATGAATTTCTATTCAGAAGGTCTTCCTTATCCTT
CTAAAGATATTTTAATATGTCCTATGACCCGAAGGGTTTTATAAAGCGTACATCTTATGT
AAAGTTATACGACCAATATGCTATTTCTCATATGGATGCTAAACATACAAGTCATCTTAA
AGCAATGAGTAAGGCAACAACTAAAGATGAATACGACTACCATCAACATATGTCTGAATA
CCATAGAAAATGATTCAAATTTACCTAGAAATAGCGTTAGTGATAATTTCTTTGGTAGTA
AAATGTTTAATACTTTTATAATTTTTATTTAAAAAATAAAGATAAAAATATTAATGTATT
TAAGTATATGCAAAATGTATTTAAAAATGTAACATTTTATTACGAGAACGGTATGCAACC
TAATCCAATACCTTCTCCTAACTTCTTTAGCTCAGATAAGTATTTTAAAACTATAATAAT
TATATTAAAGGAATAAAAAAAAGGTGTTAACAGTACTAATAGACACCTAGGTGATACAGA
CAGCATCATTAATTCATCAGACTATGTGAAAACCCTGCTGTATTACATCTACACCAACTA
TATACTACAGGATTAAATTCTACTTTACATGATATTGATACTATGTTTGAACAAGCCTTA
GACCTTGAAAATGCCTCCTATGGATTATTTGGAGATATGAAACATATTATTTTACAGTAT
AATTCTATGATTGAAGAAGAAATTAAGAATTTACCTAGAGAAGAAAAGGATATTATTAAT
AAATATGTAAAACAATGCATAATTAATGATTATTCACCAACAAGTATTTCACCTTCTGCA
AGGTTATCAATGTTTACTATGCAGAAAGAGCATATAGTTTACAATAAGCAGTTAAATAAA
GGAATCAAGAGAGGATTTATTACCATTAAGTCTAGGAGGTATAGTGAATAAAGATTTATT
GAGTGGTATGGATATACAAAACTTAGAACAGAATGGTAATGAATACCTATATATGAGACA
ACATACTTCAACTTATTATATATTAAGAATGTTTGGTGACTATTTAGGGTATGAGGTAAA
CTTAAGAGAAGTAAAATATATTGTAGAGAAATATAATTTAATTGATAAAATACCATTGAC
AAAAGAGGGTATGTTGGATTATAATAAACTTATACATTTAGTAGAGGAAGAGGTTAATAA
CTATGAGTAAGAAGATAAAGGAGCTTATCCTTCATAAATCAATGAAGGATATACATTTTG
CAAGAGAAGTATTAGATAACTTACCTAAGAATCTATTTTCAGCAGAGTCTGAGGACATGG
GTTACTTATTTACAGCTATAAAGAGAACAGCACATATTTCCGATAAGATGTCAAATGAAG
CATTAGCAATTAAAGTAGAACAGCTTATGGGTAATAATAAGGAAGATGAAGAGAAGTAAC
CAAGACATTAACTTACTTAGAAGATTTATATAAAGTAGACGTTAATGAAAAAGATGAATC
TGTTAATTATGAAATAGAGAAGTATATTAAAACAGAAATGTCAAAAGAAGTTTTAGTTAA
ATTTATTGCAGAAAATAAACAAGAAGACTCTGATAATCTACATGAACTTGTAGACAAACT
AAAAGCAAATAGAAGTAAGTGACATCTCAGGAGGTAATGGGGAGTTTATTGACTTCTTCG
AAGATACAGAAAAGAAACAAGAACTATTGAGTAATTTAGCTACAAATAAAATTCTCTACT
GGATTTACTTCTATTGACAACCATATTGAAGGTGGTATAGCAAGAGGAGAGGTTGGATTA
ATCATAGCTCCTACCGGTAGAGGTAAATCATTAATGGCTTCAAACTTAGCTAAGAATTAT
GTTAAAAGTGGATTAAGTGTTTTATATATTGCCTTAGAGGAAAAATGGATAGAATGGTTT
TGCGTGCTGAGCAACAAATGGCAGGAGCAGAAAAGAGTCAAATTGTAAATCAGGGATATG
TCTTTAAATAATAAAGTTTATGATGCAATACAAAATCATTATCAGAAGAATAGAAAGTTA
TTAGGTGACTTTTATATTTCTAAACATATGCCAGGTGAAGTTACACCAAACCAATTAGAA
CAAATTATTGTCAATACAACAATTAAGAAGGATAAAAAATATTGATGTTGTTATTATTGA
CTATCCTCACTTAATGAGAAATCCTTATGCTAAATATCATTCAGAATCAGATGCAGGAGG
GAAATTGTTTGAAGATATTCGTAGATTATCACAGCAATATGGATTTGTTTGTTGGACGTT
AGCTCAAACTAACCGTGGTGCTTATGGTTCAGATGTTATTACAAGTGAGCATGTAGAAGG
TTCTCGTAAGATTGTCAATGCTGTTGAGGTGTCTTTAGCAGTAAACCAAAAGATGAAGAA
TTCAAGAGCGGTTTCTTAAGATTGTATTTAGATAAAATTCGTAATAGCTCTAACACAGGA
GAACGATTTGTTAATCTTAAAGTAGAACCAACTAAGATGATTGTAAGAGATGAAACACCT
GAAGAAAACAAGAGCATATACAATTGCTATCAGATAATGGAAAAGAAGACACAAGTAAAT
TTCAAAATAAAGATAATAAAATAGAAGCTATAAATAACACATTCGGAGGATTACCGGGAG
TTTAATTTTTTTAAAATATACCACTTGACATTTTATATGTTAGGTGGTATAATTATTTTA
TAAAGAATAAAGGAGAGATTAATAATGAAATTTGTATTCTTTACAGATAGCCACTTTCAC
TTATTTACTAACTATGCTAAACCTGATGAGCAGTATGTGAATGATAGATTTAGAGAACAG
ATACAAGCTTTACAGAAAATGTTTGATATTGCAAGAGAAGAGGATGCAACAGTTATATTT
GGTGGGGATTTATTCCACAAACGTAACGCAGTAGATACTAGAGTATATAATAAGGTATTT
GAAACATTCCAACTTAATAGAGATATAGAAGTACTAATGTTAAGAGGTAATCATGATCTA
GCGACAAAATAGTTTATATACAGATTCTAGTATAGAACCTTTCGGTTACTTACCTAATGT
AGAGGTTTGTAAAACCTTGATACTTTAGGGTTTTAGGAGAAGAACAGATATTAATATTGT
TATGGCTCCTTATGGAGACGAGACTGAAGAAATTAAAGAGTTTATTAAAAAATAAATATG
TAGAAGATAGAGTAAATATCTTAGTAGGTCATTTAGGTGTAGAAGGCTCTTTGACTGGAA
AAGGGTCTCATAGATTAGAAGGGCATTTGGATACCAGGATTTATTACCTGATAAATATGA
TTTCATTTTACTAGGTCATTATCACCGTAGACAATATTTCCAAAATCCGAATCATTTTAT
GGTGGTTCATTAATGCAACAATCATTTTCTGATGAGCAAGAAGCTAATGGTGTTCATTTA
ATAGATACAGAAAAAAATGACTACAGAATTCATCCCAATCCATACACGTAGATTTATTAC
TATTCAAGGAGAAGATATTCCTGAGAACTTTGAACAGCTAATCGAGGAAGATAATTTTAT
TAGGGTTATCGGTACAGCAAATCATGCTAAGGTTTTAGAAATGGATGACAGTATGAAAGA
TAAGAATGTTGAAGTTCAAATTAAAAGAGTATACTGTAGAGAAACGTATTGATAGTGATG
TGTCTGATGACCCTTTAACAATTGCTAGTACCTATGCTAAACAATACTCACCTGAATCAG
AACAAGAAATACTTGAGTGTTTGAAGGAGGTTTTATAATGAAAAATATAGAGAATATCTA
AATAAGACAGATGCAGAAAATTTAGCAGAGGATTGGGAGAAAGTAACCGAAGATTTATGG
AAAGTGTTTAAAAGATATGAAACCTAAAATTAATACATTAGATATCAGTAATGTAGTAAG
TAAAGACTTAGATAAAAGTAAACCTATTTTACAATTCAAGATTCAGATGGGTAATAGAGA
ATATTTGTAATGTTGAAGGTTTAGAAGATGGTCTAAGTAAAATGAAAAAGATTTTTTGAT
GATAGTAATTTTGAAAACATTATTACAATAGAGTAGTAGACCATGATGAGTATTACTGGA
TTGATTATGGCTCTCATCATTGTTTCTTTAGAGTTACGAAAGGGATAAGTAATGGTTGTA
TTTAAACAAGTAGAAGTTAATAATTTTTTAGCAATTAAAGAAGCTACGCTAGAGTTAGAC
AATAGAGGATTAATTCTAATTGAAGGTGAGAATAAATCTAATGAGTCATTCATTCAAACG
GCTCCAGGAAAATCAACTTTAATATCTGCCATTACTTACGCTTTATATGGTAAAACTGAA
AAAGGACTAAAAGCAGATGATGTAGTAAATAATATTGAGAAGAAAAATACATCTGTTAAA
CTTAAGTTTGATATTGGGGAAGATAGTTATTTAATTGAACGTTATCGTAAAGATAAAGAG
AATAAGAATAAAAGTAAAATTATTCGTTAATGAAAAAAAAAGAGATTACAGGTTCAACAA
ATGACGTTACCGATAAACAAATACAAGATTTATTTGGTATTGAGTTTAATACTTACGTTA
ATGCCATCATGTATGGTCAAGGAGATATCTATGTTCTCTCAAGCAACAGATAAAGGTAGA
AAAGAAATTCTTGAATCTATTACTAAGACAGACGTATATAAACAAGCACAAGATGTAGCA
AAAGAGAAAGTTAAAGAAGTGGGAAGAACAACAAAATAACATAAGACAGGAAATCTATAA
ACTAGGTTATCAGTTATCGACAAAAGATGAGTACTTTCAAAGAGAAATAGAGCAGTACAA
TCAATATAAAGAACAATTGGTTCAGATAGAAAACAGTAATAAGGAAAAAAGATAGATTAA
GAGAACAAGAGGAGAAGCAAATAGAAGCTCAAATAGAGCAACTAGCTTCACAGATACCAA
CAATACCTGAAGATGAATTTAAGCACTCAGAGGAGTATACAAAGCCTCAAAGCCTAGATT
TACTTTCTAATAAATTAACGGAGTTAAATCCAAGTTTACTCAGGTATAATACCAAAGAAC
AAGTACTAAAATCTGAAATAGCTACATTAAGCAATAGTCTAAATCAGTTAGATACAAATG
ACCATTGTCCTGTTTGTTGAAACCCTATAGATAATTCTCATAAATTAAAAGAACAGGAAA
ATATCAATAATCAGATTGAGAATAAGAAACAAGAGATTACTAGTGTATTAGAAATGAAAG
ATACGTATAAAGAAGCTATTGATAAAGTAAAAGATAAATCACAAGAAATTAAAGATAAAA
TGTCACAGGAAGACCAACAAGAACGAGAGCACAATAATAAGATTAACAGCATAATTCAAG
AGGCTTCTAGGATTAAATCAGACATTAGTTCATTAGAGAATAATAAAACGTATTTAAAAG
TTAAATATCAACATCAATCTGTTCAAGGATTAGAGAGAGAAGAACCAAGTAAAGAAAACA
TGAGGAAGATAAGAAAAGAATTACAAGAATCTATTGACAAACATGAAGAGAATATAGTAC
AATTAGAAACTAAGAAAGGTAAATATCAGCAAGCTGTAGATGCTTTTAGTAATAAAGGTA
TACGTTCAGTAGTGTTAGACTTTATTACACCATTCTTAAATGAAAAGCAAATGAGTACCT
TCAAACTTTATCAGGTTCAGATATTGAAATAGAGTTCCAAACTCAAGTGAAGAATGCTAA
AGGAGAACTAAAAGATAAGTTTGATGTTATTGTTAAGAATAGCAAGGGCGGAGGTTCGTA
CAACCAATTCAGCAGGAGAACAAAACGTATTGATTTAGCAATTAGTTTTGCAATTCAGGA
TTTAATTATGAGTAAAGATGAGATATCTACGAATATTGCACTTTACGATGAGTGTTTTGA
TGGATTAGATACTATCGGTTGTGAAAACGTGATTAAATTATTAAAAGATAGACTTAATAC
AGTAGGAACAATATTTGTAATTACTCATAATACCGAGCTTAAACCACTGTTTGAACAAAC
AATTAAAAATCGTAAAAGAAAATGGAGTATCAAAACTGGAGGAAAAATAATGAAATTAAA
GATTTTAGATAAAGATAATGCAACACTTAATGTGTTTCATCGTAATAAGGAGCACAAAAC
AATAGATAATGTACCAACTGCTAACTTAGTTGATTGGTACCCTCTAAGTAATGCTTATGA
GTACAAGTTAAGTAGAAACGGGGAATACTTAGAATTAAAAGATTACGTTCTACTTTACCT
TCATCTTATGGTTTTAGATGATAATAACAAGATATTATTAGAGATAATAACCATAGATGT
AAATAGGTTATTGGTACAACCCTGCAGTACGCAAAGATAATTTAAAGATTATAGAGAAAG
CTAAACAATATGGATTACCTATTATAACAGAAGAATATGATGCTAATACTGTAGAGCAAG
GATTTAGAGATATTGGAGTTATATTCCAAAGTCTTAAAACTATTGTTGTTACTAGATACC
TAGAAGGTAAAACAGAAGAAGAATTAAGAATATTTAACATGAAATCAGAAGAGTCACAAC
TGAATGAAGCACTTAAAGAGAGTGATTTTTCTGTAGATTTAACTTATAGTGACTTAGGAC
AAATTTATAATATGTTGTTATTAATGAAAAATTAGTAAATAGTAAGGAAGGATATTATGA
GGTTTGAAGACTTTTAACCCAAGAATTAGGAGAACCAAAGAAAATACTATAGGTGAGCTA
AGATACTGTTGTCCGTTTTGTGGAGAAAAAAGTTATAAGTTCTATGTTAAGCAAGCCTAG
ACTCTAGTAATGGTCAGTATCATTGTAAAAAATGTGATGAATCAGGTAACCCTATTACAT
TTATGAAGACTTATTATAACATTACAGGTAAACAAGCTTTTGATTTATTAGAGTCTAAGA
ATATAGATATAGAGAGAGCCCCTTACTTACGACCAATAATAAGGATTTGACAGAATCAGA
GAAACTTATATTAATGCTTAGAGGTGTGCACCAAGATAAAGGAAATACTAGTATTAAACC
TCCTAGATTACCTGAAGGATATAAATTATTAAAAGATAACTTAAATAATAAAGAGATTAT
ACCTTTTTTAAAAATGCTTAAAAGGCAGAGGTATAACTTTAGAACAAATTATTAATAATA
ATATAGGTTATGTTATTAATGGGAGCTTTTATAAAGTTGACGGGGAATCCAAAGTATCAT
TATGAATATATTATATTTTTTACTTATGATAATGATGGAAATTACCAGTATTGGAATACA
CGAAGTATAGAAAAGAACCCGTATATTAAATCTATCAATGCCCCTGCTAAACAAGATGAA
GTAGGTAGAAAAGATGTCATATTTAATTTGAATATAGCAAGAAAGAAAAAAGTTCTTAGT
TATAACTGAGGGTGTATTTGATGCTTTAACCTTCCATGAGTATGGCGTAGCAACATTAGG
TAAACAAGTAACTGAGAATCAAATAAAAAAAAATAATTGATTATGTTAGTATAGATACAT
CAATATATATTATGTTAGACACTGATGCATTAGATAATAATATAGACTTAGCTTATAAGT
TAAAACACATTTTAATAAAGTTTACTTTGTACCTCATGGTGATGAAGATGCAAATGATAT
GGGAACAAGGAAAGCTTTTGAGTTATTAAAACAGAACCGGGTGCTAGTAACACCTGAAAG
TATACAGAGTTACAAAAAATACAACAAAACTTAAACTTTAGGCTTGACCTTAGAGAAGTT
TTATGTTATACTAGTAATTAAGTAATTAATAAAGGAGAAAAAAAAATAATGTCAAATAAT
AAAAAAAGATATTTTAGAATTTGTAGATGAATACATTACAGCTTTAAGAGTTGGTAATGA
GCAACGACAACATCAATTAGAAGAAATGGGTAAAGAAGAAACAGCAACATTAACAGATGT
AGCTAAAGCTATTACTAACCTTATGTTAGGTGTTAATGAGCAGATGACAGACTTAGAATA
TAATAACGAGTTAAACTTAAATATTTTTTAATTGATGCTTTATATAAAGCAGAGCTTATT
AATGAAGATGTATTAGACTACATTCAAGAATCAATTGATAAATCACAAGAAGAACCTAAA
ATGAAGAAGAAAAAAGGAGAACAAGAATAATGGAAAAAAATATTAGCACACACACAAAGG
TATTAGTCAAGCAGACATGGAGAAATGGATTGAAGCTGTAGTACAAGGAACTGTTGATGG
TAAACAAGTTGATGAGAAAACAGCTAAACAATTAGATAGAATTGGTTCACGAAGTGTTTC
TTTAGAAGAAGCAACTCGTATTGCTAAAGTTCTTAATGCTGTAACAGCTCAAGAGGTTAC
AGGAGACTTTAATGATGCATTTAATGCAATTGACTTAATGATGATTATCATGGAAGATGA
GTTAGGAGTAACTCAAGAAAAAAGTAGGTAAAGCTAAAGATAAACTAAATGAAAACGAGA
AGCTTACCTAAAAGAGAAACAAGAAGAATTACGTCAAAACAACAAGAAGAGGCACAGAAA
AAACTGAATCTGACAGCAATGAAAAAAGTAATTCAGTTGAAGAAAAATGACGAACAGTAA
GAAAAAGGATACATTCGAACGTAAAATAGCTAAAGAATTAACTGCTTGGTGGGGATACCA
ATTCAATAGGTCTCCTCAATCAGGTGGTGCTTCATGGGGTAAAGATAATAATGCTGTCGG
AGATATAGTACCTCAGGAAGCTAATTTTCCTTTAGTAGTAGAATGTAAACATAGAGAAGA
ATGGACTATAGATAACGTTCTTTTAAACAACAGAGAGCCACACATGGTGGGAGCAAGTCA
TTAATGATAGTAGTAAGGTGAATAAGACAATCTTGCTTAATATTTACTAGAAATAGAGCT
CAGAGTTATGTTGCTTTACCTTATGATGAGAAAGTATATGAAGATTTAAGAAATAATGAA
TACCCTGTCATGAGAACAGACTTTATTATTGATAATATTAGAAAAGATAAATTTTTTTTA
TGATGTCCTTATAACTACCATGAATGGGTTGACCTCATTTACACCTTCTTATATTATATC
TTGCTACGACAAAAGATATAAAACCATACAAGAAGGTCGAGTCTAATTTATCTGAGGTAA
GTAAGCATGAAGATGAATTGATTAATGACCTTCTTAGTGATATATAAGGAAGGTAAGATA
AGTATGACAAGCAAAAGAAAAGACCATTAATCGTATATTTTTTCAGGTACAGGACAAACA
GAAAGATTAGTAAGAAACAAAATTAATATTAATAATTCATTTGAAACATTTAGGGTTAAG
AGTGGAAAAGAAAAAAGTAAATAAACCTTTTATACTAATAACACCTACTTATAAGAAAGG
TGCAATACCTAAACAAATAGAAAGATTCCTAGAAATTAATGGAGCCCTAAAGAAGTTATT
GGCACAGGAAATAAACAATGGGGCTCTAATTTCTGTGGAGCAAGTAAAAAAGATTTCAGA
GATGTTTAAGATTCCTTTAATTGCTAAAGTAGAGCAATCAGGACACTTTAACGAGATACA
ACCAATATTAGAACACTTTAGTAATAAATATAAAGTAGCGTAAAGGATGAGAGATATATG
GCAACATATGGAAAATGGATTGAGTTAAATAATGAAATAACTCAATTAGATGACAATGGA
AAAATAAACTCTATAAAGACCAAGAAGCTTTTAGATGAGTATTTAAAATATATTGAAGAC
AATACAAGAAAGTTTAATAGTGAAGTAGAAAGAATTAGAGTATTGACAAAAGAAGGAACA
TATGATAAAATATTTGACAACGTTCCTGACACTATTATTGATGAAATGACTAAGTTAGCT
TACAGTTTTAATTTTAAATTCCCTAGTTTCATGGCAGGGCAAAAGTTTTATGAATCTTAC
GCATCAAAACAGTATGATGAAAACAAAACCTATTTTTGTTGAAGACTATGAACAACATAA
TGTTCGAGTAGCTTTATATTTATTTCAAAATGACTATGTAAAGGCTAGAGAATTACTAGT
ACAACTTATGGAGCAAACATTCCAACCATCTACACCTACATTATAACAACTCAGGACAAG
CTAATAGAGGTGAACTAAGCTCATGTTATCTATTTGTAGTAGATGATTCAATTGAGTCTT
TAAACTTTGTTGAAGATAGTGTAGCTAATGCTAGTTCTAATGGTGGTGGAGTTGCAATTG
ATTTAACTAGAATTAGACCTAAAGGAGCTCCAGTACGTAATAGACCTAATTCAAGTAAAG
GTGTTATTGCTTTTGCTAAAGCTATTGAACATAAAGTTAGTATTTATGACCAGGGTGGTG
TAAGACAGGGTAGTGGTGCTGTTTACCTAAATATATTCCACAATGATATCTTGGATTTAT
TAAGCTCTAAGAAAATCAATGCCAGTGAGTCTGTTAGACTAGATAAATTATCTATTGGTG
TTACAATCCCTAACAAATTTATGGAGTTAGTTAAAGAAGGTAAACCTTTCTATACTTTTG
ATACTTACGACATTAATAAAGTGTACGGTAAGTATTTAGATGAGCTAAACATTGATGAAT
GGTATGATAAGTTACTAGATAATGATAGTATCGGTAAAGTAAAACATGATGCTAGAGAAG
TTATGACAGATATTGCTAAAACGCAATTAGAATCAGGCTACCTTATGTATTCTATATTGA
TAATGCTAATGATAATCACCATTGAAAACCTAGGTAAAGTTAAAATGAGTAACTTATGTA
CAGAAATTTCACAATTACAAGAGGGTATCAGAAATTTATCCGTACTCTTACAGTAATCAG
AATGTTATTAATAGAGATGTTGTCTGTACATTAGGTTCTCTTAACTTGGTTAATGTGGTT
GAAAAGGTTTATTGAATGAATCTGTAGATATTGGTACAAGAGCATTAACAAAAGTTACTG
ATATTATGGATTTACCTTACTTACCTAGTGTTCAAAAGCAAATGATGATATTAGAGCTAT
CGGTTTAGGTTCAATGAATTTACATGGACTTTTAGCTAAGAATATGATTAGTTATGGTTC
TAGGGAAGCATTAGACCTAGTAAACAGTTTATATAGTGCTATTAACTTCCAGTCTATTAA
GACATCTATGTTAATGGCTAAAGAAACAGGAAAACCATTTAAAGGTTTCGCAGAAGTCCG
ATTATGCTACAGGTGAATACTTTGTAAGATATATTAGAGAATCAATCAACCTAAGACAGA
TAAAGCTAAGAAAGTCTTAAATAAGGTTTATATTCCAACACAAGATGATTGGGATGAATT
AGCTAAAGCAGTAAAAGTACATGGCTTGTATAATGGTTATAGAAAAGCAGAAGCACCTAC
TCAATCTATATCTTATGTACAGAATGCTACAAGTTCTATTATGCCAGTTCCTAGTGCTAT
AGAGAATAGACAATATGGAGATATGGAGACATATTACCCAATGCCTTACCTAAGTCCTAT
AACTCAGTTCTTCTATGAAGGAGAAACAGCTTATAAGATTGACAATAAACGTATTATTAA
TACAAGCGCAGTTGTTCAGAAACATACAGACCAAGCAGTGTCTACAATACTTTATGTAGA
ATCAGAAATCCCTACTAATAAACTAGTATCATTATACTATTATGCTTGGGAACAAGGATT
AAAATCATTATACTATACACGTTCACGTAAACTTTCTGTTATTGAATGTGAAACATGTTC
GGTTTAGAAAGGAAATAGATATGGATATTACACAAAAGTAAAACAACATAATAAAAATGC
TGTATTAAAAGCAACAAACTGGAATATTGAAGATGACGGGATGTCTGATATTTATTGGGA
GCAAGGAATCTCCCAATTTTGGACTCCTGAAGAGTTTGATGTATCAAGAGATTTAAGTTC
TTGGAATAGTTTAACTGAAAGTGAAAAGAACACTTATAAGAAAGTCCTTGCAGGGCTCAC
AGGGCTCGATACAAAGCAAGGAGGAGAAGGTATGAACTTAGTATCCTACCACGAACCAAG
ACCTAAATACCAAGCTGTATTTTGCGTTTATGGGTGGTATGGAAGAGATACATGCTAAAT
CTTATAGTCATATTTTTACAACATTACTAAGTAATAAAGAAACAAGTTATTTATTAGATA
CTTGGGTAGAAGAAAACGACTTTTAAAAGTAAAAGCTCAGTTTATCGGATATTACTACGA
CCAACTATTAAAACCTAATCCTACTATATTTGATAGATACATGGCTAAAGTAGCTAGTGC
CTTTTAGAAAGTGCATTATTCTACTCAGGATTTTATTATCCTTTACTTCTTGCAGGAAGA
GGTCAGATGACACAATCAGGAGCTATTATTTATAAAATTACTCAAGATGAAGCTTACCAT
GGTTCGGCAGTAGGATTAACAGCTCAATATGATTATAATCTTCTAACAGAAGAAGAGAAA
AAACAAGCAGATAAAGAAACTTATGAATTATTAGATATTCTTTACACTAATGAAGTAGCG
TATACACATAGTCTATATGACCCACTAGAATTAAGTGAAGACGTAATTAACTATGTTCAG
TATAATTTTAATAGAGCTCTTCAAAACCTTGGAACGAGAGGACTATTTTAATCCTGAACC
TTATAACCCTATTGTAGAAAATCAAACTAATGTAGACAGATTACGAAATGTTGATTTCTT
TAGTGGTAAAGCAGACTATGAAAAATCTACAAATATCAAAGATATTAAAGATGAAGATTT
CTCATTCTTAGATAGTAAAGAATACAGTACTGCCAAGGAATTCTATAAAAGGAGAAAAGA
TATTATGGATAGAAAAGAAGCAATGGATTTACTAAGTAAAGCAGAAATATTATTTAAAAA
ACATGATGAGTTTTCATGTGTAAGTGATATCAATGACCCTATGAAGTTATTCAGTAACTC
TAAGGATGCTAAAGCTGATGATACGTCTAATTCTTTTCAGCTAGAGTTTATGCATGATAT
GACCATGTATACTTTATCTTATGGCTCAGGACAGCTAAAACTTATTGATTTAGCAGAAGG
TTATGAAGCACAAAAGCTACAATAGTTAACTCATTTCCCGAAATTATTAAAACATTAGAA
AAGGATGATTCAGAAGATGGAAAAAATGAATAGTTTAGTAGATTTAAATACAGCAATTAG
ACAAAAGAAAGATGTTATTGTCATGATTACACAAGATAATTGTGGTAAGTGTGAGATTTT
AAAAAGTGTAATCCCTATGTTTCAAGAGTCAGGTGACATTAAAAAACCTATCTTAACATT
AAATCTAGATGCTGAAGATGTAGATAGAGAAAAAAGCTGTTAAGTTATTCGATATCATGA
GTACACCAGTATTAATTGGGTATAAAGATGGTCAGTTAGTTAAAAGTATGAAGACCAAGT
TACACCTATGCAATTACAAAATTAGAGTCACTTTTAATTTGGAATTTCCTACTATCTGTG
CTATACTATAATAGTACAAGGTAGTAGGATTTTTTAATGGAAGGAAGATGACATATCGCA
AAGAATAAAACATTAACGATATATAATAGTGATAGATATTTTAATATACACACAAAAGAT
AAAGATAAAATTAATGAGGCTATTAAAGTAACACACGGTAATGAAGAAGAAATTGAAAAG
AATATGGATGAATTAATATCTAAGTCTAGAAGATATATCATGAGGGATGAAAAGCATTAC
ATGCTATTTAATGAGAAGTACAATAATGATAGGCTTATAGAAAAGTATGTAAACACGGTG
GTAAGTTACATACTATACTGATTCAGTATTACCTTACTATGTTTTAAAAGACTTATCTAG
TCACCCTGACTCAGAAGTTGTTTATCGTATGCGCAACGGTTTTACTGCAAAAGAAGTAGA
TAATATAGCTTTATCATTCATGGGTACAAAAGTTATTATTGATATTTCTGTAGTATTTCC
TTATGTAAACCCTTATGATATTATTAGAAGTTTACATGATATTAAAACAAATGTAGATGA
AGTTCATTTATCATTTCCACGAATATTAGGGGTAGATGAAAACAAGAAAAGTTTTATTTC
TTTGATGGTGAAGCTTATGATTTAAAACCCGAATATAAAGTCGATTTTGCAGATAAAATT
AGAGTATCTTTATCAGTATGGAAAATGTATATCTATATCTTAACAAGTAGTCGTGATTTT
GAGGATGTAGACAATGTAATTACGAAATTAAAACAACAACGAAAGATTAAGATATAAGGT
GATTATATGAGTACAGCAAATAGAAGAGATATAGCAAGAAAGATATCAGAGAATACAGGT
TACTATATCCAAGATGTAGAGGAAATACTAAGTGCAGAGACAGATGCTATTTCTGACTTG
TTAGAAGAAGGGTATACTAAAGTAAAGAATCATAAATTTATGCAAATAGAAGTTATTGTG
AAAGAAAAGGTAAAAGCGTGGATGTATTCGATCAAAGAATACTTCCATTTACCTAATAGA
AAAGCTATAAAATTCAAACCACTAAAAAGAACTAGAAGAGGTTATTGATAGACTTAATGA
AGAAGAGAAATAATTCTCTTCTTTTTTATTGACAAGGTTTAAAATATATGGTATAGTATT
ATTAAGTTAAAAAAAGGAGAGGAATTAAATGAAAGTATTAATCTTATTTGACCAATATTA
GAGAAGAGCATTTTTCTGTAAGTAAAGATGGGAGTGTGAAATCTAATGTACTAAATACAC
CTAACGGAAAAACACTTAAGAAATTACTTGAGAAGTGTTCTAACTTAAAGAGAGATAAAA
CAAACAGAGATTATGATATTGATTTTCTCTACAATGCAGTACCTACACCTATTAGAAATG
ACTACGGTAAAATCATTAAATACCAAGATGTTAAACAAGCAGAAGTAAAAGCCATACTAA
GGAGAGAATGAATAATATTATTATTGATAATTCTTATGATATGGTAATTCCTGTAGGTAA
ACTAGGTGTTAAATACCTATTAAATGTTACAGCTATTGGTAAAGTAAGAGGTGTACCAAG
TAAAGTAACTATTGAAAATGGAACATCTTCTTCATGATGTGTGGGTATTACCTATAGCAT
TGAATATACTAATGTAAATAAAAATAGTGAACGTCATGTAGTATCAGATTTACAAACAGT
TGGTAAGTTTCAGAGCAAGGAGGATGAACCTAAGGAAGTATCTTACGAGTTGGCAGATAA
CATTGAAAGAGTAAGAGAAATATTCAATAAGGAAGTAAAGAATGATAATTATGATGGGGT
GATATTACCGCATGGGACTTAGAGACTAACCTATTAAAACCTGATAAAGAAGAAGTAAAC
CTTAGTACTATCTCTATCATGGAGAAATGGTCCAAAGTGTAACTATACCCTTATACAAAT
CAGACTTTTAACTAAAACGGTCAAGATGATATTGATGAAGTCTTAGAATTGCTTAAGAAT
TGGTTAGCTAGTAAAGAAGTACATATTAAAGTAGCACATAACGGTAAATGATTTGTTGTT
GTAAAATCCCTCTCATATCGGGCATAGCTTTAAGTAGCTGATAAGAGAACCTAAGTCCTG
TAATAAGGATAGTGGTAATCGAGCTTATTATTGGTGACAATAGATGGGGTGTAGAGACTG
AGCCGAGGTTTTGTAGACCAAGGTGAGACATAGTGTATCGACTTAATAGAGGTGGTACAG
TGAAAAAAAGCATTATATGACATCAGTTAAAAAATAACAAAAGTATGTAGAAGATGCAAC
GAAGAATTAGATTTATCTAACTTTAAAACATATAAGAAGAATGATAAAAACTTATTATCA
AAGTATGTGTATACCTTGTCGGAAGGAATATAATAAGTTAGATAAAGCTAACCACTAAAA
ATGTTATGAGAAAAGGCAGGAGATAAATATAGAAGACAAAGTAATGAGTATAATACTTCT
GACAGAGGTAGAGAGCTAATAAAAATAGGTCTAGGGAAATACAGAGAAAGTAATTCCTGA
AAAGCTAGAAGCCTGTAAGAACCGCATTAAGAAATGGTTCTCTCATAAGACCTGATAAGT
GTTCAGAGTGTAATAAAGATTGCATACCTGAAGCTCACCATCCTGATTATACTAAACCTT
TAGAAATAAAATGGTTATGTAAATCCTGTCATGAAGATACTCATCATAAAAAAATAATCA
CACTATGTAAATGAGGACATCAAGCCCATTTAGGTAACTACAAACAAACCTAATGGTAAG
GGCTTTATGAAGGTATAGTCCGCTCCTATATAGAAATATATAGGCTAAAACGAAATATGA
TATTAAGTTCTTAATGAGTACTGAAAACTTTAAAGATTTTGAGAGTATTCAGGATACTAA
AAGTAGGTTGGTACCTAGCTGTTACTGTTAAGAAGTTAAAGAATCTTTAAGATTATCTGA
TTTAGCTTATGAGGTTACAGATGTCGGAGGCTATGATAAACCATTAGAAGACTTTAAATT
ATGGTTTGTTACTAAGTTATTAAGATTCTTCTCAGATAAAATTAAAGAGATACAGAAAGA
AAATAAAAAGATTGCTAAGAAAGAGTATGATGTTAAAGCTCCTGAATATAAAGAATGGTT
AGAGAATAAATTAAATGAAACAGTAGTAGAACTAGATGATACTGAGAAAAATTTAGAGTT
AGTGAATTAGAGAAAAGTATATTCAACTAGGTCTTTCACCTGAAATTGTAAATATGAATT
TAGTTATGGATAATGATGAATTCATAAATATTGCAGAACAATCACCTGAGTACATGGGGT
TATCTGACTACGCTAAGTCTTACGTTAAATACTGCAATTAATTTAATTAATGAGTATAGA
GATGTAAAAGATGTAGTTAATGATATTGACCGGAGTAACTTTAATTATGATTGGTTCCCT
ATTGAGTTAATGCATCCATACGCATCAGGAGATACTGATGTATGTAGAAGAATTTATTGT
GATGTAATTAAGAAACTTAAAGAACAAGATAGACCTAAGTCAATGCATTTATTAGAAGTT
AATTACCCAAGACTTACTAAGTCTTTAGCTAGAATTGAATCAAATGGTTTATATTGTGAC
TTAGATTATATGAAAGAAAATGATGAGTCATACGAGTCTGAGATGGCTAAGAACCATGCT
ACAATGAGAGGTTAATTGGGCTGTTAAAGAATTTGAAGAATACCAATACAATCTTTACCA
AATGGCGTTAGAAGAACATGAGAAAAAAGCCAAAAGATAGAGATAAAGATATCCATCAGT
ACAGAGATAAATTTAAAGATGGTAAATGGATGTTTTCCCCAAGTTCCGGAGACCATAAAG
GTAGAGTAATTTATGATATTCTAGGAATTCAATTACCTTATGATAAAGAATATGTCAAGG
AAAAACCATTTAATGCTAATGTTAAAGAAGCAGACCTTACTTGGCAGGACTATAAAACAG
ACAAGAAAGCTATTGGTTATGCGTTAGATAATTTAGAATTAAAAGATGATGTTAAAGAGC
TTCTTGAATTACTTAAATATCATGCTAGTATACAGACAAAACGTAATTCATTTACTAAGA
AATTACTTAATATGATTAATAAACAAAACGAACATTACATGGTTCTTTTTTCTGAGACAG
GCACAGAGACATCAAGACTAAGTAGTAGTAACCCTTAAATTGGGGTTGTAAAACTTTGTT
AACTGCGGGAAGAGACTCGTTAGGTCTTAACTACTAACTTATAATGGAAACATATATAAG
GGCAAACAGTAACGTGTTTGATATAGTAAAAGGTTAAGAATAGAGAGAATCCGCATCCAA
GACCCTGAAAGTATATAAAAGTATGGGTAAGGTTCAACGACTAGGTGTTGAGACAATACA
ATCAATACACACCCACGAAAAGCAAAGGTATTATTTCTGTGGTAGGAATAATAAGGAGAG
TTATATGAAAGAGATTTGGAAGAAAGTAGTAGGATTTGAAAACTACGAGGTAAGTAATAA
AGGAAAAGTATGAATATAAAAACTAACTATATTTTAAAGCCGTGGATAATAAATTCCGGA
TATGAGGCAAAGTATCTATAGGTATTGCTAATGTATTAGTACATAGATTAGTGGCTATGA
CATTTATACCTTACTGACAGCTATAGTATAGTTAACCATATTGATAATAATAAATTAAAT
AACTGTGTTGAAAATTTAGAATGGGTGAAGTTACAAGGTAATAGTGCTCACGCTAATAAG
CAAGGAAGATTGAATACTTATAGTGCAAGAGAAAACTTAGTTCTGTATCTAAGAAAGCCA
TTTATCAAAAAAGATATGGAAGGTAACATCATTAAGTTATGGGATTCACCAAGTGAAGCT
GAAAAAGAATCTAATGGGTACTTTAAAAGTACTAAGATTGGTTCCGTTGCTCACGGTAAA
CGTAAGCATCATAGAAGTTATACTTGGGAATACGTATATAAGGATTCAAAGAGAAGTTTA
AATAAGTCTATTAATATGTATGATTTAAATAATAATTTATTATATGAAGATTTGACAATG
AATAAAATTATGGGTATACTAGAAATGAATAATCATAAAACATTAAGAGATAAACTAAGA
AATACAGATGACTTTGTTGAATACAGAGGATATAAATTTAAAATAATAATTAAAACCTAC
CACAGAAATGATATATGATATAGTCTACCAATAGTGAGAGCTATTGTGTTACCTAAACAG
TAACAGATTGTAAACTAAAAGCTTACAAATTATAGAATTTACAAAACTTACCTGCACACA
CATCAGATGTAAATAAGTTTGATTACAAACATCCAATTAAACGTTCATTTGTTTCTAGAT
TTGAAAATGGAGTACTGCTAGGTCCGACTATAGCGCCCTAGAGATGCGTATTATCGGATT
ATTTACTAAAGACCCTGATATGCTACAATCATTCTTAAATGGGGAAGATATCCATAAGGC
TACTGCAAGTATTGTTTACAATAAACCAGTAGAAGAAGTAACTAAAGAAGAACGACAAGC
AACTAAAGCAGTTAACTTCGGATTAGCCTTTGGTGAATCACCCTTCTCATTTGCAGGTAA
AAATAATATGGAAGTAAGTGAAGCAGAAGAAATATTTGAAAAGTATTTCCAAACAAAACC
AAGTGTAAAACTTCTATTGACAATGTACATGAGTTTGTGCAACAATATGGTTATGTTGAT
ACAATGCACGGACATAGAAGATTTATCCGTTCAGCCCAATCAACAGATAAAAGATAAAAA
ATGAAGGTCTAAGACAGTCATTTAACACTATCATCCAAGGTTCAGGTAGTTTCTTAACAA
ACATGTCTTTAACTTACTTAGATGATTTTATTCAATCTCGTAATTTAAAATCAAAGTTAT
TGCCACAGTACATGATAGTATCTTAATTGATTGTCCTCCTGAAGAAGCTAAAATTATGGC
TAAAGTGACAATTCATATTATGGAAAACTTACCATTTGATTTCTTAAAAGCAGAAATTGA
TGGAAAAGAAGTACAATATCTATTGAAGCCGATATGGAAATTGGGTTAAACTATAATGAT
ATGGTTGAATATGATGAGGAAGAAATAGATACATTTAATTCTTACCAAGGTTATATTAAG
TATATGATGAATTTACAGACCTTAGAAGATTATAAAGAGTCAGGTAAACTAACAGATGAA
CAATTTGAAAAGGCTACTAATGTTGTTAAAAGTGAAAACATATTTATCAAGAAATTTAAT
AAAAGTATTGACAATATAGTTAACTTATGTTATACTATATAAGTAATAAATATAAGGAGG
AAAAGAGTGAATACAGGGAGATTAGATTTAATCGTTCTATGGATGAATGGATTATAACAA
GCATGTACCAGGATGAGCTAGGTGGGATGAATATTGTTGTTACATTCTATAATAGAGAAG
AAAATAAACATGGTTCTACAGTTTTACCAACAGAGTCATCTACTGGAGAAGTAACAGAGG
AATTGGCAAGTCTTGAAGAAGAATATCCTTTAGCTTTACCTTTAAGTAGTATCTCAGTTA
ATATTTAAAAGGAGGAACTGATAAATGGAAATACACATTGATTCCCTAGATTTTACAAAC
TTTACTATTAAAGATAGAAATGGGAACTCACAAGAGTTTGATATTACAGATGAGTTAAGA
ATTACAGAGTATACAATACAAGAGGAGTTTTATGCAACAATCAGCTAAATATGCTTTTTT
GGGCTTCTATATTAGAAGGTAAGAGCATATTCTGAAATGGAACAAAGAAACCTAGAAACA
ATTGGTAGTAAGCTAAACCTTACAATTAGACAAGAGTACGAACAACAAGGTAAAAGCCTA
CTAAAGATATGATTGAATCTAGTGTTTATATTCACGATTCTTATCAACAACAACTTAAAG
TTGTTGAGGCTTGAATTATAAAGTTAAACAACTTCAATATGTTGTAAAAGCTTTTGAGAC
AAGAAGAGATATGATGATTCAATTAGGTGCAGAATTACGACAAACAAATAAAAATGGTGG
AATTACTAATCCATTTTCACATTAAAAATAAAGTAAAGAATATAATTGACAAATATAAAA
CTATGTTATAATAAATAAGTAAATTAATTAAAAGGAGAAAAGATAATTATGGATTTCAAT
CAATTTATTAACAATGAGGCAAGCAAATTAGAAAGCAATAACAGTTCTTTTAACAATAAT
GTAGAGAGCTACAAACCTAAAACCCTGTACTACGTTTAGGTAATATTAAAGATGCAAACG
GAAATAAGGTTGTTAAAGAAAATGCTTTTGTACGAGTATTACCTCCTGCACAAGGAACAA
ATGTTTTCTTTAAAGAATTTAGAACAACAGGTATTAACTATTCTAAGAAAGATGGTTCTC
AGGGATTCACAGGGTTAACATTACCTGCAGAAGAGGTTCATCTGTCCTTGACCCATACAT
TCAGGATTGGATAACAAATGGTGTTCAGTTCAGTAGATTCCCTAATAAACCAGGAGTACG
CTATTACATTCATGTTATTGAATACTTTAATAACAATGGTCAAATTCAACCAAAAAACGG
ATGCTCAAGGAAATGTAATGATTCAACCTATGGAATTATCTAATACAGGATATAAAGAAT
TATTAGCTAACTTAAAAGACATATGTTAAAACCATCACCTAATGCACCTCATAGCTTTAT
CTCAGCAACTGAAGCATTCCTAGTTAATATTGTTAAAGCTAAGAAAGGTGAAATGTCATG
GAAAGTAAGTGTTTATCCTAATGCCCCTTTAGGTGCGTTACCTCAAGGTTAGGAACAACA
ATTATCTGACTTAGACCAATTAGCAAAACCAACAGAAGAACAAAATCCTAATTTTGTTAA
CTTCTTAATCAATAACGTTAATAACACAGAGTTAAGTCATGATAACTTTAAATTTAACCG
TGAAACAAATGTCTTAGGTGAAGAACCTTCAGAGCCTAAACAAGCACCCACACAACAAGA
TGTAGATAGTCAAATGCCAAGTAATATGGGAGGACAACCTAATCAGCCTCAGCAAGGTCA
AGTAGGTCAGTATGCACAACAAGGTCAAAGTAATGGTCAAGGACAGCAGTTACAAGGTAC
ACAACAACCTATCAATAACACTCAATTTGGTCAAGGAACTCCTTCAGGACAACAACCAAG
TAACACAGGTTCTGTTGATTGGGATAACTTAGCGCAACAACAATCACAACCTGATTCAAA
CCCATTCAATGATTTTGATGTTAGCAGTGTTGATGATTCACAGGTACCTTTTGAGACACA
ACCTCAAAATACACAACAAGCACCTGAACCACAACAAACTACACAAGAGCCTCCAAAACA
AAACAAACGCAAAGTATTGACGATGTATTAGGTGGTCTAGACTTAGATAACCTATAAGAT
ATAGAGTGCCTTAGAGCACTCTTTTATTTGAATATAATTACTAGGAGGATATTAAATGGC
AAGAGCAAAAAAAGGTAAAGAAGTCGATTTAACAGATTTAAATACAATTGATTTAGGTAA
AGAATTAGGATTAACATTGCTATCAGATACAAACAGAGCAGATATTAAAACGTTATACCT
ACAATGGTTCCTCAGTATGACTATATTTTAGGTGGAGGTATTCCATTAGGTCGGTTAACA
GAAGTTTACGGTTTAACTGGCAGTGGTAAATCTACTTTGCAGTTCACTTATCTCGAATTG
CAACACAATTAGGTGTTATCACTATTTGGATTGATATTGAAGGAACAGCAGATAACAATC
GTATGGAGCAACTTGGTGTAGATGTTTCAAAACTATTCTCTATTCAATCAGGAGAAGGTA
GACTAAAAATACAGTAGAATTATCTGTAGAGCAAGTAGGTAAAGAATTAGAGTACTGGAT
TGACACTTTCAATGAAAGATTCCGGGAGTACCTATTGTATTTATTTGGGACTCATTAGGG
GCTACAAGAACTCAGAAAGAGATTGATGGCGGTATTGATGAGAAGCAAATGGGTCTTAAG
GCATCAGCTACCCAAAAGTAATTAATGCAGTAACACCTAAACTAAATGATACAAACACAG
GGTTAATTGTTATTAACCAAGCCCGTGATGATATGAATGCAGGTATGTATGGTGACCCTA
TTAAATCTACAGGTGGTAGAGCTTTTGAACATAGTGCTAGTTTACGTATTAAGGTTCATA
AAGCATCTCAGTTAAAACAGAAAAGTGGGTTAACTGAGTAAAGATGAATACCATGGTCAC
ATTATGCGTATTGAAACTAAGAAATCTAAACTATCACGACCAGGGCAAAAGCTGAAGCAG
ACTTACTATCTGATTATATGGTAGGTAAAGAAGATGACCCTATCTTATTAAATGGTATCG
ACTTAGAACATACTGTATATAAAGAAGCAGTTGAAAGAGGTTTAATTACCAAAGGAGCAT
GGAGAAACTATGTTACATTGAATGGTGAAGAAATTAAACTTAGAGATGCTGAATGGGTTC
CTGTACTTAAAGATAATAAAGAGTTATATCTAGAATTGTTTAGTAGAGTTTATGGAGAAC
ACTTCCTAATGGTTACTCACCATTACTTAATAACAAAAGTAATCGTAACTCAATTAGAAG
AGTATCAAGCTCTTGAAAACTACTATAAAGAATGGGCTACAGATAATAAACAAGAGGAAC
AAGAGGAAGAACTAAAAGGAGAATCTCAAGAAAAGGATTCTGAATAATAGATGGATAATT
TAATAGATAAAACATGAATCAGGTAAAAGAATCTTTGGGAATGCAAATTCCTCAGATGTT
CTTCCTTTACCTTATAAAGATATAGCAAAGAAATTTGAAGAAGTAAAGAAAAGGTGAATC
AATTATCATTGAAGAAGGTGGATTCCCTTATACAGATTCTACAGTGATGTATATAGAACA
TGTAACAGATAGATGGGCAGGAGGATATTCCTTAATTAGACATGAAGGTGAAGAAGTTAA
AGTACCTAAGACTATCCATTTCTCCTGATATATATGTTAAAGATAAATCACACAAAGTAA
GAATAATCTTCGAGGGGCTAATCCTTATGAAGAAAGCTAATAATGGTAATAGATATGTAA
TAGATATAGATGGTATACCTGTTGATTTTGAAAGGGATTTAGATAGTTTACTTAATAGGT
ATAAAACCTTAGATGGTCGTTATATCATAGGTACGCAGGATTTTATCTAATGATTTTGAA
AGACAAGAACTAAGAGAATATATTGATGAGCAATTTATTAAATTAGTTAAAGAATATAAT
ATTAGAAGTAAAGTGGATTTTCCTGGATATATTAAAGCTAAACTAACTTTAAGAGTTCAA
AATAGTTATGTTAAGAAGAATGAAAAATATAAACGTACTGAAATTATCGGTAAAAAAAGA
TTATACAGTAGAGTCTTTAACAGAAGATTTAAATGAAGACTTCGAGGATAATCAAATTAT
GAGTTATGTATTTGATGATATAGAATTTACAGAGGTTCAAAGTGAGTTACTTAAAGAATT
ACTTATTAACCCTGAAAGAGAAGATGATGCCTTTATCGTTTCTCAAGTAGCGGAAAAGTT
TGATATGAAAAGAAAAGAAGTAGCAAGTGAGTTGACAGAACTCAGAGACTATGTTAGATT
TAAAATAAATGCATACCATGAGTACTATGCTAAGAAAGAATTAAATAACCATAGAGTTAA
TACTGAAAATCATATTTGGGAAAACTAGTTACAGTGCCTTCCTTGTGTTATATTATTATC
GAGAATTCAATAATAAAGCATAGGGAAGGCTTTTTTCTATGTCTTATAGAATGCTTTAAA
ATAGATTACTAAAATAAAGATTGGAGATTAAGCTTATGGCTAAAAGAATGTTAATGATGT
ATTACAACAAGAATCTGTTACAGTAGCAGATAAGTATTTACAAGTTAAAGTTAACCGTGA
CGGTTATACTCGTACACATGAAGGACAATATGCGTACAAAGTAGTTTCAGAGGGAGAATT
ATTCTTATACCCTGTACAAACAGATGGTAAAGGTACATTAAATGTAATGAAGAAATCACC
TATTGCTTACACTGATGGAGACAATATCCATTTCGTAGTAAACACAGTAGTAGACCCTTA
TAATCACTCATTTATCCGTACTGAAGATATTAAAGGATTAGATAAAGGTAAACAACTTAT
TCAAGCTTTCTTAGCTTTCGTTGAAGACCGTTTCAAATTTGGTGTTTATAACGTATTTGT
TGCAAACAACAAAGAGGATGTATTATCTATTGTAGACCCTACAGATAATGATGCAGATGA
AGTTAAAGATAGTTTAGAGCACGCACATGAAGATGTAATTGCGGATTTCCCTGCTAGCCC
TGCTCGTAAGGACGTTAAAGGCGTAGATTCAGGAGAAGGTCAAGGAGACACTTCAGAACC
ATCAGCACCTAAGAACGTTCAAGTTACTCCTAAGGAAGACGGAGCAGACGTATCAGCAGA
ATAATATATAGATAAGGATGGTAAATTGGCTAAGTTAAATTTATACAAAGGTAATGAGTT
ACTAAACAGCGTAGAAAAAACAGAAGGAAAATCAACAATCACGATTGAGAATTTAGATGC
TAATACGGATTACCCTAAAAGGTACTTTTAAAGTATCATTCTCAAATGATTCAGGAGAGT
CAGAGAAGGTCGATGTTCCTCAGTTTAAGACAAAAGCAATTAAAGTTATTTCAGTTACCC
TTGACGTTGATAGTTTAGACCTTACAGTTGGAGATACTCACCAACTATCAACAACTATCA
CGCCTAGTGAAGCATCTAACAAAAATGTGTCATTTGAATCAGACAAATCAGGTGTTGCTA
GCGTAACATCAGAAGGCTTAATTGAAGCAGTTAGTGCAGGAACAGCTAATGTTACTGTAA
CTACTGAAGATGGTAGTCACACTGATATTGTTGTTGTAACAGTTAAGGAACCTATTCCTG
AAGCACCTGCAGACGTAACAGTTGAACCTGGTGAAAATAGCGCAGATATTACTGTATAGG
AGGACAATAAAGAATGGAAAAGACATTAAAAGTTTATAGTAATGGTGAAGTTGTGGGCTC
TCAAGTAGCTAATAACGATGGAGCTACTACAGTATCTATTACAGGCTTAGAAGCCGGAAA
AACTTATGCTAAAGGAGATTTTAAAGTAGCATTTGCTAATGATTCAGGTGAATCAGAAAA
GTAGATGTTCCTGAATTTACAACTAAAACTCCTACTGAAGAACCTTCAGGAGACGCATAA
TAATTAAGACCAACTAAAAAGTTGGTCTTTTTTTTATTGACAATTTATAATATCTATGAT
ACACTATATAAGAATTAAGAAAAGGAGGAAAGTAATGGATATTCCAACAATATTATTTAG
AAATCCATATGATTATACGAAAGTAAAAAAATTAATGGAAAACAAAGAGCAGTATATTGT
AGTAAAGTTTGATTCTGTTTCTGTTCATAATTTAAATGTTCAAGGTATGATGAATGTCAT
CCAAGATTACCTACACATCTATGGTTACAGAGTTAAAGAGTACGGACAAGAAAATTCTTC
TAAAGATGATGAAAGAGACGTTAAAGGCTACTTATATGAAAGAGTAGGTGAGTAGGGTAT
GGGAATTATAGTAAACTCCAACCATATTCAATCAGACACTTTATATGAGTATGATAGCTT
TTTTTGATATTGAGAAAGTAGATACATTTGAAGAAGGATTGCTTTCAATACAGGATGAGC
CAACTGTTTTAGCAGGATTCATCTATGATGATATCACATTTAATAAGGTCATTAATTCTA
ATTCAGATATTGATGATTATATTAAGAATAATGATAATAATTATTTTTTCTGAGAAAATA
AGCCAAATACTAAAAACAGATAAAGCATAGATAGCTGATAGATATACTATATTAGAGTTA
CCTTACTTTTATCTTTTCTATAGATAGAATAACCTAAAGACGTTGTAACACCACTAAGTA
TAAAATAATAGAAACAAAAAAAATTATAGACAGAAAAAAGATACGATAATCATTGTTAAA
CACCTATTTCTTTTGACCTATTATTTCTAGAACTTTTAGATTACACCACTAATATAACAT
TAAAAGCCAGTCATAAAAGTCAATTGTTAGATTAATAATATAATAAAAAAAAGACAATAG
GAGGTTAAAGTGGTTGAATAATAACATAGCTATATTCATATTCAAAACACTGGTTATCAT
TATATTCTTACTACTAATTTTTGTCTGTTATTAATTCCTTGTCCTTATTTACTCAATAAG
ACCGAGTGTGGTTATGACATACTTTATCTTTGGTGGTATTGTTTCTAATGTCACTTACTG
TAACAGATAAGTTCTTACTGAAGAAAGAAGGCCTACCTGAATATGTTCTTAAAAGTAGAG
ATAAATGATAACAAAATAAGAAATAAATTCCAAGAAAAATAATAGAAAGCAATTATGGCA
TAACAAAGCAGAAGAGATAAAAGAAATAAAAAAAGCTACAAAGAAGAGTAGAGGAAGCAT
AGTAAAGGAAGATTACAATGAAAACAAAGAAAGCAAATTAAAGAACAAAGGAAAGAAACT
TAAGGATGGTGCTACATCTGTTTCTTTAGTAAAAAAGGGAGATAAGAGAATACAACTCAG
TAGTAGAATCTTGTAGTCTATGTGGTCAGCAGTTATCAGGTATGAAATTAATAATTAAAA
GGAAAAGCATCAAAAAAAGTTAATCATTTTCATTTACAGTATTCTAAGATATTATTTATT
TTGATATTTGCGCAGATATCAACAATTGTTATAAAATTCTAAGAAAACGAGGTGAAATGG
ATTGAGGCAGGAAAATATTAGAGATATAATTAACAAGAAAAAGTTAGAAGAAGAGGATAC
AAGAAAATATATAGCTGATGGGTTTTATGAATGGTATCGGTAAATTAATGTAATGAATTC
AATAAGAAAGTAGATCAAAAGAAATAGAAGTTAAAAGACCCGAATGAGTACAAATTATTT
GTGATATTCTCTCAAATGCAAAATATGGTCAATGAAACTTCTGAAGGAGAACATGCCTCA
ACTATCTAGACCTCAACAGGAATTATTTGATGAGATTACAACAGAAGATAGTAATGGAGA
ATCTACAGTTGATTTACAGAAGACCTTATCTAGAAATGTCAGCGGAAGATATTGCAGCAA
TGAAATTTCTGAAAGGAAAAAGTAATGAATGAGGAAAAATTCGAAGAAACATTCTAAGGA
GAAAGATATAAATGGATGGAAAAAGAACTAGTAAGATAGCACAAGAAACATTTCAAACTG
AAAAATAACAAGAGAACAGATAGACCATATAATCAATATGCTAAATCCTTTCACCATATG
CTTAAGTATCATACACTGAGAGGGCATCCTATAACTTTTAGTATTCCTAATAGAGATGAA
GTAAGCACAGGCTCATAGACCTTGGCAAACTAGGATTGTAAATGATACTCATCCTAATAA
GGCTGTAATAAAATCACGTCAGTTAGGTCTTAGTGAAATGGGTGTAATGGAAATGGTTCA
TTTTGCAGATATGCATAGTTATGCTAACGCAAGTGTCTTACCCTGCTACAAATGAACAAA
TGAAAAATTTGTTCAGTCACGTTTGAACCCTGTTTTAGAGAAAGAATATTTTAGAGACAT
TGTTGATTGGGATAAAGACTCGTTAGGTTTTAAAAGATAAGAAACTCTAGTTTATTCTTT
AGAACAAGTTCTAAAGCAAGTACCGTAGAGGGTGTGGATATTGATTATTTATCTTTTAGA
TGAGTATGACAGGGTAAACTTATTAGCAGAATCGTCTGCATTAGAATCAATGTCTTCATC
ACCTTTTAAGATTGTGAGAAGATGGAGCACACCTTCTGTACCTGGGATGGGTATACACAA
ATTATACCAACAATCAGACCAGTGGTATTACGGTCATAGATGTCAACATTGTGATTACTT
AAATGAAATGAGTTATAATGATTACAACCCTGATAATCTTGAAGAAAGTGGAAATATGTT
ATGTGTTAATCCTGAAGGTGTAGATGAGCAAGCTAAAACAGTACAAAATGGCAGTTACCA
ATTTGTTTGTCAAAATGTGGTAAACCACTAGATAGATGGTATAACGGTGAGTGGCATTGT
AAGTACCCTGAGCGTACAAAAGGTAATAAAGAATTTACGGTATCTAATAACACAAATGAA
CGCTGTATGGATTTCTGCTGATGAATTAAAAGAGAAAGAAATGAATACAGAATCTAAGCA
AGCATTCTACAACTATATTTTAGGTTATCCTTTTGAAGATGTTAAACTTAGAGTTAATGA
AGAAGATGTTTATGGTAACAAATCACCTATTGCAGAAACACAATTAATGAAACGAGATAG
ATATTCTCATATAGCTATTGGTATAGATTGGGGAAATACTCACTGGATAACTGTTCATGG
TATGTTACCTAATGGTAAGGTAGACTTAATACGATTATTCTCTGTTAAAAAAATGACAAG
ACCTGATTTAGTTGAAGCAGATTTAGAAAAATAATTTGGGAAATATCTAAGTACGACCCT
GATATTATAATTGCAGATAACGGGGACTCAGGTAATAATGTTTTAAAACTCATTAATCAT
TTTGGAAAAGATAAAGTATTTGGATGTACTTATAAATCTTCTCCTAAATCTACCGGACAA
TTAAGACCTGAATTTAATGAGAACAATAACAGGGTTACAGTGGATAAATTAATGCAGAAT
AAAAGATACGTACAAGCACTTAAGACAAAGGATATAAGTGTTTATAGTACAGTAGATGAT
GATTTAAAACTTTCTTAAAACATTGGCAAAATGTTGTTATTATGGATGAAGAAGATGAAA
AAACTGGAGAAATGTACCAAGTTATCAAACGTAAAGGTGACGACCACTATGCACAAGCAA
GTGTCTACGCCTATATAGGATTAACAAGAATAAAGAACTTCTTAAAGAAGGAAACGGTAC
AAGCTTTGGTTCTACATTTGTTTCTACTGATTACAATCAAGAAGGAAATAAACAATTCTA
CTTTGATGAATAGAGGTGAAATAGACTTGACAGATAAATTATTTTATGGTACAATTAGTA
ATGAAGAAATTAATAAAAGTGTATTGAATTTGTTATTGGGTGAGGAATTATCCTTAGATT
ATGTTTCTAAAAATAGTGATATTTTAGATGTTAAATATGAACATGTTTATAAATCTCTAG
GATTCGATAATTTCTTTGATTGTTTTATATGCTAATAGAGAGCCTGAAATAGTCCATAAG
GTGGAGATAAAAATCTTGGTGGACTAAATAAGGTTAAACGTACTGTTATTCGTAATGGTA
AAGAAATGGAAATGACAGTTTACGAAGATGGTAATAAAGAGAACGATAGTAAAGAAAACA
AGAAGGAAAAGAAGAAGTTAGTAGAAGTGCAGTAGGAGCAAGAGCTATTTCTAATGGTGA
AGAAGGAAAGGTAAACCCTAAAAAAGTAGCAAATTCATTATCTAATTTAAGTAAAAAAGG
TGTAGATGTATCCCATATTAATACAAACTCATCATTGTATAAAGAGTTTGTTGATGATAA
CTGTTGATACAATAGGAATTACATCTTTTAAACGAACTGAAAATGATATAATATTAGAAT
CTTATGCAAGTTCACCTGATTCAGATGGTGTAGGAGCAAGAGCTATTATGGAATTATTAC
GTTTAAGTATTAAAGAAAATAAAATGCAGTTGTGTATGACATAGAATTACCTGAAGCAAT
AGAGTATTTAAAACTTTAGGATTTAAACCTAATAAAGATGGATACATCTTAAGAAAAAAG
ATGTAAACAATTCTTAGGTGATTATAGTGATTTTATTTAGCACTATAGTCATCTATTCTA
TTGTATTTATTCTATATATTGTATTAAAACAATTTATATAAAGTCTAATATGAGTAGAAT
AGATAACACAACTGAATTATTAAAATATTACAGGAAGATATTGAAGGTAAGATAAAAAAA
AAGGAAGGAAGAAATAAATGACTTTAGAAGAAAATAAATTAACATTAGAAGAATCAATAA
CTCCACTTAGCAAAGAGGAGAAAGAAGATAGTATTAAAGAATTTAGCAGTTTATTATGTG
AAATGGTAAATAGACTATATAAGTCTTATAATGTATTTAGACAAGACCCTATGGATGAAA
CTCAACGTCTAGATGGCTCTTTAATGGTCTTTCAAAGTAGATTAAATGACCCTTTAACAG
GAGATTTACATGATAAGATGTATAAACTTGCTTTCAAAACGTATTGATATTTTCGAAGCT
AATAAGCAATTTAGAAAAAGATGTAGAAGCAGGTAAAGCAATTGAGTTAGGTGATGTAGC
TATTATAGATACAGCATTAAGTAACATCCTTTCAGGCAATGAGTTCCAAGGAAGTATTTC
ATTTATGCTTAGAAAAGACTTTGAAGAAAAGAACGAATTAGAAAAGAAGAAGAAGAGAAA
CTTAATAACTTATAAAGGGAAGAATTATGAGACTATATAAAATGAGGTATCATAATTGAA
AAAGAAACCACAAGGTAATGAGGTAATCATAACCATAATAACGGTTATGATAGCAGTATT
TGTAGTCATTATGACCATATTTTTAATAAATATCAAGATGCTAAAGAAGATAAAGATAGA
TATCAAAGATTAGTAGAGATTTATAAAAAAGCAGATGATAATGATGGTGAGACTAAAAGA
AATATGTTAAAAGATTAAATAAGGCTGAAGAAGAACTTAAAAAGTAAAAGAAACAAATTA
TAAAGATTATAATAAGAAGTCAAGTAAAGAAAGACAAAAAGAAGATAAAGAAACTAGAGA
GAAAATATATGATGTAACTGGTGATGATGACTTAATATTAGTAAAAAATAATATTGAGTT
TAGTGATAAAGTAGACAAGCCCGAAATACTTATTAGTGAAGATGGAATTGGTACGATAAC
TGTTCCTGTAGATAGTGGGTATGAAAACAAACAGTAGGTTCTATTATTACTAGTGTATTA
GGTTCTCCTTTCCTATCACCTGGTTCAAATAGTATAGATGGTTTAAGTGTTATTAACGAT
AATGTTTATCCAAATACAGTAGATAGCATAGTAGAAGATACAAAACCTTCTATTAACTTA
CCAACGGATAATCCTATTATAACAAATCCAGTTGAACCAACTATACCTTCAGATATTATA
CCTCCTATTGATAATCCTTCAGTTCCGATATCTCCTGAGAACCCAGGAGATAATAATCAA
GGAAATACAGATAATCCAAATCCTCCTCCAGGGTACACAGATGAAGATGGTGGAAGAGGC
TCCGGTGGTGGAGGAAATTCTGAACCACCATCAACGGAAGAACCTTCGGATAATGGTAAC
ACCGGAGGAGGAGATTGGGAAGAAAAACCTGACCCAGGAGAAGAACCTTCAGATAATGGT
AATACAGGAGGAAATGGTGGAGAAGTTACGCCTGAACCTGAACCTGAACCT
SEQ ID NO: 12
TTGTCATAATAATCAAATCCTTTTCTGTTTGTTTTGTTATCTTAATAATATCATGGTTTC
AAGTGACTGTCAATAGTTTTTTTTAAACTTTTTTTATTTAGGTTGGAAGCGGTTGACCGC
TTCCCTTACCTTGTATCTTAATATTAACATCTATTGTTTAAGTTGTCAAGCCTTATTTTG
AATATTTTACAATTTTATTTGCTTTCAAGAAAGTAACATCTTGACGGTAGTTTTTTAACT
CTTCTGTAAACCTTTCATTATTTTTCATGCCGATTAAGTTTAAAGTTGTTGTGATTTTTT
TCATTTTATCATTTCCTTTATTGATTTATTTGTTATCTTAATATTAACATGTTGTTTCTA
GGTTGTCAATAGTTATCTTAAAAAAAATATTTATATTATCTTGTAGTAGTAAAACCAGTT
TACAAGTTTAGGTGTGACTGTTGCAACTAAACCCCTATAATAAGTAAGAGAATGTTATCT
GTTTTTGTGTTGATTTGATTGTTTTGTTTTTCCATTTAAATTTTATCATTTTGTTCAATC
CCTTTCATTTGGTATACCTTTATATTAAACTATAATGATATTAAAGTCAATAGATTTAAT
GAAATTAATTTAAAAAACTTTTACATTTATCTATTGACATTAAGACCGAATTATTATATA
ATGGAAGTGATACCAAAAAAGGAGGAGTAAAAAATGGTTGAAAATAAAATTAATGAAATT
TGGAAACCTATAAAAAAAGAATACTTTAATAAATATAATTTTTATGTTTCTAATTTAGGT
AGGGTAAAATAAATGATAGGTTGAGTAAAGTACATCAAGACCGTGACGGATATTTAACCG
TAAGGGTCAATAATAAAAACACATGGTGCATAGACTTGTATATGAATATTTTGGCAATGA
TTTTATTAAATCAAACCATGTACACCATATAGACGGTAACAAACAAAATAATTGTATTGA
TAACCTAGAATGTATTAGCCCGTCAGAACACAATAAAAGGCACCATAAAGACAATACTTT
CAATAGGTATAATAGGGTTATGCATTAACAGAAGATGAAAGAAAAGCCATAGCAAGCAAA
TACAAGCCTAGAAAGTACACTCAACCTATGTTAGCAAAGGAATATAATATAAGTGAAATA
ACCGTTAGAAGAATTATAAAAAATATAAAGATTAAAGAAAAAGGGTTGACCTTTTCTTTT
TTCTATAGTATACTATAAGTATAGTAAGAAAGCGGTAAGGAGCCTACGTGTCCGCTATAT
AAGAGAAGAGGTTCCGGGAAAGAGTGGTTTTAAAACCATTTAATATAAATTTTTTATATA
ATAATTTTTTTATACTAAAAGGTCTTCACTTCATTATACCATAAAAAATACAACCTTGTC
AACAGTCAATTTTACACTAATTTATTTATTAAATAATTTTTTTATATAAATTAAAATAAA
TAAAATCCCTAGAAATCTAATCCTAGGGAATTGTATAATTTTTTTTATATTATTGTATTG
CACTTCTATTATATCTTAATTTCATAAATTTATTATAAGTTTGTTTACTGTTAAATATAA
TAAATTCATCTGATTCATTTTAAATATATTGTGTACAGTTTGATAGCTCATATATCCATT
TTTGCTAAATTCCATAAAGTTTTATATCACTATTATTTTTTTCTATTTTAAATTTCATAT
TATCATATCCTTTTATATAATTTTTTATTTAATTCAGAAGCGGTTATATTCAACCGCTTC
ATATTTAATTTTATTGACTAATTCTATTTGTTTTAACTTGTGTGTAAGCATATTCTAGAG
TATCCGCTATATTATAACTTTGAATACTACACCACCGCCAAACCATTTAGCAGTATATTT
TTTAAAGCCGTATAGTTTATTGATGTTGTCATAGTCTGCTAGTTTAATATCTAAATCCAT
GAAATGCACTACATAACGTGGGTTGCCGTTTGCGTCATTTGGAATTCTGAAAGCCGTAAT
GTCTTGCCCTTGTACTGTGTGAGTTTCTTCGTATAAGTAATTTTTTGTTTGTCATAATAA
TCAAATCCT

[0139] In another aspect, the invention provides a U136B bacteriophage targeting an E. coli bacteria. In certain embodiments, U136B binds a molecule of TolC. In certain embodiments, U136B binds a molecule of LPS. In certain embodiments, the U136B bacteriophage has a genome comprising a nucleic acid sequence comprising SEQ ID NO: 13.

U136B
(SEQ ID NO: 13)
CTGCTCTTTTGGTTAACGCAATTAATGAAATGATTGATGATTCAGATAAGCAGAATGAAA
CCATTCAGAAGCAACAAGATGAAATCAATGAGCTAAAAAATGAAGTAGCAGAAATGAAAA
AGATGATCGAGGAAATGCAATCAATGTTTATTCAGATTGCTAAGTAATAAAAAAGGAGCC
TTTCGGCTCCTTTTCTTTTATCAGAATGGGATATCATCATCAAAATCCATAGGCGGCTCG
TTGTTTTGAGGCGCTTGCTGGCGTGGCGCTTGTTGTTGCTGTCGAGGTTGCTGCTGTTGT
GGCGCTTGCCCTTCTCCGCGTTGACTGAATAAAAGATTAGGAAAACCCGCCGCCGTCAAT
GTGTTATAAATCTGCCCGTTGTATTCCTGGCTATCAATGCGTAACTGATCGCATGATACA
GAAATAACTTTACCCTGCTGAAATGCTTCACGATACCAATTATTCATGCCGTCGCTTTTA
GCATTAAAGAAGAATTTGTAATTGGTGTATTGTCGATTACCTTCACGATCTTTAAATGAC
TCCGAAAGCTCAACGATGTATAATGTGCCGTTTGCGCCTTGCTTTACAAATGGCTCTTTG
CGAATTTCTCCGGTGATTACGTGCATTCTTAATCCTTATTGGGGCGTTACCGCCCCACGT
TAATTTATTCAAAGTCTGTGATAGATTGAGATTTTACTTCCTGTTGCGGCTCGTTTTCAA
CATTTTCCTTCTTCGCAACATTAGCCGCTGGCGCTGCCGGATTAAAACCGCGAGCCTTTC
CGATTTCCATTTTTGCTTTTAGCTTGTCGTAATGCTCTTTAATGATTCTCCTGTTAGCCG
CGTCAGATTGCTTGTAAGCCGTTTTAAACGTTTCTTGCAAGTCTGTAAGGTTATCGCAAA
CATCAAGATCTTTTTTCCAATCCTGCGCGTTTTTGGTGGCAAGATTTGCGTCATCGTCAG
CCGTTGCCAGGCCAAGAGCCGTGCAAAGAGCATAACGTCTCGCATAGCTGTTTGTTGAGC
CGCCGCCTTGTGGATCTAATTTCTGCATTGGCAACGTGAAACTATATTCAACCCATTCAT
TTGATTCAACATGAATGAATCGCGTGAATACAGTCATTGATTTAAGATCTTCACTGACTT
TCTGATCTTGCGTCAGGAATAAACCCTTATCAGTAAGCCCAGGCATAATTGCATCAAGAA
CACTGTCAAGCGTTGCATATTTATTTTTAAGGTGCGTATTTTGCTTATCCTTTTTTACTT
TTGTGAATAACTGACGCGCCTCAAACAATGCCTTAATTACGTTTGCGTTTTGATCTGATA
ATTTCATTTCATTGACTCCGGTTTAATAATGGCGGCTTGCGCCGCCGTGTTAATTAATGC
TTTTCTTCGTTATCGTTGTGATAATCAATCAAATTCTGGATCATGATTTCACTTGCCTGA
TTAATCATCTTGCGGTGTTCTTCGTTATTTTCCATTTGAAGAACCGTTAACACAACGTTA
TCAATCGAATATGCAACCTTGCGAACATATTCAAGAGTTTCCGGTGATTCGCTTGGATCA
ATTACGCGCAAGAACTGGCGTTGCATAATTCCTAATGCGTTTACAAATCCGCCTACGTGA
TCGCGCACATCTTGAATGTCTTGCTCATTGAATTGCTGTTCCATTTTTGTTTCCTCTCTC
TCGTTGGTTGATGCGTGTAGTATACCACGCATCGAATGGCAGTTTTAGCAAAAAGTGCTA
TTTATAAAAAACCTTTGTATTGACGACGAACCCAATCAGGCGTTTGAAGGTCAATTTCCG
GCTCTCCGTTTGCGTATGAAGGCCAAACGTCATTTACCTGGCATTCTGCAAACTGGTTTA
TCACGCTCATGTATTGAAGTCGTCCGATCTTCAATTGTTCATCCGTCATGCGGTATGCAA
TCGGTAAATAAGGCTCTTTCTTTTCCTGCGCCAGCAATCTGACTACTACGGGGCGCGTTT
CTTCTGGATACGCTTTCTTGAATAAGTCATGTTGCAATGCCATTTTCAAGTAGTAGCCGT
GATTGAATGCCAGCCTTGCAAACTCTGACGGGTTAGCGCTTGACGTTGTTTTATAATCCG
TGATCACAATCGCTTCATCAAATCGCGTTGTTTCATATACCGGATTACCTTCACCATCAT
AACCGGAAATCACCGTTGCAAGCACATCTTTGCAAATATCAACATGGTCAAGCCTTACTT
TGACTTTCACGCCTTTGATAGTTCCGAAAATTGATAGCTCGCGTTGTGCTGTTGGGCTAT
TCATGCAAGCGTTGTGTTCAGGTATGCTTTCCAGTACGCGGCGCATGGTAACGCAAGCGT
CGTAATCTTTAGCCGGAACCAATTCAACGTTATCCGCTCGCGCCTGGCTTTCTGCGATCA
TTTCAATGAGCCATTGCACATTTAGATCCTCACCACAATCAACCATCATCTTAATCAGAT
CTGGATACGTTTTCCCGCTTGTACCAGTCAGGCCAAAAGATTTTAATTTCGCTGCCAATG
CTGCCTGGCTCGTAATCAGGTTTTCATAATCTTCCGGCGCTGGCGCTCTGCGGTACTCTT
TTGCGAATAGCTCACTACTCTGGAAGTTTGTGTGTGACTGCGTACCGAAAACAAGCGCTT
TGCTTTCCTCGCGTGGTCTGTATTTCCACGCTGCCGGACAACTTGCAAAGATTTCTGCCA
GGCTTGAACCGCTAACGTATTCAGCCGCCCAGCCTTTCGGATCGTGATATTCACCGTTGG
TTAACTGGTCAAAGGTGTAAACTTTAAAATCGCTCATTTATTCATCCTCTCGTTGGTATG
TCTGCATTATATGTGAATGTTTCATGTAGTCAATACCATTTAAGTGTTCTTTTTGTTTTG
AATACGTTTACAACTAGCATTGACAACAAAATCACATCGTAAGTTTATGATTTTACTAAT
TGTTGTTTTTGTGTTCCATTGTTCACGCATTTACGCCGCATACCATATATAAATACATAC
CATGTGATATATAACCATCAACCAACACAAAACACACAACCACTACAAACCATAGAGAAC
AATGGAAACAAGAAGGATACAAATAGATATATATAATAATAATTAAACTCTAAGTGTATG
TATTATATAGATATTTAATTTGTTCTTTTTGTTGTCATAACGTTCTCAATTCTACGCCGG
ATTAAGTTGTGAACACCGTAGAACAAAAGAAAACAAAATGCCCCGACCGTTAAGCCAGGG
CATTGATTTACCTCCTTTTATGCTTTGAATAGCAGTATTGTTAATACTGGAACCGCGTTA
GCGTGGTTCAGGTTGCCACCATATGAAAGCGTTGTTGCGTTACCCGCTGGTAACAGAAGG
TATCCACTTGAACCGCCATGCATAGCCGTAGCTTGAACGTTAGCCAAGCGACCGCCATAT
GATGAATCAACCCAAACAGTACCACCGCCCCACGTACCGCCTGAATAGGTATAGCCATGC
AAACCAACATAAGGAATCACAAGGTGTCTGTCGTAGTTTACTGCCGGAATGTGAACCGAT
CCGTTAAACCCAAGCACAACAGCCTTTGCAACGTCGCCCTCGATTTTTTCAGCGTAAACA
GTACCCCTAAACCAACCATCAGTAGCGTAAACGTTACCAGTGAATGATCCGGCGTTTGCG
TACACTGTACCCCTTACCGTTATCTGGTTAAATTCAGCATAACCATTCTTATTAATCATC
CATCCAGCCGCGCCGCTGCTCCAGTTGTTAGAGTTAATCTGATCCGCAATCTGAGCGTTA
CCAATAGAGCCATTTTTCACAAGCAAGCTGTTGATAAACACCTGATTATTCTCAACAACA
AACGGTAGTGTAAAACCTCCGCTCTGTTGGTTGTTTATGATCGCAAATCGTCCAGCATCA
AACAGGAATTGTGATTTAACTCCTGATCCGTCACCAACAAGGGAAAGAGCCATACCAGCG
CTATATTCCTGCCCGTTGTAACGTAACCCCAACTTAACGCCGTACATCGCGCCTACGCTA
TCGGCATTAACCCAAGAATCAAGTTTCTGGTTAACCGCTGATTGGGTATCACCAATTTGA
GTTGATAACGCCCTATCCGCTGACGCTCGCGCTTCCGCTTCATTGGTGATTGCCTTGTTA
ACATCAGTTATCTGTGCTTTGATATCCTGCTTAACACCATCAATTTCGCTCTCAAACGTA
GCTGTAAGCTGATCAATCCTTTGGCTAATGGTTTCAGTGCTGTTAGCAATTACCTCTCTC
AATTCGCTATTTTGAGCCGTTAATTTCTCGTCAAATTGCGCACTCATTTGAGTGACCTGC
GTTACCCTTGCTTCTGTTTCGTCTGCAATGAGTTTCAGCGATTGCAAGAACTCCGCTTTA
CGCTTGCCGTTTTCAACTCGCATACGTCGCACATCTTTATCATTCGCTAATGCGTTTTCA
ATCACTGATTCCGCTGTGCTGTGGATCTTATCATTGGCCTTTATTGCGTTTTCCTGTAAC
CACTTATATCCATCAGAATTTTCAATATCGACCTTAATATGATCCGTGATAATGCTCGTA
TCGTCGGAAGCCATGCCGCGCACAAAGTCAGTCCAATCAGACACATTCCCGATTTTGTCA
ACTGCCCTTGCCTTGTACCAGACAACATGACCCGCTGGCAGTATTGAATGCCAATACTCA
TATTGCGGGAACGGAACAAGCGTTAATAGCGTTGCTTCGTCAACTATAGGATGACCATCA
GCACCGTTTGGCGCTTGATGCAACTCTATATAGGCCGTGTCTCCGCTTCCCTCCGGCATA
CCCCATTTTACGCGAATTCCGAAAACCTCATTATCTGACGCTGTAAGGTTAATTGGCTTT
TCCGGCTCTCCCACTTTTCCGGTTAATCCTGCGCTTACTATTGCAGACCATCCAGACGCT
GAACCATTAGCCGCAACAGATCTAACCCTTACGTGATAGTTACCCGCATAAATACCTTCA
ACTTCCGTTTCCTTGTTCGCGGTTCGCGGCGTATTGTTCCAGTTGCCATTGTCTTTTCGC
CACTGCATTTCATACAGACTTGCGTATTCAACTTTATCCCATGAAACGTGCATTGTTTCC
ACGCTCGCGCCCTGAACAACTCGCGAATAAGATTCGATCTTGACGTTTTCAGGTGCTGGC
AGAATGTCAGGCTGCACAATGGAAGTAGGGCGATCATCAATGTTCACACCATAATCAATT
TCATCGTACTTGTTAGCGTCGTATTCAACAGCCGTGATGTTGTATACAAATTCTTCATCA
CCATCACCTTTAGTTATTCCTGTTACTACATAGCGTTGCTGGGCTATATCTGTGCGCTCA
ATTGCAAAAACCGCATCCGGCTTAACGTCAAAGCCAAACGTTGTGTTTAGCGTTAGCGTT
TTGCCGTCATCGCTCACACGCGCAATGGTTCGACCAACTGGCTTACCATCCGGCTTATTT
ACCAGAATGCGATCACCCGCTCTTGCGTCAACCTTAAACGGCGTGAACACCTGCAACCCG
TTAACCTCCATCAATCGACCTGATAGATTCAGCGTCAAAGCGCTTGACCAGAAGTTATCC
GAAACAACAATTACATCGCCTACCGTTGGGATCATACCTTCCAGGCCAGTAGCAAAGTTT
ACTGTTGTGCTCTTGACGTTGGTTTTCAGAATCCAGCGCCCACGGCGATTAGCCTCACTA
CGTCGAGTGCAACCGATAGCAGTTATTGACGTGCTGTTATATCCAAAGCGTAACGCCGCC
TCCGTTTCGAAAACTCCCTCAACATCCTGTTGATACATGTTTTGTTCGTCGTCGAAAGTC
ACGTTACATTGCGTGTACATGCTTTTCTCGCTGGCAAACGTGTAAGTAAACTCACCATTA
ACCACGTTGTCATTGGTAAAGATGTATGACGCATCGCGCGGCTTATCGATCACAATTGAA
AGGCTTTCACCGTTCCAAAAACTCATTCCTCGAAAGATTGAGCAAATATCACGGACAAGC
TGATACGCTTCTACCTGGCTCTGGATCACAACGTCGCAAAGATAGCGCGGCTCTGTTCCG
CCTTTACCGTCTGGAACCATCTGATCGCAATACTGCGCACATTCGTAAATGCTCCATTTA
TCAAGCGCGATGCCTAATTCTCTTTGATCGAGTCCGTAACGCTGATTGGTAATCAAATCA
TACAGAACAAAAGCAGGGTTATTACTCCATGCCTTTTTCCAGGTTCCATCCCATGACCCT
GAGTAAGTGCGGGAAATAGGATCATAATTTGACGGAACATTAATGATTTTCCATTTTTTC
TTAATGCTGATATTCGGCAACGCATTAGGGAATAATTCGCTGTCAAACTCAACATATACT
AAACCAGTCAGTGGGTAACGAAATTTAGCGTCTACAACTTCAGCATAGCTTTGCATTTTA
ATCAGATCCGTTACCCTTGCTGACGTGCTATCTGTCAGGCGACGGACGCGCAATAAAACA
CGCTCATTGAAAGCAGGTAAATCAATTCGGCGGCTTCTGTCGTAACCGCTCATTGTTTTA
CCTTCAATTACATCATACAAAACCTCTTTATATTCAGCACCATCAACAGCCATATCAACA
GCATATTCAACGCGAACGCCTGTTAAATCTCCGTTATCCTCCTGCGTAAACCCTCGCGGC
ATTAAAATTTTAATACGGATCGCGGAAAGGTTTTTATTAGTCACGGAAATAATATAAGGA
GTTGCAGCCGTCAGATCGCGAGCAACAGTAATCTCACTCGCCGTGTCAGTGAATCCCTGA
ATATAATCTTGCGTTTGTGATCCTGGTCTGAATTCGGCTTTAACATTCTGAAAGTTTAGT
GACCCGTCCTGATTCATAACCGGAACGTCATCAAAATATAAATCTTTTAATGAAAAGTCT
GGATCAACTTCACCATCAGAAACAGCTAAAAGAATTCTGATCCTGTTAATTGAAATCAAG
TTATCTTCCATTTCAACAGGTGTGTGCGGTTTAGATGAACCGCCCTTACTGCCAGTTATC
ATATTTTTAACCATAGCGTTTAACCTTTCTTGCTATTTAACGTGCTGTCATTGTACATGT
AACAAAAAACCCGCGCAACGGCGGGTTAATATAATTAGAGTTTATCTTCTGCGTATGATC
CAGCACTAAATATAGCGCCGCCAACCGTTCTATAACCATAAGGCAACGGAACCGGATAAC
CTGCCGCCGTGGTATTAACAGCACCGCCAAACGCATAAGACGGCTTGTTAGCTGCGCTCT
GGCTTTCCATTCTCATTCCTCCTTGTTGTGGGCTAATCATCTGCATTACTCCGCCAAGAG
CCATTGCACCACCCATCATAAATGCAGCCGATGAAAAAGCACCCATAGCCGCCAGCGATG
CACCACCAGTGAAAAACGCAGTGACCATAATAACAGCACCCAATACAACCTGAAATAAAC
CGCCGCTTTTTGAACCTGTTGGAACCGGAACAATTCGAACCTCGCGAGCGCAACGCCATG
CGCTATCATTATTCAAGCCAACATTTTTACCATCAACGAAAATTGCAAATTTCATCTTTG
ATCCGATTTCACTTTGCATAAATTCTTTGAATCCTTCAACCTGGCTTGATAATGCCCTTA
CGCATTCAGGCCAACTCTCAACGGCGTATTTATGGAAAACACCAAAGCGGCGACCTAATG
AGCCTGATAATTTTACGTTGATAACCTTATTCATTTTTCAGATCCTTATGTCTGCAAATC
ATTGTTGTGTGTTCCTGATACCATCCAGAATATAAATCAACTCGCGACAACTTGCCGAAT
GCATGATGCAATAGTTGATTGTTGCCTAAATAAATTCCTGCGTGGTTCCATACTGGCGCT
TGCAACTGCATTATGATCATATCACCTGGCTTTGGTGGCTCTCCTGTTTCTATAAAACCT
TCTTTCAAGTAATTATCTTGATAAAGGTTTTCACCATGTTCCGGCTTCCACCATTCATAC
GGCTTACGGAAATCATTCAGGATCACGCCTTGCTCTTTATGCCATGCCATAATAAGACCC
CAACAATCATAAGCACCAAGCGACCAGGGGCGACCAATCAAAGGCCGTGATTGTGGCTCT
ATGATTCTCATGTCTCCTTCTGGTATCGAAACGATAACCCAAGAAACACCAGTTTCATCA
CACATGCACAAATCGTGTGCGCTAGGGATTGTGGTTGCCCCTTCCCCTGTGTGGCTGTGA
ACTATGGCGATAATATCCGCGCCGCTATCCTCAACCTCTGCGTATTGTGTCGCGTCCATT
TCAAAATGCTTTTCCTGCTCTTTGCTTACGTTATCGATCCGGTGATATTTCTGGACGCGT
GATTTTTGAGTTACCAGGCCGCAACATTCATTAGGATAAACATCATTAGCGTGTCGCATA
ATTTCAAGTTTAATTTTTGCATTAATCATTGGTTTTTCCTCAACAGTGAAGCAACAGCCG
CTCCGCCGAAATCTAATTCATTTTCAGGACCAAAACGCAATTTGCAAGCTGTTACCGTTC
CGGCGCAATAATCCTTACTCGGATCTGTTACAGGATTATTATCTTTATCGAACATTGCAG
ATCCGTTATATCCGCAACCTTTACCGCTTCTATACCATCCACGTTGCGCCCAATAACAAA
CGCTTTGCGTAAGTCGTGGCGGGATCATAATTCCATCCATATCATAAGGTGATGTTAATT
CAAAACGTGCAACCGTCTGATTAACAAAATTTGGACGCTCAATATAATAAACCAGTTTTC
TATATGCGCCGTCCTCCACATTACCTTCATCATCAATTAAATCAGCCGATGTAACCCAAA
TTGTTACTTTGGCTTGCATCATGCCATTATATGATCTGATTAATGCAGATACGCGGCTAT
CTAAATTTGAAAGCGCTAATTGTGGTTTCTCTGCCTTTCCGTTACTTGTAAATCCTATGC
CAGTAATCCCAAAAGGCCGCGCCCCGTAAACCTCACCACGGAATTTAATGTCTTTAGGCG
GCAATATTCCAGTTTCACGCGCTTGCATTAATTCCTCTGGCGTGTACGCGATATTTTCAG
CATGAAAGCGGTAAACCTGAGCACCAAATTTTGTGCCGTCAACCTCGACAAGAGTAATAA
TCTCACCAGGAAAAAGCGATTGCAGACAATTTTCAAAAGTCTTTTTGATCTGTTTTTCAT
CCATATTTTATGCCCTCCAATAAAGCACCATTATAGACACAATAAAAAAGCCGCACAAGG
CGGCTTTGATTTATCGCATTGATGTAAATTCTTCCGTAAAAGTTGCTTTGACTTCCTGAG
CGGTTCGGCTAATTGGCGTTAGTCCAACCGTTCCGGCTTTTACGGTAAACAACCCAAAAC
TACCGTCTGGAGTTTTCCACAAGAAAGGCTTTAACCTGTGATCCGTCATAAATGCTTTAA
CAGCCTTATAATCATTGCCAACATATACAATAGAAAACTCCCTCCTTTCCGTGTTAAATC
CAGAAGATGCCTTTTGGCGATAGCCGTTACCAAAAACAACTTCCCTGTCGTTATTGGTAG
TTGTCATTACACCGCCGCCGCTCTGAATCTGCGTACACCAGGTAAATTCATCTAACATTA
AGCCCTCCCATGAACAAAATTATAAACCTCGCCACCTTGCGAGCATGACCGTTGAATCAT
TTCAGTGAAAATCATCTTGATACCAGTTTCCATCCCTTTTGGATCTTGACCGTTGTCAAT
GTTAACGTTGATATCACCAAATGCAAATTGCGATGCACCGCGATTGATGCCAGCGCCGCC
AGTTGTCACGCTTCCTACTTGACCGCCGTTTGCATAACCTCGCATCATGCGATACAGGTT
TTTAGCTCCGATTCTTTGCGTTGCCTCTTTGGTGAAAACAAACTCACCCTTATGAACAAC
GCCAGCCGGATCATATTTGCCACCGTCGCCAGTATAACCGCCGCCAGCAAAACCAGCACC
GCTTAAAAGGCTTCCAAGTGTCCAGGTTGAGCCGCCCATCATGCCGGAAATGCTATTGAA
GATAACCATCTTTGTGATCATCTGAACAATAAGGCTAATGATCGATTTTGCAAAGTCTTT
GAAGTTTGCTTGTCCAGTAGTCAAGAAATCAGCCATTTGTTGAGATAGGCCGTTTAACGC
CTGGCTCGCAATGTTGCCGATATTATCATACATGTTCATTGCTTCTTCGCCGTACTCCGC
AAAGGCATGTTTTGCACCAGATAACCAATCAGCACGTTTAGCATCTTCCTCTTTATAGCG
GTTGTCTAATTCATCCATCATGGCGGTGAGTTGCGGATCTCCTTCCTTACCTCCTTTGGC
AAGATAATCAGCCTCAACCTTTGCACGTTCAGCCGCTCTTGCTGCTTCACGCTCGCTTAA
CCCTCTGGTTTTGGCTAGTGCTTCTGTTGCTGCTTTCTGCTGCTGGATAAACTTGATTGA
GCTATCTTGCAACTGATTAAGTCGCGTTTGTGCAACAATCTGATCTCCTAAAATAGCTTT
TTGTTCAGCCATCGCCAGGATCTTATCTTTGTTTGCTAAAATGCTTTTTTCTTCATCAGT
AAGTTGCCGTTTTGTTGAGGCCTCTTGCAGAATCTGAATTTTAGCTTGTTCAGCCCATAA
AGATTTACGTTGCTGGCTTATGGTATCTGTGATCGTCTTGTGCTCTTTCAAAACTCTTAA
TTGAGTTTCTAACGCCAGGATATCACGCTGATATTGTTCTTCCAGCTTATCGCCAGCCGA
TACCTTAACTTTTTCAGCCTTTTGCTTTTTATCGCGTTTGGCTAATTCCTCGGCTTCCTT
CCTGATATTCTCCTTTGTTTTAGTAGCATATTGCTGTTCAACCGCCGCACGATTTTTCAT
CATGTCAATGTAACCCTGCTCGCCTTTTTTGACTCGCTCGTTACGTTCTGCAATTGATTT
TAATAGCTCCTTGTTGTTCTCTTTGGCGTTATTAATGATCTTCTGTTGTTGCGAAATTAC
AGAATTGCCAACATTATCAAGACCTGGGATTTTTTGCATCGTCTTAGTTGCCGACACAAT
AAATTCACCAATGAGAATATCACCCTGATTAAGCAAGTATCTAACCTGCTCAACAGTTCC
GGCTACAACGTCGATAATCAGGTTAAGCGCCGCCAGCGTGTGATCTCCAACCCATCCCCA
AGCATCTGACGCCCATTTTTTAATGTTCGTCCACATCTTTTCTAATGGCGTTGCGGAGTC
TGCCAGTTTAGCTAATCTCTTATCCATAACATCAGCAAATAACTTTGTCGCCGCCGTCAC
TGCTTCCGTTTTTCCTTTCGTTTTCTCCAGGTCTGCAATATAAGTTAACTGCCCTTCGCT
TAAAAAGTTGAATTGCTCGTTTAGCTCTGCAAGACCTTTAACCGGATCGCCAGCAATCTT
ATTAAAGTAATCGGTTATCTTGTCGCTTGATTCACCCGTTACCGTTGACCACTGAGCGGT
AGTCTTTGTGATCGATTTAATCTGATCAATCGTGAATTTGCCGGATTTTGCAAGCTCTGT
TGCGATGGATCGGATGTTTCCTATCGTCGCATCAGTGCTGTTATTAATGTCCTGCGCCAG
CTTATCGAACTGTGCGCCGCTTGTGCCAGCATAGCCACCAGTCAGCACCAACGCCTCTTG
CAAGTCACGTTGCGACTTATACGCATCATAACCAGCCTTAACAAGAGCACCCATTGAAAC
GGCTAATGCGGCAAGGCCAACGTTTACCGGATTAAGAAACGACAACAGCACTTTAAACGT
ATTACCAACGCCGCCGAAAGAATCTTTAATCTGCCCACCCTGCTGGATTGCAACCAACCA
AACAGGCATGCCGGAAGCCAGCGACGTTACAACGTCAGTGATCTGAGCCGGAAGTTGTCG
CATTGCCTGGTTATATTGCCCCGCGCTAATTCCGGTTAATTTCATCTGGCGCTCTTGCGC
TTTAAGCTGTGCAATGAATGGCGCGGCCTGAGCACTTACGCCAAGTTGCGCGGCTTTCAT
TTCCAGTAATTCAGATTTGGTTTTTCCAAGAGCCGCCGCCTGTGATTCTAGATCCGCAAG
GAAGCTCTTTCCTGCTGCCGCTGCTTTCTCTTTGGCGCGTGATTCTTCCAACGCTGCGCG
GCCTTCTTCCGTAAGAGCCTTTTTGTTGCGCTCCAATTTACTGATCTGAGTTTCCAACAT
GCTCCCTAATTGGAAGAATGTTTCATCAGGTACAATCCCTTTTTGCCATAGCTTATCAAG
ATCACTTGCTGCCTGTGACAGCTTGCGCATTTTTGCCGCTGTCGGATCAACTGTATCCTG
AATTCTCTTAAATTCACGGCTCTGTTTCGCTAATTCATCGGCTAACTGTTTAGCCTTTTG
CTTTGCAACTTCTTCCTCGTTAACAAAGCTCTCAACGCCTTTCTTTGCTTCGTCGTTGGC
TTTTTTAAAGTCCTGTAACGACTTAACAGCTTTGTTTAACTGCTCGACGTTCACGCCAAG
TGTTAAACCTGCAAATTGTTCAGCCATATATTTTACCCTCATAAAAAAAAGCGCCCGTAG
GCGCTTTATTTGTTATTTGCTTGCATCATTTCCAGTGCTTTTTGTTCCATGATGCGCAAG
TCATTTAAGGCCATTTCTTCATCTTCTATTTTATAGATTCTGAATAACATAGGCAAAACA
TTATAATCAAAACCGTAAGCACCAGCGCCAGCACTACGCCACTGTGTACCCATCGCGCAA
AATATATCCCATGATTGCATCATACTTTCATCAAATATGACCTCTGGCGGATCTTCTCCT
TCATAGTCTGCGCGGGTTAATCCTACGGCTTGCAATTCTGCATCTGTCGGCGGTTTCTGA
TAATACAGATAAACCGCCCGTTTTAGTTTTTTACGCGTTGCCCTGCCAGCGCACTTAAAT
AAGATCCCATAAGAGCCAGCGCCGCGCCAGGATAATAATCAACTAACAGTTGCGCGTTTT
CTTCGTTGAATTCTTCCTCCAGATCCCAACCCACGGCAACATTCATGATGAATTCAGGAT
CTTTAATACCTTCTTTCTGGTAAAGCTCTTGAATCTCGCTGGCCTTTTTATGCTTAACGG
TAAACACAATTTTTTGCTCGTTACCATCCGGCAATACAAATTTAACTGGAAGTTTGAAAT
CTGGAAGCGGGGCAAGAGTCAATTTCATTTTAGCCATTGTCATTTCTCCTGAGTGGTTAA
ATATTGAGGTGATATTACATCAAATAAAAAAGGGACGCAATGCGCCCCTTAATATTAATC
CTGGTTAGCAGGGAGGAAAGTAAAGCGACCTTTCAGGGATACCGACAAAGAAACGGTTTC
CATTTCGTTTACCGCCGTTTGTGGGATCTCGTTGAAAGAAAGCACACCAGCCCAAAGGCG
CATTTCTTTCGCTTTTGGTACATACATGCGCAATGCTTTAACGTCGCCGGATTCGTCAGC
CTTACGCAATAGCGGATAAATCGGGTTATCGTATTCATGCGCAAATGTGTAAGTCAGTGA
TACCGCGCTTTTATAGGTTGGTAACTGCTGCTCCTGGTCATCGCTCAAGCACTGGTAATT
GTAATACTGTTGCTCGCCTCCGTCCTGCCCCAAGTCCTGTACGCATGGGATCTCTGTCCA
ACCGTTGATTTTCGCAAAGCTCGCAGTTACAGCGCCAGCCGGGAAAACGTTAGTATCGGT
TGTGTCGATACCTTCAACAGTAACCTTAGTTTCTTCAGCCGCCGTCACACGCAGAACGCG
ATCAAGCAATTTACCCCAACTTGAGGCGGTAACGATAATGTAATCACCCTTTTTAAAGTC
AGTTCCGCCACTTGCAACAGTGAACTCCGGTTTTTCAGCGTTGCTAACGTTGGTTGCGCT
TACTGCCTGTGCGCGAGTATTCTCAATAAAAATCTGTGCTCCGTTAGGTAAGTGCATAAT
AGCCCCCTTTATTAACCATCATAACGAACATAAAAACGTACTGGATAAAACCAGCCTGAT
TCTGATTTCTGAACTTGATGCACTTTTGCACCTTCTGAAATATAGCCATTCGAAAGCATT
TTACCATCTTCAAAGAAATCAGCAATATTTTTTGCCAGCTTGCGAGCCTTATCAATTCCT
GAACCTGGCGGGAATTCAATTCCGATCTGAACCATTCCAATATAGCTAATGCATTTCCTT
TTCAGATCATGAATTATTGTATCTGCTTCTTTGTAGTCATATTTAAGCCAAATGCCTCCG
CCTTTTGGTGGCGTAAATTCAACGTTTTCATAAGCTATCATATATTCGCTTTCGTATTCT
TGAGCCAGCGCCATTCTTGCCGCAACAGATAATTCATAGTGCATTTTTCTTTCTCGCCTC
CCTTATCGCTTCCGCCATGTAAGAGCGCAACCGGATCGCAACGATACCAAATACCCCAGC
TGGCGCTTGCTTTGAATGACCATATTCAAGAGCATTAGCGTAAATCAGCATATTGGAAAA
GTATATTGATTTAATAGCGCCGCCGCCATGCAATAAAGCATAAAGCGCCCTGCGACCTTC
AGCTTTTGTTTTCTCACCATCAGGATCATATTGATTGAGCGCGTAAAGAGGCGGCTTGTT
TGCTGTGATCTGCATATTGGCTTTGAATCGTCCTGTATCCACTGGCGCAATATCAACTAA
TGCGCCGTGAACCTTTTCACCAAAAATCTGAATCACGTCATTCAATCCGCTTTCTACTTG
CTCGATCCATTTATCAACATTGCCATGAAATTCTCGGATCGAATAATCAGCCATGAACCG
CAACCCTCCGCATTATTGGACGGTAAGCAACGGTAATGCTTGTTGGTCTGATTGGTCTTG
TTTCAACCATAACATAACGCTCGCCGTCGATATCAATCTGATATCCGTTTTTAAGCTCTA
CATCAGCATTAAAAACGCCTAACTTGTCGGTAACTCTAATTGTCTCTCCGTCAACTTCTC
GCGTCCGTGGTGCTCTCACAAGACCTTTAATCTTCACCTTTATTTCAGGTTTTTCAACCT
CAATACCGCCAACAATTTCAACGCTTCCAGGCTGAGTAATGCAATCAAATTCACCAGTTC
CATCGCTAAAAAAATTAATTCCAGCCGATGCCATAGATCTGATTTGTTCATAATTCATCG
TGAGCACCTCCGACGAAAGGCAGTTGTAAGGCCAAATCCGCCGCCTTTTTTCTTGTTAAG
AACTTCATACATTTTACCCCACGGCGTTTGGCGCAACGTGTTACCGCTTGTGTCGTCACT
AACTTTGCTGAATGTCTGAGAAAACTCACCAGTCAGGGAAAATGACGCTATACGATGCGA
GTAGCTTTCTACGCTTTCACCTTCCTGTTTCATTGCGCCGTCAAGAGTCATCAGGTGCAA
CGTATAAAGAGCAACAGCGCGATTGTACTTGTCTTTGAAGTGGTTAACGCAAACGAAATC
TTTTGCTAATTCGATCCATGCCTGAATCAATTCAGGATCTACTTTTTTAAATGCTGGAGC
AAGTTTATAAATCTGCTCTAAGATCTCAATATCATTCATGATTTACCCCCAATAAAAAAG
GCGCTAAATAAGCGCCTTTATTAATTAATACTCGCCGCCGTCCTCAAGCTCTTTTTTTGT
CTTGCCTTCGTTCGGATCTTTTTTGCGCTTGCTCTTAAACGCTTCAACGATTTCAGCATT
GAGATCGCTGTTATCTTTGATTGTTAGCTTACCTTCTGCCATAAGTGCTTTAGTGCCTTG
CCGCTCTAACACGCTTTCCGCAACGGTAATTTCTTTACCTGGCATAACGTCAACGCGATC
AATAATAATCAGTGCAACGCCAGTGTTAACCAGTGTAATTTCTTTTTCTTTAGCCATTTG
TTTTTCTCCATATATAAAAAAGGGAACCTTTTAACGGTTCCCTATATTAATTGAATTATC
AGCCTACTACAAGACCTTTAATCAGAACCAGCGTCAACGGACGGTAAATCGTCAGGCCAG
TACATTTAGAGGTGCAAGGCACTTTGAAATGCAGGTCTTTAGGTTGCGCGGTCAGCATGT
TAAACGCTTCTGGAATCTCAATGCTCATGTTCATCGGATCTTTTTCGTAAACCAGCGCCG
CTTTAGTCCCTGCGCCGTCAATATCTTCAAGCTCGGAAATGGATTCGATAGTGATACCTC
CATTCTGCTGCTTGAAGTAATCAAGATAGCTCATGGTGGTTTCCGGCATACGAACGCTCA
AAACCTTACGCATTGACGGCGGGATCAGAATGTGAGTAGCGCGGTGCTGCCCGTTGGTCA
GCGTTTCGATTTTTTCAATCGCTTGCTCTAATTCATCCTGTGCTGTTTCCGGCTTTTTAC
CAGTACCTGCGGCGTTGTTCCAACCTGCGGAGTTGATAGTTGTGATGTTCGGATGTTCAA
ACACACTGATAATTTTGTGCGGCTTAGAGCCTTTGAAAACCAGGTGATTGACAAGCTGAT
CATGCGCATTCTGTGCGGCGTTTGCCTTGCGAGTGGAAAGGCTCTTGCCAGTGCGTTGAC
CTGCTTTGATTTCGTCAATGGAAATCAGGAACGCATTACCAAGTCGGAACACTTTACCAA
ATTCAGAAGTCATCATCGCGTCAACAGTTGGCAGATCATCAGTATAATCAGCGATGATTT
TTGCGTGACCTACTTTGTCGAAAGTCTGGTATTCAAAAGTTTTATCAGTATCGGAAAGCT
CGGACGTTACAGGGAATACACGCAGTGCGGAACCTGCCGGATATTCTTTCTCATAAGCCT
GAGACTTAATTTTGTGTAGCTCTTGAGCCGTCCAAATCCCCATATCAGACGCATCGTTTT
TAGCGCCTTGCAGTTGCAGGTGATTAGAAATCACAGACGCTTCAAATTCATCAAATTTAA
TTTTTTCTTTAGACATAATATTTCCCCTCATAGAAAAGCCGTCACAATAACGGCTTTAAT
ATAGCATTTTTTGTTAAACGTTCAAGTGTTTTTTGTGTTAGCACGCTACAACTGAACTGA
TAGTAAAATATATCCGTGTGAATATCTTACGTATTCGCCAGTAAAAAACCAACTAGTAGG
AAATCCACTTGTTGATATAGAGCCATTGTCTTTAACAAAAACAGGATCTTTATACGATGG
AATATCATGTTCGTCCTGAGTGATTACCCAAATTCGACCATGAGTTATTACGTTAACAGG
ATCTCCGGCGTCGTAATATTCTTTGCAAAAATCCATATAATCACGCGTAACGATTCCGTA
ATGCTTTGAGTTTTCATTAAAATTGTGGCTGATTATTTTGTAACCGCAAGATATGCGATC
AACACATACGGCCTTACCTATCACGGCTGAAACATCCATAACTGGCGAGCCATCTATATT
ATAAAGGCTTGAATCTACCAAGCACCCATTTTCAACTATACCTATTATAGAACCGTAATC
AGACATAAAACCACCATATATAAAAGGCCGGAATAATCCGGCCTTATTATTATACCAGTT
GAACCTCAACGAGTTTTAGACCTTGGAATTCCGTAAAGTCTCCAGTTGCGATCCAAGTGG
TTTCAATTAATCCAGACGTTAAATCAACCTGTCCTGAATCATCAAGTTTGATAGCTGTTT
TGAATGCTGGCGCTTCCGACTCTACAGATAACATCCAAACGCGCCCTTTAGTCATTACGT
TAATTCCGCTACCAGCTTCATAAACCATGCGACCATCTTTAGATGTGGTCTGGAAGTTGG
ATCGAATAGCAACGCCGTAAGCCTTGCCGCTTGCCGCCATCGGCTTAATCAGCTTATTGC
CCATGGCATCAACGCCGCCATGCTGGACCGCCACACCAACAAAAACAGGCTTATTCTGAT
TGCCTGCTGCATTCTCAAGAACACAAGCTCCGTCGATGTTATACGCGGAAGTGTCGGAAA
CTTGACCAGGCAAGGCGCGAGCCATTGCAACATGATAACTTGCTGAAATCTGAGCCATAA
TATTTTCTCCTTATTTAGCTTTGTTCAGACGCGCGGAAGGATTTAAAACAGAATCCGCGC
CATCTTCTTTTTCTTTTGCTGAATCGCCTTTCAGTGCAATACGTTGAGCCGCCATTTTAT
CAGATTCTTTCGCGATATCAAAAGCGGTATCAATATATGCATCAGCCTTTGCGCTAATGT
CATTACCCATGACCTCTTTCACATATGCGATCTTAATTTCTTTGGCTGTTAGTCCGTCGC
ATTTTACGCCAACTTCGGAAGCGGTAGCGACCAGTGCGGCATGTTCATCAGCGTCAGCTT
TTGCTTTTTTCACTGCTTCTTCAATCTGCGCCGGAATGCCGTCAACTTTCGACTGTAGCG
CGTCACGCTCTGCCTCCAGGCTGTCGGCTTTGGTTTTGGCTTTTTCAGCATCTGCCTTTA
CGGTTTCGATAAAGGTAGCAACCTCTTTTGGTACGTCAAATTCAACAGCACCATCCAGTT
TAATTTTAACGGTCATAACTTCGTCCTCTTTATTTAATTTAACGTCAGTATCATACGGGA
ATTCCTGCTCGCTATCAAGATTCAATTTTGCAATTCCGGCACGACCTTTAAAAACAAGCG
CGATATGGTTTACGCTAATGTTTGTTTGTAGCGCATCAAACTTAACCCAATCTTTCGGCG
GCTGCTCACCATCTTTTAGATCTTCTTCAAAGATGTATTCGCCCGTTTCATTAGACCCCC
AACCTGGCTTATCAATATCAATTGAAGTATAGCCAACGCTGATTTCAGCCGTTTGTTTTT
TCTTCGCGCTTTCAATTGCATCCTTTGCGTAAATATTCAAAGGCGCTTCAACTCCGATCC
CATTTGGAATGCCAGCGCCTGAACAAGTACCAACTACAACATCACGCGCATTTTCCGGCG
TTACGGTGACGTGACCTACTGTGATTGGTTTACCTGCGTAAGTCGCCAGGCTATCAGCTT
TAAACACTTCACTTGCTGGCCTGAATTCTCTGCGCTCGCCGTATGGCGTTTGATAAATCT
GCAAACCAATTCGCGCCACAATAGGACGATCCACTAAAAAGCCGTGTTCATCAAAATGCG
CCTTTACTCTGACACTATCAAAACGTTGCACCTTCTTCATAAATATACCTCTTGCTCTGT
TTCCCAATCCGGTTGCGCCCAACAGCGACAATTATATTCCTGCCCTGGGAATATGTGCTT
TATTGCCAATGAGATCCGTTTCATATCCAATTTAGCGTGTTCAGGTCTAACCCTGTTATC
TTCCTGAGTGCGCCAAATATAATGGGTAACTCCGGTATCAACCACGCGTTGATACATTAA
CACGGAATACCACGAACCAACAAAACCAGACGCCCTATTTTTAGCCCACGCCTTATATTT
TCTTAGGCGCTTTCGGATCTGCGCTCTTGTTTCTGCTTGCTCGCGTAACTCATTTAAACG
CTGTTGTACTTCCCAATCATCAAGCACATTATACGCAAATTTACTTACTGATGCCTCAAT
AAGTGATCGCCAGGTTATGTATTTTGAATTGAACCAACGTTCATTCATATTTCCGTAAAC
GCCACCAATCAGAAGGATAACGGATCGATTATTTGCACCTCCTGTTTGCTTTGCCATTCT
GATAAATTGGCGAGTGTGGTATTTGTATGCACTAACGGCGAACCCGTAAACCAGCAACAT
AAAGGCGGCAATTGCCGCCTCTACATCAGCATTGTTTTCAGTGATATCAACCGCCAGATC
ATTAAGCGCCTTTTCAACGTCGCTCTCTGTCATATCGGGAAACATCATTTATTCAATCCC
CCCTCTTGCCCTGGCTCTGGATCTAAATCTTCCGGCTCTGGCAATTCAATGTTGTCATTG
TCCATGATTTTAAGATCTGGACAAATGGATCGCAAAGTGTCTCTTGTTTCTTTGAGATTA
ATTGCCTGTTCAGCTTTCAATTTTACAACAGATTCAACGTTCTTAGCCATAATTTCAGCT
TTGTCCTTATCGCTCGGAACGCTTAACGGTTCGAATTCAATAGACCATTCGGATTCTGAG
ATCATGAACGGCAAAAGGAATTCAAGAATCGGCTTGTAATCCTCTACGCGCTTGCGATCA
ATCAACTTATAGAAAGTCTCTAGCGCCGTGTTTTGACTCGCTGAAACTCCGCCAGTGTTC
TTATTTTTAAGGATGATTTCATGAATGCCAGTTAGGGCAACAATTCGATCAATCTTTTCC
TGTAAGAACTCTGGAACGCCGGAAACGTCAGAATTGAGAACCTCATATTCTTCATCTGTG
GCATCAATACCAATTGCCTTACCAACTCCGCTTTCGTCATCAACCTGAGCCAAACGCAAA
CGCGCCGCGTAGCGCCCTTCTTCATCGTCGCACATCAAAGCCAGATCACGCGCTTTCCAT
ACTGCTTGTTGTTTTCGGCGTAGCAATTGCGTTGCTAATTCCTGGCAATAGTTATAATCA
ACAATCGCCTCAATCAAACGCTTGTTTAAAATGCTTGCGCCCCAACCATCATTTTGACGG
CGTTTTTCATTCGATACTCGCTCACCATCAATGATGCAAATACGCGAGTAATGAACAAAG
AATTCCGGTATATCTCCGCCAGGTGAGATCTTATAAAGTTTCGGCTCACCGTAACGAACA
CTCCGCGCATTAGTTTCACGTTCCTGAATGGTGATCTGATAGCGATCATATACGCGAATA
TCTTCAAGTTGTGCACCAGGCTTTACAGGTGATTTCAGCATTCTGTTATCAGCAACAACA
GCAAGAATTGCAGAACCGCCAAATAAACGCGACCATGAAAGCGCATCAATAATTTTAGCG
TTTAATCGCAATTCATCCCAGCGCGATTTAAAAGACTTTTCATTTTTCACGCCGTCAACT
TTAAAACCAGGCGTCACCATTTCTTCTGGAATAACATCGACAATGCGCCGCGCCATTCCA
TCTTCTTCATAAAATTGCGATAACGTTTTAAATGCCGCACTTTGCATGTAAAAAGCATTT
GGCCTAAACGTTCCATCTTTAGATCCGAAAATTTCGTTGTAACCATCTTCTTTAGTAATG
GCCTTTACCTTGTCGCTCATAAATACCCCCATAATAAAAAAGGCCGGAATATTCCAGCCT
TTGATTTTACACATTAACGCTTCGCTAATCCAGCTAAACGCTTCATTCTATCAACCGCAT
TATCAGCAAGGTTAAGCTCAATATTAACCGCATCAAAAAGGTTATCCATAATATCATCAT
GAGGATGGCTATCATCATAAGTGAATGCCGCCGCCTCTGCCAGAAATTCAGCAAGCATGT
GATGCGATTCAGGCAATACAACATAACCATTCTTGATCACTGGCTGAGCGTCCATGCAGC
GCGTTACTTTGTCTTTATCGCGTTGCACTGGCGTAATTTCTATCGGAAATGCTTTGCGGC
AATTCTGGATCAAACCTGTACCGCTCGCTTTATCTTCCACGTAAATTTTACGCAAGTTTC
CGCATTCTTTGTTACGGTTCCAGCACTGTTTAACAAACGCTTTAAACTGCGTTTCTAACA
TTGGCGCTTCCCATTTTCCGCGCACACCGTCAATAAAATATATACGGCCTTTGAACATGC
CCCAATAACATAAAACGCTGTAGTCGTTTAGCTCACCTTCTTTCTGAGCGGTATCTGCTG
TAATAAACGTATAATCAAAGCGATCCGGTTTTGGCATAGTTGATTTTTCTCCGGTTCCGT
AATACTGGAACCATCCAACGTTAATTGCGTTACCTCCAAGAGCAATTGGATCTTGCTGAT
ACTGAGAAAGGAACGTGTACAAATCCGCATCGCGTAGCGCTTTCAAGTCATGAATGCTTT
CCTTGCTAGGCCAAAAAGAATAATACTTCACGCCGTCAATAACGATGTATTCAGACGAAA
GCACATCCTTTTCAAAGTGCGGCTGCAACCAATCAGGAAGTGATTTCCCGTACTCCTCTG
TAACCATAGCCGGAATTGATATCTGATCAAATTCAATACCCATTCCGCCATTCATCAGAA
ACCATGTCATATCCTGCGCATGTAAACGCTGCTGGATAACGATAATTGGCGTTTCTGAAT
GTGCGCGACGTGATCGAATGGTGTTCTTCGCTATCATCTGACCGCGCTCACGCTTCACCT
TCGAAAACATATCATCGGGCTTTTCTGGATCGTCAAGCGTAACGCAACCGGAATAAATAC
CAGGAGTGATATAACCGCCACGGCTACCAGTAATTTGACCGCCCATTGATTTACTAATCA
TTTCAAGTCGAACTTTGCCAGCGTCATTTAAAACCTGAAATTCATCATCTTTGCTTGTAC
CAGTTTTTGCAGGGAAAAGCTCTTGCCATTCTCGCGAATTAACCAGATCACGCACACGCT
TACTGTTTCGTTTAACAAGCGTATCGGCAAATGAAATATTTAGGTTCCGCACCTTATTAA
GTTTTAAATAAGAATACGGAGGGAAATGGATAGAAAGTAATTCCGTCTTACCTGAGCCTG
GAGTTACATTAAAGATCGTATCTTTCCGCGTACCTTCAATAATTTCATCAATCGCTCTTG
CGATATAAAGGTGATGCCAGTTAGGAATCCATTTTTCCCCTTGCTGGATCGGGAACCAGA
TTTTAACGAAAGTATCAAAATCGTGTGTACTCAATTCTTTAATAGCCAGCTTTTCTAACT
TGCTTAAATCTTCCCATATCAACATAGCATTCACCCTTAAATTTTACTTAGAACGCTTGC
GACGGCGTTTTTCATTGCTTCTTCCGTGTTAACTTCCGTTTCAGCATTGGCGCTAATATT
GAACGTGTCGCCTTTATCAATGCCAAGCTCTTTTGCGATCATGGTGCTGTTAATCATTCC
GTTTGCAGCTAACTGGTATTTTTGTTCTTTGATTACCGATTCCGCAAACTCAATAACAAC
ATCATAGCCTGGTTTAAGTTTCCACTTTGCTAGTGCTGTGCCTGAAAAACCGCAAAACAG
CTTTAACCCTTCCCATGTAAAAATACGCGGCTTGTGAATCGTATCCTGATACACTCGACC
CTGAAAGGATGTAGTCTCACCTGCTTTAATGGCGTTTAGCTCCGCCCACTCAAAATACTG
AACAATCAGGTTCATGACTTGTTCCGGCGTTAGCGTTGCGCGTTTATCAATCTCAATACC
TACCAGATCGGAATATCGCTTATTCCATAACTTTTTAAAGTTTAGACTTTCCGCCGCTGG
CGCTTCTGTTTTTTTAGCCATAATAAAATCCTCCTGTTGAGGCGTGATTATAGCTAAATT
GCAGACACAAAAAAACCCGCGCAAGGCGGGTTGTCTTTTTTTCGTTGAATCAATCAATAT
ACTTGATGCTTCCAGGCTTGCCAAACTTGCGACGGAATGCAATTTCATCAGCAATCTTTT
CAAAGTTTTTAGTAATCTTCCATTTATCAGCTTTGTTTTCGTAAATGGCGATCACTAATT
CGTTGTCTTTTACGCAACGCTGCACACCCCACGAAAAACAAAGATAGAGAAAGAAACAGA
TAATCGCACAAAAACCAAAACCAGCAATGAACATCAGCATTATATAGCCCTCACATAATT
GATTGAAAATTGGTGTGTTTCAGGGTTAGCACCTGAAAGAACTTTAGCGCATTTAACCGC
ATCAACAGTGTTTAGCGCTTCAACCTCGCATTCGAAATCTTGTTTACATGATCCGCAATT
GCGACCCATGCGCCGGATAGTTAGCTTAACCTTGAATTTCATCCGGTTTATCCTCTTGCA
ATTTCACCATGAAATCACCGATCCGGCCTAACATCGCCTCACCTTGTTTAAATCGCTTCT
TGTATCGCGTTTTCTTTCCGTCACGCTCGACGATGATAGTTACCTTTGCGATTTCTTTGT
TTTGCATCGTGAATTCTCCTGAATGGTTGCGGGTTACGGTTCCCGCGATGGTCGTTTGCT
ATGCAATCCCATCCGATTAGGTTTTACGGCTAACGCGCCGCGCTTTGCTCTATTGAGCCT
CTTATGTTCACGGCGTTTAATCTACCAATCAGACAACACGCCGTCAACCTTCATTGATTC
AAGTGCTTATTATTCATACTCGCCAGGCTTACCCCATCGACCAGCTATATAACCAGCAAG
CCATACAAACTTTGTGCGAGTGATTAAGGTAGAAATTGGCGTGTGATGTTTGGTGATAAT
GCCAGCCGCAATATGATCGTATTTGTTGCCGCTCGTAACTTCAACTTTCAGATCCTTCAT
GCACTCTTTTGCAGCGCGTTTAACAATGTTGTATTCAGCCTCATTAAGTCCAAACATTTT
AAAGTCCTCTTGATTTCCAAAGTTGAAACATTTCAAAGTAGTGCAATGCTGTGTCAGTGT
CGCCGCGCTCTAATGCTTCTTCTTGCTTATGTGCGCACCACTGCGACGGTTTTATGTATT
CAGGCATAGAATCACCTTCCTAAAAAATTCGCCTCTTAGAATTCGTCTGGAGGCGATTAA
AATCGATGCAAATTCGTTAAATTTCTGCGAGTAGCTCGCGGAGGCGGTTTAGCACTCCAA
CCTTGTATAAATCCCACTCGATAGAACCTGGCTCAAGCTCACGCGCCGAACCTGGCGCTT
TCGTGCTGAAATCGTCAATGATACATGCTACTTCATCAACAACGATTTCCTTTATCTGCT
CGTTAATGCCTAAATTCTCAACCGATTCAAAAGCCTGAACAACTCCACCTAAAACGCGTT
GCTGTGCTTGCGCTTCTTCTAACGTGTCGTGAATGTTTCTGATCTGCTTGCTGCCAAACT
TGCCAACTCCGTAAGAGTGAATGTAAATCATGCTAACACCTCGTTTTTACGCTTCCACTT
TTCAACATCCATTTCGTTCAATCCGTTTTCGTGCCGCCACACTGCTAACTCTGCCGCACT
TGTTGAGCGTGGCATTAATTGCTGCTCAAGCTGGATGAAAACCTCTTTTGCAACATCGCT
TTTAACATCCAATCGCTCATATTCACCAGAGCCATAACGCCATCCCAAGCTATTTAGCAA
CGATTTCGCTTGTTCTTCTGATAGGTTGATTGCGATCATCTGTTATTCCTCCACTGCGTA
AAACTTGATGCGGTTGTTATCAACAAGAAACATAACGTCGTTATCCCATTTGTCGGCCTC
TACTTCATAATATTCCTCGCTGTCGTCATCAGCCAGGATAACGCGATCTTCATCAATGAT
TAGCTCATAAGTGCCGCCGTAAATCGGGTTTTCGCTTTCAAACATCTTGCCAGTGTATAC
AGCCATTTTCTAAATCTCCGTGTTTCGCTTCAATGAGGACACTTTAACAAATGCCCTCGC
GGAAGTTTTAACAAAAAGTGCTATTTGCACTTCATTCCTGGGTAAACGTCAAGCAAAGCA
TCAGCCAACGTCCTTACAACCTTTGCATGAGTCACTATATTCTCACCTTCCGGCACTCTC
AGCACTTCACGCAGTTGCTCTAACACTTTGACGTATTCGTTAGGCTCTGAGTTAATCAAC
GCATTGAATTTCGCATTCTCAATTACAGAATCAACTGATTTTGCAATTACGCGATCTTGA
ATTCCAACAGTCATTTCACCGCGCATTGATTTGAAGATATCGCCACCAGGCGAACATGAA
TTTCTCACCTGCTCCGCAACGATATCGCGAATTCTTTCACGCTCTGCTAATGCACTTGCT
TCATCTGCGATCCGCTTTGCATTGCTTAGGTGCTCGCTTTCGAAAAGAGTTTTATCAAGC
CAAACTCTAACGCCATTATCAGCAACAACCAGGTAAAGAGTATCTATGCTATTCAAAACG
GTATAGTCGCGGCCTTTTGTCAGGTAGTTATAAAAATCATTTTTAGCTTTCATATTTTAT
TCTCCTTACAAACAAGAAATTTCTTCTTCTGCGAAATAGTCATAGTCAAATTGACACCAA
TCCTTCAAAGGCGTATCAATCCACTTTGCGAAATCTTCCAGAATTTCGGAGTTGTAGTTA
TCCGCAATGCAGCGACCCCAGTCGCGAGCATTTTTATAACCGTAGCGGCTAAACGTGTAA
GGCGATTTGTTAGAGTCTCCCCACCTTTTAGCAATCTTAGCAAAGGCGCGTACCAGCATT
TTTCTATTCATCGTTTTGTCTCTCTGCGTAAATGATCCGAAAGTTTGTTCTTATTTGTTG
CGTCATCACTGCCAACCATGCCACCAGCAAGAAAAATAAGTAATCCTCCAACAGCACTTT
GCCAAGTGTCATTGTCAGTAAGCCATATGCCGCACACAAGCAATGCCACAAAACCAATAA
ATTTAATCATCTTTTTCGACCTTAACCGGAGTGTTTAAAACATACGTTTTAAGAGTGTGG
CCTTTTGAATCCTTAGTTATGATGTTTACCGTGTCGCCGTCGCGTCGTTCTTCAAATTCA
ACGCCAGGCACATAAAGCAAACCTTGCGGCGAATGAATCCAGAACATTTTTATTCCTCCA
CGATCTCAAATTCTGCCAGAACGAAAGAGCCAACATTTACAGATAATCCGTCTTTACCGT
TTAAGAAGAAGTGACCGCCGTACTCATGCGTAACAGTTGGGCTAAACCCGTTTACACCTT
CTTCCATATGGTAAATCGCGCCAACTGTCAGATTCATTGTGTTTGATTTGGTGCATTTGA
TTTTCATCGTTTATTCCTCTGATTGGTTGCTTCTCTTGAATAAGGCCACTATAACAAATG
GCCTTGCGCAAGTTTTAGCAATTCGTGCTATTTAAGGTGATCGCGAATGATTTCCTTTAC
CGTTACATTTGGTTGTTTATCAACCAATTTATAATCGTGCTCGCTATATCCGTTTTTCTG
GTAGTATGGATTTATTCGAATGTAGTTGCGGCTATCACCTGCAAACGTGAACCCGTCGCG
GTGCAAGCGGCATAACTTCACCTCATTACCAGCATTGATTAGCGCTATAATTTCATCTGG
AAAACCGCCATCAGTGCAAACAACAGGAGCATCACACTCTTTTACTTTCTGATTAAACCT
TACGCCGAAATAATCCTTACCGAATTTAGGCTTGATCACATCCTCGCTAATCCAGATCAT
GAACTCGCGCGGTGACATACCCATCAGGAATGTTTGCGGCCTTTCTTTCTGCTCTCTGTA
ATCGTAAGCCAGCATGAAACGCTGATAGTTCTCTTTGCCCAGGATAGCTAATGCAATATC
AAACATTGGCTCTTTAAAGCTAATGATTCGGCATTGCTTACCAGGCGAATAGACAGAAAT
CATCTTGCCAATCGTATCTTTGCCAGCACCAGGCGGCGCGTTGAGGATAATAATTTTAGC
CATCTTTGTTCACCTTAAAATATTGCACCGTTAACGTTTCTTCGATCTGACTCCACCCTT
GATTTCTAGACTCAATGCAAACATCGTTTAATGCTGCCTCGCCTTTTTCAAGTGCATCAG
CAAGAGCGAGTAAATAGTTGATCGTCTTTTGCGTTTCTAATTTATTATCAAGCGTCATGA
CCAAACCCCCATGAAAATAGAACCAACGGCAATTGCCACACAAACAATAACGGCGATAAC
GTGTTTATTCATTTCTCGCTTTCTCTTGATGCCGTTTGCCTTATTAACAAAATCCTTAGC
CTCTTTGTTGTAAGGCGCTAACGAGCCACGATTGCACATACTTACCAAAACACCAGGCGA
TTGAAATACGCTCTTGAAAAAATTATCACCATCAAAGAACGGTTTTTGTGAGGCAAAAAT
AACGCCGTCATCGTTAACAATGTAATAATGGTTAGTTCTAAATCCAACAGTGGTAAATAC
TTTCATTTGTCATTCTCCTTGCTTGTCTCGACAAGGCACACTTTATCAAATGTGCCTTAG
CAAGTTTTAGCAAAAAGTGCTATTTACCATTTAAACTCACCATCGCGGATTAGCTCGTAA
ATTGGCACGATGATATAACCAGGCCATAAAAGAATCGGCTTCCAACTATCCTTATCATCA
GCGTCAGCCTCTTTTAGTAGTGCTCGCATCAGGAAAGCGCCGCAAACATACAGAATTAAA
ACGATAGCGATCAAGATAAAAGTCAACATAATAAATCCTCTATTCCGGTAATTCTTCAGC
AAGACGCTTGATGTGTTCCGCTAACTCCAATGCGCCTTTCTTGTCAAAAATTCCGCGAAA
CTGCAAATGTGTGTCATCCTCATATTTGCAGTCAATCCACACCGATTTCCCTTCGATGTA
AATAAGCACGTTATCACCATGCCGATCTTCAATTAGCTTTGCTGTCATCGCTCAATTCCT
CCACGCCGTGAGATTTTAAGTGATCGTGTAACTGCTCGCCGTAGTCAATTACCTGGTAAA
CAGTCAAGCCCAGGCCGCGAAGGTGTGCAATAACGTTTGGCGAGTCATCCCAACATGCGA
CAATGCGATCTAGTCCGATAGTCCGTAAAACTTCCTCTTTGATTACTGTATCTTTCCGGT
TGTCCTCCGCGCGGCGCATAATTAGCCAATCGAAAGAAACGCCGTTTTCAGCTAACCAGG
CTCGCGTTTCTGCTTCAACTTCATCACTACGTCCTGTTAGGATGATAACCAGGTATCCGG
CGTCAAACATGGCGTTGCACACGGAAATGTTATTGCTGAATGGTGAATCATCCTTTGCGG
CGCGATTAAACTCACTCCAGCTTTCAGTAAGATGCAAATCAACAGTTGGCAACAGGTGCA
AGCGGTGCTCACCATTTGACAATGTGCCGTCTAGGTCGAAAATAACGAAACGCTGTTTTG
TCGCAACATATGGATTAACATAATCCCTTCCCCACAAGTTGATCGTAAACATCAATTACC
CCGCAAACTCAATAATGCTATACGCGATGCCAGCCAGCACAACGGTAGCGAGCACAATCA
TAGAACCGTATTTCAGAAACTGCTTGATAGACTCTTTAGACATTTTTACTTCTCCTTTGG
TTGGTTGATGCGGTCATTATACCCATCAGCACACATGACCGCTTAACATTTTGTGCTATT
GCGCTTCTAACTTCATAACCTTGCGAGCCATGCGCTTATACTGCGATGCAGTGATTTTGC
TTGTGTCGGTAACGTGGCTATTAACCATTACAAACTTGCGACCGTGACCAATCCAGTGAT
CATGACTGTATGTGTGATCGTATTCAACCAAATCCGGTCGGAATGTATCACAATCACCCT
CACCGCCTTTCTTAACCCTTTGGTCAACAAACATTGCAATATCAATTTGACCGCGCTCGT
TAACATGAAACAGGTGCGCATAAGTTGAGCCTTTGCCGCCTTTAAGGTGTAATCCATAAA
CCGCGTTGCGTGCTAATTCCATTTTGTGATCCTCTCGTTGTTTGGTATGGGCTTACTATA
CCGCAAGCCCAAAATTCTGTTTTAGCAATTCGTGCTATTGATCATTTTTTTTATTCTGTG
TCGGTAGAATTGCATTACGTGCTCATTGTGCCAACTGCTCACTTTATCACCTCAATCAAC
AATCCGGCATTCGCCATAGGTGAACGGGAAATGTGTGTCGCTTTCATAGCTATCCGGTAT
ATCAGCACATTGGCCTTTCTCTTTGTCATAGCCAGCCGCGATAAGTGCATCAAGAGGAAC
GTCAACCATGCCAACTTCAATACCGTAATCAATGCAATTCTCAATGCGGATCGGGAAGGT
TAAGTGTTTCATTCCATCGTAAGAGCCATCATTCAGGATCTCAACAGTTACGCGTTTCAG
TTCAAACATTTTTATTACTCCGGTATGCCAAAGATAGAAATTAATGAGTTTGTGCGGCTG
CGGCGATATTTGCGCATTACAGCCGCTACATTCTCGCCAGTTTGATGACCTAACGTGATC
GGCATCTCTGAGCCGTCGCCGTATTCATTGCCAACCTTTTTGGGCTTATCTCTCCAGGCG
TTTATAAATCCGTATTCATCACGAGTGATATAGCGGTATATGTTAGGAATTGGTAACTTG
ATCCCATCAAAATCCACTTCCTGCGTGTAGCTGCGGAAATTATGCATGGAACTCATAAAC
AATCACTCCCATTTCATCAACAACTTGCGCCTTGTAATAACCACCGTTAGCAGCAAGCAG
ATAAGCCTGGCTAAGAGTTTCAAACTCGCGGGTTACTGGCTGGCTTGTTTCGTGTTCCCA
GGTGATTAAGGTAGTCATTGTGTTTTCCTCGTTTCGTTTCGATGTGGTAATTATGCCAAA
CTACCCCAATCGAGTTTTAACAAAAAGTGCTATTTGCCAATCAGGATGTAATCCGTCATT
TCAGCATTGACACGGCAAAAGCAAGGATTGAAAAAGCAATTGACAACAGCGAAAATCCAG
CAGCAGCGATAAAGAACACCACGGCATGATCTAAAAGTTTCTTATTCATCAAACGCCCCC
AACAATATCAAACCAAGAACAACAAGCGCCACGCCAGGATGACCGATTGCAACGCACCAC
ATTGCAGCGACAAATGCGAATGTTTTCATTGAAGTCTCCCGATAGCGTCAGCAAAAACCA
GGAATGCAAGCGATCCGAAAGTTGCCGCAATCGCAAGGATAAGCAAGCATAAACATAACT
CAATATATTTCGTATTCATTAGCGGATATCCTCAAACGTTTTGAAGTATAAGCGGCCTTT
TGCGTTGTGCCATAGCAATTCATTTGTTTCTATCCATCTTCCGGTGTCTGTGCGGATTAT
GCGACCGGAACGATATTCCAGCTTTACTATGTTGCCGCCACTTCTTAGATATAGGCGATT
AACAATTGCAGTTGTACACATCCTGGATTCTTTCAGCAGGTCTACACCATTAAAACGGAT
CGGACAAAACATGATTATTCCCCTTGCTCAACCATTGACTTAATCAGATCCTGATAACGC
TTAATTCCGATTGCCGCGCCCTGGAGTTGTTCACCTTCCAGATCCGTGATATTTGGCATT
GTGTTTAGCAGTCGCTTGGCGATTCGCTCACCGATCCTCTTTTCCAGTGCCGGAATATCA
TTTTTTGTGAATACCTGTCGCTTTGCCTCGCGGTTGATTGCCACCTTAAACCCTGGCGCT
TCCTCAACCGGATCAGTGCGAGTAATTGAAACCGTTCCGATCTCCTTCACGTCAGGGACG
CGATTCATGATCGTGCGAATGTATGAGGCGTTAACCTTCTTCCTGTCTTGCTCGTCGAGA
TTGTCCTCGATAAGAGCATCGGCAATGATGTAATTATCAAGCTCTCCGCTTGCTAACTTC
TTCGCCAGTTCACGCAAGCTGTCGCAAAACTCTTTGGTAGTTGCCATGATTGGTTATCCT
CCTGTTGGTTAGTTCGTGGCGGCATATTATCGCCGCCATTTGTTCTCGTCAAGTAGTTTT
TTGTGTGCTTACGTTCCATACCTATAGTGGAACAAATTTTCAGCGTAAGTTAATGTTTTA
CTTGAAATTGAAAACGCGTTCTTTGGCTGTTCATGCGTTCATGAATTTTCGCGGATTCCT
ATATATAAATATATTTTTCTCAATCCACCACTAGACCAGGCGCAATAGGCTAAATATTAA
CCAAATACCACCATCAACAATATATCACCCACCACTAACCATATGGAACATTAGAAACAG
TATAGAAACAAATAAATACATATATATAGATAACTTACTGTTTTAATTATTATTATATAG
AGTTTTATTTTGTTCTTTTTGTGTGGCTAACACATAGAACCGTCGGAGAACTACGCCGGG
TAGATTTGTGAACACCCATGAACGGAAGATAACAGCGCGGAGCCTGGAGTGATGTTTTGC
GGGAAAAGTTTTCTCTGATCGGCAAGGTGTGATTATTTCTGCTCTCTCACTACTCAAATC
TAATCAAATCAAATCAATTTCAATCACAAAATCTCACACATCAATCATCATCTGATCATA
TAACGATCACATAACAGGATCATGAGCCTGGTCGATACGTCGAACTGATTGTTCGTTAAG
ATGAACGTTGGTAATTTTGCTGATACTGCATGAATAGCACTTTTTGTTAAAACCAATCAG
TCACGAATTGCTATGATTACCTCAACGAAACGAACTGAGGATTACACGATGGAAAACTTA
GTGATTGCAGTAGACAAGACAAACTTTGTACTCGCAGCGGCTGACAAAACAAACTTTTGG
ATCGTGTGGGACAAAATCGACGCAGCAATCCCAACTGGCAACAAATACCTGAACAATCTG
GAAATGCACTATTGCGAAGCGCTAAACATGCAGACGGAAGGTAAAGCGGCTTATGAGATC
GCTAAACATTTCGGCTTTGAAACTCTTGAGCAAATGTTCACGGCGGTTGCTAATCAGGCA
GAAGAAGATTTCGAAATTAAAGCGTTTGGCTAATAGCACGAATTGCTAAAAAAGGATCGG
GGTATCTTGATATAGTTGCCCCATCGAAACCAATCAGGAGATTAACGATGGAAATTCAAA
CTCAATTCGAAACTGTGGTTACTGTACGCGATGCGAGCCACGAAAAAGGATTGTTCAAAA
AAGGTACTGAGGTTACTGTTGATATTGATGATATGGTTGCATATCACGGCGGCATTACCT
GGAATATTCAGGTTGTTGAGCCAGGCAAGAAATTTAAACTTCTGGCATTCAATACCGTAT
TTGAAACTGTGGAGGCTGCACAATGAGTCGTTTAAATTTCATCGGAAAGAAAGTAAAAGT
TAAATCATCTGGAAAGTGCATGTTAAGAGTTTGGCGCTTTGATGAAGATCGCGAATATGA
AATTTTGATGGATAGACAAAATGACTTGCATATTTCAGACAATCGCGGCCTTGCCCTTTG
TCTTTGCATAACTGAAGATGGAAAGCGGTTATACGCGCCAGGCGTTGAAAGTATTTATTC
AATTGAGGTGATGAAATGATCAATAATACTTATCGCGTCGTTGCAATCAGTCGCGCAAAT
GGTAAGCGAGTTGTGTGCTATGAAGGTGATCGCGCTTGCCTGGCAACTGATACATATGAG
GAATTAACAAAACGTCGCCCTACTTTTTACTCCGATTTCAAAGTGGTGCTTGAGCGCCTT
GAGCCTGTAATTGTCATGGAGAGTGATTGATGGAGCTATTTTTTATTCCTAACGCTTGGA
TTCTTGCTGTTGCTAATGACCATTACGGAGGCGACGGAAAGCGTGCGAAAAGGTATTCGT
ATTTTAATTAAATAGCACTTTTTGTTAAAAGCGATCCGGTTTGTTTTGGCATAATACATT
CATCGAAACGAACCGGAGAATTTAAAATGAATTGGCACGACTTTTTTATATATGATTGCG
GTAATCTTATAAGAAAGCCGCGCACAAACATAAGATCATATAGAGATTCTGCATGGAATA
AAAAGTGGGCTGGAAAAGTTGCAGGAAGCATTAGAAATGATGGATACATAGAGATAACAT
TGAATGATAAAAGTTATCTTGCGCATCGAATCGTTTGGGAAATGCATAATGGCAAAATTC
CAGAAGGAATGCAGATTGATCATATAAACCACGACAGAATTGATAACAGGATAGAAAACC
TACGCCTTGTTAGTGCAAATGAAAACGGTAAAAATCAATCATATTGCAAAGCAAATAAAT
CAGGGTTTAACGGTGTTTCGTGGCATTCCGTAGCTAAAAAATGGAGAGCAAGATTAAAAG
TAGAAGGAAAAGAAATCCATATTGGTCTTTTTGATTCTCCTGAATTAGCTAGCATGGCTA
TTGAGAGAGAAAAAATAAACAGGGGTTTTCATGAAAACCACGGCAAAAAGAAAGCGTAGG
CAAATTAATTGCAGGTGTTCCGCTTATCATTTCGTTCATAGGTTTGGCGGCGGCTTGTGT
ACCGGAATTCAGATCGCTGAGGAAAACGTAGGCGGCAACCTTTGCCAGCACTGCTATCTG
TTTAATAGTGGCTGTGAAGTGCTAAAAGGCCAAGAGTCGCCGCGCGAATGCGCATATGTG
CAAGAATTCATAGAATATCATGAGGTTAAATTATGACCTACTTCAAAAATATAAAAACCG
GAAGAATTTACCGCGTGAACCTGCGTCATAAAAACGCTTTAATTATGAGCAAAGGAGGCT
GTTGGGTTAGGTCTGCACGTTATAGAAATGCAGATTTAACAGGCTATCCGTTTATCGCCG
TAAACAGCACGAATTGCTAAAAACGATATCGCTCTGACTGGTATCATACTTTCACACAAA
CAAAATGGAGAATCAAAAATGAAACTGAAAACTGAATCCATCATGAACATTGTCAAAGCT
CACGGGAAAGTAGTTTTGAAAATGGATCGCGATTCTGGATTCCATCAGTTAACGATTACC
CGCGTAAAAACTGGTTACGCTGTTGGCGAACACCCAGGCGGAAGAATACGTCGCATGACT
GAAAGCGATGCTTACGCGATGATTGACGAAATGAGCATGTTTATTGAGAAGTGGGGTTGA
TATGGTTCAAGATGCTTTCTTTGCTCGCCTACATGAAGCGGAGGCGGCTGGACTCAACAA
GGAATGGGCGCTTAAAGTTGCCTATCTTGAAATAACGCTTGATGACGCATTAGGCGCTAT
GGATATGGATCAAGAAAGTAGCGTGATGCTTGCTGATCCTAACGCAATAATCAATGATTG
CGGTTGTAACTTCGATCCATCTTGCAAGCGTTGTTTCCCATTCTAAGGAGTATTTAAAAT
GACACCTATCGAAAAAATTTGCTGTCCAAAACACGGCGGAAGCGGGGATAAAACAACATG
CCCATTCTGTAAGTAAAAAATAGAGGCCTGTTTCGCATTATGTCGCGATTTCAGGCCGTA
ACTAATACGATTGTCACACCTACAAACAAAATGCCTTGCAAGGTAATACAGAAAGGATTT
AAACATGCTTATTTTCTCACTATTTGATGGTTCTGGTTATGCTGCGTTGCCGTGGGCTGA
ACGTGGTCACAAAGTGCTGTGCTTTAATTTCGACGGTGCTGATCATGGTGATTACCAATC
AGTGCGCGTGACTCATCCCAACATAGTTTATTTGAATGAGTGGATCGGATTATCATTCCA
GCATAACGCAATGATGCGCGTCTTTGGCACTCCAGATTTTATTATTGCATTCCCTCCATG
CACTGATTTAGCTGTTAGCGGATCGCGTCACTTTGCAGCAAAGCGTGAACGTGATCCAGA
CTTCCAGAAAAAGGCGGTTGAAACGGCAAAGATTGCTGCCAATATTGCGGATCGGTTTAA
CGTTCCATACATGATTGAGAATCCTGTTAGTGTTCTGTCGTCAATGTGGCGGCAACCTGA
TTTTATCTTTCATCCTTGCGCGTTTGGAGGTCTGTTGCCGGAAGATGATAAACATCCTCA
CTTTCCTGAAATCATTCCCGCTCGCGATGCGTACACCAAAAAAACTTGTCTTTGGACGGG
TAACGGCTTTGTAATGCCGGATACAAACGCAGTATTGCAAACAGGGAACAACAATCCAGG
CTGGCAAAAGCTCGGCGGCAAGTCTAAGCGAACAAAGCTGATCCGCTCACTCACTCCGCG
CGGCTTTGCGCTTGCTGTATGCCTGGCAAATCAGAAATAGCACTTTTTGTTAAAACGCCG
GATCACGTATCCGGCATAATGCTTTCAACGAAAACAAAAGGAGATAAATCAAATGGCTAA
ATTCAAATCAATCAAACTTATCGGATCTGATAACCGCCTATACAAAGCGCGGGTAGACGA
AAATGATGATACTTTCGTTAAGTTAGATGGGAAATGGATTCACGCCAACTTAACCGGATT
AACATTCCGAAATGTTAAGACCAAAACCATTAAATGCACATGGGTAAACCACTCCATGCA
GATCAAGAAAACTTTCAAAGCCGATAAGCGTTACCAGATCGAACAAGGCCGCGTGTTAGG
TGCTGTTGCTGGATACGTGTTCGACGAAAACGGCGACCGTTTCACGCTGTATCGTGAAGA
AGTTGGATTTTCAGCCGCTGGCGGTGCTTATCTGTTTGAGGCCAAATACTCATGAGTTTA
CCAGAAAAAGACTATACGCCTCACCGTTCTGAGGCTATGCAAAAATATCGTTACAAGGTT
GTTTTTAGTGCGATATCGTCATTAAAGGAAGGTGAAACGGTCTATCGCATCAGGGATAAG
CATTCATATTTGCTGATTGGTCATACGTTCCATCGTTCGCTTGCATTCGATCCTAAAACT
CTTGAATGTCATAGCATTATAGATGGAAGGTTATTAGCCAGGGTTGAGCCGATCAAATAG
CACGAATTGCTAAAAGGCTGTAGAATGTTGCCGTTATAATTAGCGGCAACAAGAAGGAGA
TTTTTAGATGTTTGACTTTGACACCAACAAATTGACACCTCAACAAGTTATAGCCATTGC
AGAATCGCAGGGAACATCGCCGCTTCGCGTTGCTATTCAGTCTAACGGCTACCGCCAATC
GTCCAGCTTTTGGGAACCTGTAAAGGATATCAACGGCGCTAATGACCGCTATCCTGTGAT
CTCTTTGGGTAATGATGTTGATGTTGTGGGTAAACTGTCACGTAGCATTGCGCAATCTGT
TCAATTTCCTGAATCATCGGCCTATATGCATTTCATTGGTTGCGTTTCCGCCGCTATGGT
TGGACGCTTCCAAGTTGAGTACCACGGCACTGAACAACCAACGGCGCTTTATGTTGTAAC
CAGTCAGCCGCCATCAACTGGTAAATCAGCAATCAACAGCCTGGCTATTGCGCCAATGGT
CTGTGAAGTTGAGCGCATCAACGAACAACGCAAGAAAGAGCGAAAGAAGATCGCAGCGAA
ATTAAAAGGCGTTGAAAAGGAATTGAAAGCTGAACGTTCCGGCACTGAGTTAGCGGCGCT
GTTTGAGGAAAAGGAGGAATTAGAGGAAAAGTTAGAAAAAATGTGCGATATCGTTTTTCC
GGTATCAGACACCACGCCGGAAGGGTTAGCAAAGATCAACAATCGCCAGGGTAACTTTGC
TGTCATTTCCGATGAAGCAACAAGCATCAACAGCTTACTCGGATTGACTTACGCTAATAG
TGATCGCAAGACTAACAGCGAATTGGTTCTAAAAGCATGGGACGCCGGACACGTTTCAAT
AGCTCGCGCCAACTCTGAAAACAATATGAGTTTTGTTGCGTTGGGCTGCATGAGCGTAAT
TGCCCAGGATGAAACGATAAAAGGGATCATGGATGCAGGGGCGCGTGGTATCGGTGTTAG
TGAACGTTTCTTGCTTGTACGTGAAAAAACAATGTTAGGCGAGCGTGTATTTATTGATGA
AAATGGTGATCTTGATTACACGCCAGTTGATAAAGAATTAAAGGCGCAATATTTCCAGTT
GATTCATAACATCATGACTGAACAAAATGTGGTATTGAAGCCGTCACGTTCTGCAATGCG
TGTTCTTAATATTGCTCGCCAGCAATTAGAGCCAGATTTAGCAGACGGCGGGAAATATTC
ACATACAATGTTGCGTGGTGCTTTGGGTAAAATGGATAAGCAAGTGATCCGCATTGCGTC
AGTATTGCACACGATCCGCAATTGGTTTAATCCAAACGGTACGCCGCAAAAGTCGCGAGA
AATTGAAGTTGAGACAATGCAAGAGGCTTTGGTGATGTTCAGCGAATTAAGCAAAACATA
TATCAACGCCGCGAATGCTTCCGGTCACGCTGGAGATGATGCAGAAATGAGCAAGTTAAT
TGAAATAATCATTAAGATCTCACGTCAAAATAAAGGCGTTACCAATGCAAGAGCTATCTA
TGAAAGTGCGCGTAAGGTTAAGCCGTTTACAGGTCAATCAGGAGTGATGAAACGAATTGA
GGAACAATTATTGCCAATGCTTGAAGAAAAGAATTATGTTTGCAGCGTTGGTAAATTTGT
TTATGTAAATCCGGCGTTAATGGGGTAATCATGTTCTTATTAGATCTGTATCGCTTTTGC
GAGTCTCGCGAGAAATTCAACCGCCAAGAGTTAGCAAGATTTATATTCCGTCACCGTGAA
TGTGAAAGGCTCGCCAAAAATGCGGGGGTAACGCCCCGCTATTTCGCTTCAAGCTCAAGC
AAAGAGTTTATAGCGCGAATGATGGGTTATGGATATCTTGACGGCGTTCATTGCGTGTAC
TGGTGCAAAAACAAGATGAAAAGGCCGTTTAATTTTGAGTTGCATAGCCTGGAAGGTGAT
TCCAATCGTTATGTGTGGGAGATGATGAACATTGAGAAAATGAGCGATGAAGAATTATTC
AGCAAGCCAGCATTTGATAGATCTTATTTTGAAAGAAAGTTCAGCAATGCAAATTTCGCA
TGATGATTTTGTCTATGCACTAATGTTGTTGCTTTACAGTGATATGCGAGCGTTTGAAGA
TAATGAGCACCAGTTAACAAATGATGACGGTGAACTACTAATTCACGTCAGGCGCTTTGA
ATAGCACTTTTTGTTAAAACACCCGATCTTGTATCGGGTATATTTGTTTTAACGAAACGT
AGCAACAAAAGGAAAACAAAATGTTAAAATGCACTATCAAAACAATTCGCGTTGTTAATG
TTACATTTGACGTTTTCAACAACAAAGGAACCGCATATGTTGATGATGGTAGTACGTTTG
GCATTAACCGCTGCGAATATGAAAAAATGCTGTGGGATATAAAAAAGAAAGGCGCTCACA
TTATTGAGGAAAAGGATTATAGCGGTAATAGTTTCCAAGACTTAATGAACAATATTTTTT
AAAAGAAAAGGCGGCTTATGCCGCCTTGTTACGTTTAAGTGCCCACCCTGCCAGCATACC
CGCAATAAACATCAATATACCCATTGCGATTGCCGGAACATTAAGACCATCATTATTTCG
GATCTCTATTCTTTCCGCTGTGATGTTATCTGCCTTAATGCTTGAAGTGCTCACCTGTTT
TTTATTCGACGTGTCAACCTTTCCAACAGCCGATTCTTTAAATGTGGTTTCCTGCTTGCT
TGATGTATCATGCTTTGCAGTTACACCAACAGTTTGTTTCACATTTTCAGATCCTGCCTG
TGCTGTTATATCGGGCTTGCTACCAATCAGGCCAGGTAACAAGCTCGACGCAGAACAACC
GGAAAGCATAACGCACATCAAAACAGCCATTAATTTCTTTTTCATTTAAGATCCCTTACG
CAATATTTATATTCGACGGCGCGGCGGTTCTTCAATCCTCTTGATTTTTCCTTTTTACCA
GTTTTAGGGTTCCGGTAATATGTCCAGTTCCATAGCTCACCACAACCGCCCCATAGATCA
CCATTGTTGATCTTTTTCAGCATGGTTGACTTACGAAACGCGCCAGTACCAGCATTAAAA
GTGAATGAGTATAGAGCCGCTCGCATTGATAAAGGAATTTCAACCTTAACCGCCTTATCA
ACAGCGTCAGCCGCTACTTTCATGTGTTTTGCTAATAGCGCGTCACATTCTCGCCTGGTA
TATTCCTTTCCAAGAATCACATCCTTTCCGGTAATGCCGTGGCATACCGTCCAGATTCCA
GCAATATCCTTGTAAGGCTTATACTTTACGCCCTCAATTTCTTCAATCAAAGGCGATGCC
AACATTAAAGCCGCCCCTGTGACGGTGGCGGCTATACCTTTCTTGATTGTCATTACACCC
TCTCTTTCTGCCGTAGATTAAGCGCCGTTTTTAAATCCCCTGAATCTAAAGCCTCTCGGA
TCGCTTTACTATCACGCCATTTCAGCCATGCGCCCCAACAGCCGAAAATAGCGAACAAAA
TAAACGTAGCAAGTGCAAGCAAAAACTCACCAGTAAAAGATCCAACTACCGTTGCACCTC
CGAAAGAGTTTTGCGCCATTAAAAGAAAGTCTCTCATAATCTGATCCTCAATTAAATTAA
AATGTCAATGCCAAAATTAGTGTGAATATGTTAACCACAAAAACAAAAAAAGGCCAGCAC
TTAGCCAGCCTTTTTCTTGATAATTTAATTAAGCAATCATTTCAGGGTAAAACATAAACC
GCCCTATTTCGCCATATTCCTTATCATAAATAATTACCGCCGCCCTGCGACGTGAACGCC
AGCCACCACGCGCGGCGTAAGCGTCTTTTGCTGCCATAGTGCTATGCACCTCAACAATGC
CAAGGCTCGTTTCTGTAACAGTCTGGTGATGCCAATGCCCTACATGCGCATACATTGAAT
TGGAGTTTCCGAAATCTTCCCGCCAATCCGCTGCACACATCATTAAAAGCGTTTCTGGCT
TGCGTACAGTGTGACCATGATGATAAGCCAGGAAAGTTTTACCATATTGAGTGTGATGCA
CGACGCGCGGAGAAACATCAACCTTTACGCGTGGCTCATTCTCATACGCCGCCGCCATTG
CAGCACGTAGCCAGATCATTCCTGATTGGTCGTGATTACCTTCAATGATCTGCAATTCAA
CCTCTTTATGTTTTTCCAGCATTCTGCTTACTGCTCTGCGCGTGGCTCGAATGGCAACAT
AAACAAGTTTCGCATATCGCGAATCCTGATCCAAAACGTGACCGCTTGCAGGTGTTACAG
CCTCCAGGCCGTCGCTGTGAATCATATCACCACCAATCAGCAATACAGCCTTTTCGCTAT
TCGGTGCTTTATCGACGGCATAATCAAAGAATTCATTCATGATCTTTTCTGCCGTTGCTG
TGTCGTAATTCTCTCCGCTTTCATGCTTATGAGCCATTGCACCAATATGAATATCAAAGA
TCGGATATAGCGCAAGGGTTTTCGAATAGTCAGTAATCTTTTCCGGCTGTGGTTCCAGGC
GTGGCAACTCGTCAGAAAATGCAGCCATAGCCGCTTGCATTATTGCCTCTAACTGGTCTT
TATCTTTGTGCGTCTTAATCCAGGTTAGTTTAGTATTGCCGTTTTTATCAACTAACTTTG
ACTCGCCAATTACCGCAAAGCCAGGTGATCCGATAGTTGAGATCTCGCCACGCTTTGCTA
ATTTGCTGTGGCGGTGCTCAACCTGGCGCAAGCTCATTCCGTATTTTTCCGCAATCTCAC
GCAGTTTTAAACCCGCCTCACGTTCAGCGATCAATTGCTCGTCGGTAATCTTTTTTAAAC
TCATTTTAACATCCTCTTAATTCATAACAACGGCGTACATAATAACCCAAGCGATAACAG
GCGGCAACAAAATAACAGAAATGTATCTCATTTGTAATATTTCTTCTGCTCTTTGGTTTT
GTTAATAACTTCTTTATAGTCGATTGTTGTTGGTATTGCTGGAACACGGTGAACACGTCG
CGGCTTTTCTTCAACATACGCCATTTCGTCACCAACAATAACGCACACGTCTTTAATATC
GAAATACTTTGCTATTTTGGCGATCCCTTCATCAAGACCGCCTTTTTTAGCAAGCTCCCA
AGTTTCCTTTTTACCTTTCTTCACTTTCATAACCGTAAGCCTTTTTAAGTAACTCCATTG
CGTCATTCCAAAGTATTTGTGCAATAACCTTTGGATTTTTGCGATCAAGCATAAACAATG
ATTCTTTAGCCAGCCATTGCGCATCTTTGAAGTATTCGACGTTTACGATTTTCATTTTTG
AAATCCTCTTGTTTTCCGTTAAGCACATAATACAAAACCCGCCGTAGCGGGTTTTAACAA
AAAGTGCTATTTCACATTGAAAAATCGTGCGCCCTCTCTGCGTTTGTATTGTATCAGGTC
GTGCTCAATTTTTCTTTCCCACATGTACAAAGGCGCAACTTTGATTTCGTCAAATGTCAT
ATCCAGGCAGTTTATCAACTCCATTTTATCATCGTTATAACCATGCTTATCAAGTAAGCG
AATTGTCATACCGACAAATAAATCCCATTTCATGTGATCGGCTAATCGAATGCTCATTTT
AAATACTCCGCGCTTTGGCTCGTTTATTTTTTACGGAAGGGCAAATGTCGCTAATCTTCA
CATAGTGCGTTTGCTGTTGCTCACCTTCTTCCAATTGGCGCATGATAAAAATTACACTAC
CTTTATTGTTTCCGCTAACTGGCTCACCTGTCATGCCAGAAATAAACGCCACTCGACCAG
TTCTGGAATATTCGCGACCTTCTTCATCCTTCCAGGTTTCACCAGTAATCCAGATAATTT
CTGCCGCATGTTTTTGTGCGTCACTAAACCATGCAGTTGAATTATCAGCCGGAAGTAAAA
TATCAATCTGGTTTCCGTGTTCCATCTGCTCAATTGCTTTTTTGATAAATGGATCTGGAT
TGCTGTATGGTGGATTTAACCAAACGTGCTTATTGCTACCCCACCAACGCTTTAAGCAGT
TTGTTTCTTTGCTGTAAAATTTATCGCATTTTTTATTATCTTCCGTTGCTGCTGCGTCAA
GATCATATTTGCCGTAACGTTCAGCAAGGTATTCAACAATTTCATCTGGAGTTTCCCACA
AGTCGCGCACTACGTCCGGCGTTTTACTTCCTGCATAACGGTTGCCGCTAACCTTAAATA
ATGGGTTTTCTCTAACTGGCTGATAATGACCGCCTGAACGTAAAGCAATATCTGAATATC
TGCCGTGTTGCAGTTCATGAAAATCCATTTCCGGCTCAAAAGTATCAATGGTTGCTTTGT
CCTGAAAATCCTTAGCCATTTTATTTTACCTCGCAAGTTAGAGTGTTCTGATAAACGCCA
ACTTTAATATCAATGGTGCTATCGTTAACAGTGTAAAAAGCCGTTCCAATTGGCGTAAAC
AGCTTATATTGATTTTTGCTGATATTATCCATTACAACGCCTGTGCTTTTACCTTGCACA
ACTTTCATATATTCGCTTGTAACCTCAAACGCTTCATTTCCGCAAATATATGTTTTTGGT
TTATCCATGCAACCAACAATGGCAAGTGATAAAGCAACTACTGATAACATCTTTTTCATG
GTTAATTCTCCGTTTCGTTCTGATGTGTGCATTATGGCGCATTCCGTCGCGCCTGTTTTA
ACAAAAAGTGCTATTTTGTAGCGTCTGCGATAGCCAATTTTACTTGATCTACACCATAGC
ATACTGCGGCAAATCCTCCGCATTCCCTAACGCGGCGCAAGAATTCCCTTTGTTCCTGGC
TTACTTTAGTTCCTTTCTTGTTGGCTCGTTTAAGCTCAATTGCAATGAATGCATATTTGC
AGCCAATAAAACCAGTCAGGATTAGAATGTCGCTTACTCCTTTTTTTACACCTGCTTGCT
GATCCTTTACTGCTGTGCCTATTGTTTTCTTCCCTTCGTTTTTAGTGTGCCAAACAAGCC
ACATTGGAAACTCATATGTTAACCATGAATAAGAATCAACCTGGTGCGCTTCCTCTTTTC
TGTCATCTGGATCTGATTTGTCGTAATACTCCAGATAATCGCCTTTATCAGTAACCATTT
TTAAAACTCCTTCTGTGCGATCAAATCTTCTTTCTTTGTGTTCTTGCGATGGGTAACACG
TTTTGGCGGCAATATTTGCCCCGCATAACTCATGATCTTAATTGCATTGCGGCAAGCGAT
CATAAAGTTTGCGGCTTGGCGATCTATAACATGTGTTCTAACCGCCTTTGTCCAAAGCGT
TTTACATATCTTGTGTTCTGATTCAGGGAAATATTTTTCGTATGCCCTGAATTCTACGCC
GCCACTATCACGTAACGTGTAGCAGAATATTACGCCAGCCTGGTTTTTTGTCAGCGTCAC
ATTAAAATCTAACACGTCGCACCAATCGTTTTTACGGTACATCTTGCCGGATAAGTTATC
ATTTGGATCGCGTAACTGAACATTACAGCAACGGCATACACGCGCCGCAACGTCATTTTT
TGCGCCGCAACCTTTTACAATAACTTTCTTTGTGCGGTCATCAATCTGATCCTCACATTC
CTGGAACGTCCAGAAATGTTCACAACGATTTCCGTTTTCATCCTCATTAATGCAACGGCG
AGCATAGAATGAATTTTCTGTACCGCAAATCGGGCAATATTTCGGATCTTTGTCCTGTGA
TTTACGTAACTGGAATTGCGCTTGCTCTAACATCGGATCGAAATACAAATTACCCATTTC
AAACATCGTGCCTGAAAAATCCAAAACAAGGTGATCCGTTTTGTGCATCCCCAATACTTC
TTTATGGTATGTTTTTAATTGACGCATACCACGCCCCAAAAGCTGAGTTAATAGCGTGAG
ACTTCCGATCTTACGCAAAATAACAGAAGTATCCCACGGCGGCACGTTCACGCCAGTTGT
TAGCGCCTGAACCTGAAAAATATATTTCACCCTGCCTTCATAAGCATCCTCAAGCCATAA
GCGCCTCTGTTTCTCTCCAGTTTTTCCGGTAATAATGTGATATTTCGTGCCAGGAGGAAG
CGCCGCCGCTGCCTCTTTGCAGTGCCTTTCGTCAGCGCAAGTAACAAGAGCGCACAAGCG
GTTTTTCATCACCTCGTGAACCATCTGCATTATTTTCTGCGTCATGGTTCCTGATTGGTG
AATCTTGTCACTCATGGCCTTTAATTGCTTCTGGTCATAATCAGCAACGCCAAATTCATT
CACTGGCGTAAATTCTGATAAGTCGTAACCCAAATCACCAACATTGCCAAAATAAGTGGG
AACAACTGAACCAAATTTTACCAGGTAATCAGTATCAATGTTTGTGATCTGCTCACGCCA
AAACCCAGGAATTCTTTTATCTTCGACAAGTATCGGCTCAATTCCGCGATATTCCGATCC
TGTCATTCCAAATATACGCAACTGATGACCGTAAGTCTCAAGACAACGGCGGCGCATTTC
TGCAATGATAATGGTGTATTGTGCGCGGCCTGAACCAATCAGCAACGGATTGCCTTCAAC
TGGTTCACCTTTCGGTGTCATCATTTGCTCTATGCTTTCGCCGTTTTCCTCGGCTTCAAC
AATATCATTCCAGTTGACTTGATGACATTCATCTATACCTAAAACCTGTGGGACGTAATC
ACCTAACGCCTTATTCAATCCGCCAATTACAGTACCTTCCGATCCTACAACAATCGGGAA
ATAAGCGCTTTTGGTATTCAGGCCAGCGCAATAAACGGAATTCGGAACACCAAAGGCGCT
AATCTCTTTTGAATCCTGATCCACAATTTCAGATTGACGCGCCAGAAATAACGCTTTCAA
TCCCATTTTCCTGCACTGAGCCGCAACCATAGCAAAGATGATTGTTTTACCTGCCGACAC
CGCCGCTTTAACGAAAAACGGATCAACATACTTACTCAAGCGCTTTGCAATTTCAGCGTA
AGCAACGCATTGGTATTCATACGGGACAATCTCACCAACCGTGAAACGCTTCTGGATTGC
CTTAATCCTTTCCTCTCCCAGATCTGCAATCTGCTTTTCAATGTTAGGAATCATTTTTTA
TCCTTTTGACTAAATGCCATTTGCGGCATATCATACACAAACTTAATCAAGTTTTTTAGC
AAAAAGTGCTATAGGTGAAAATATGAGCGAAATCAAAATTGCGGCCTCAACGGGCGAAAT
CGACAAACGCACAATCAATGGTAACAACGGCGTAAGGCGTGGTAAAGACCGGAAGCGCCG
CGCACCTGTTAGCGGTTATCTGGTACTAAAGGAAGAAGTAAGGGCAGGATTAAAAGCGAG
GCTTGATGAGGTGGTTAGCGCTTATGGCGGCTGTGCTGCGTTGGCGCGTGAGATTGGCGT
TAACCTTAAAACAGTGTGGGGATGGAAAGAGCGCGGCATGATTTCAGCTAAAGGCGCTGA
ACTGATCCAAAAGGATTACCGCCGCAAAGGTTTTAACGGCTTCCGCGCTTCATATTGCCG
TCCAGATTTGCGCTTTGACAACAACGGCAAGCCATTAGAGAATCGTTGCAGCAACAGAAA
GCTCATGCGATTTGTAACCAAAGAGGAAGCGGAAGCAAGAGGATTTGTGCGTCCTTACGA
TCCGTTGCGGTCTATGAGTCCAGAAGAACGCGAGAAGGAGAAAGCGCGGCGCAAGGCTGA
ACGAGACAAGGCGAAAGAAGAACGGCGCAAAGCAAAGGAAGCCAATCAGAAGAAACGCGT
TGTGATTTCCGTCGATAGCACTGATTGCTAAAAATTCCGGCCTGGCATGGTTTATCATCG
TGCCAGTTTTTTTTATTTGGATGTTGAGAAATGCATTATCAAAAAGAAGAAGTAATCCCA
AAGATGCGCGGCATGTGGCAAGCGGCATTGATGAAACTTTGCGATATTCCTCAATTAACC
TTTAACGGAAAGCATCAGCCTTGCCCTTATTGCGGCGGTAAAGATCGCTTTCGTTGGACT
GACAAAATCAACGAGAAAGGCGACGGCGGAAACATTTGCAACCAATGCGGGAATGATTCA
GGGATCGGATTATTCATGCGCATACGTGGTGAAAATTACAGTGAAGCAATCGACACTCTA
GGAGAATGGTTAAACCTGGTTCCGGTTGAGGTTGTCAACAAGGCCAACAAAGCGGCAAAA
CGTGACTCAGGTTACAATTTCGGATCGCAAGCACCACATGAAAAATGTGTTGAGGTGATG
GATAAAACTGAACGCATGGAAATAACAAATCTAAGCGTTTTTGAGGCGTTTTATCCATTA
GACGGCGAATCGTATCAAGTTGGAGTAAAAACTCATGACAATGGATATTGCGAGCATATA
CACGCAATTCCTTGCCACTTGGTGCATAGCGATGAACTGGATGATGAAATGTGTAATATT
CTTTTCGTCAATGAGGAAGGTCAAAGCAGTTTTTACGCTAAGGATTACACGCGCGGCTCC
GTTGCGGTAACTGGCAAGACTGACAAAACAATTTACCTTTGCGTTGATTGGATTGATGCG
CAACATATCCACCTAGCTACGGGACAAGAAGTATGGGCTTGCTTCTCTGCGTCGAATCTT
GAAATAGTAGCGTATCGCTACAAAGGTGATCGCAAAATGCGCGTTGTGTGCCATGCTAAT
GATCGCGATACTTTGATTGCTGCTGATGATCGCGAATTAGACGTAATGTTACCAATTAAC
GGTAAATTCAAAAATGGAATAGAGCGGAGGCTTTACAAGGCAAGTGACTTATTATAATAT
TCATCCTGCTACTAACACTTTTCGATGAATCTGTTTCATTGACTTCTCGTTGTCGTTAAC
GATGCCCCGCTTCGGCGGGGTTTTTTATTGCATGTAACAAATGGCTGTAGCATAATTACA
TGACCTATTTTAACAAAAAATGCTATGAGGTGAAATTATGGCTTTATATCGCACTGGTAC
GGCTGCAATGGACGCACAAGGCGTTATCACTGGTACTGGCACAAAATGGCGTGAGCCGCT
TTCTCTTATTCGCACTGGCGCAACAATCGTTTTTTTAACCACGCCTTTAAAGCTGGCGGT
TATCAGCGATATTGTAAGCGACACGGAAATGAAAGCGATCCAGACTGACGGCGAGCCAGT
AGCAAACGGAAATTATGTAATCCTGTTGAATGACTCGCTAACTGTCGATGGAATGGCGCA
AGATGTAGCGGAAACGCTGAGATATTACCAAAGTAAAGAAACGGTTATTGAGGAAGCAAT
TGAATTCTTCAAAAACTTTGACCTTAAAACATTACAGGATCTTGTTGCTCGCGCTGAGTC
TTCCGCACAAAAAACGGATGCAGATCGCGCCGCAACTGAGCAATTAAAAAACGACACGCA
AGCTATTAAGGATGCCGCTGTTTCTGAGACTACGCAAATTAAAGATACTGCGATTGCAGA
AACTCAACGGATTAAGGATGCTGCTGTTTATGAAACCAATCAGATTAAGGCAGACACTGA
CGCAATAAAAACGCAGACGCAACAAATAAAAGATAGCGCCGTTGCTGAAATTGGATCAAT
TAAAAACGAGGCTGTTAATGCTCGCGATGCAGCAAAGGAATCACAACTTGCCGCTGAACA
ATCAAAGATTGCCGCCGACTCTGCAAAGGCTGGAGCTGAAACTGCGCGTGATGAAGCTCG
CCAATGGGCACAACAAGTTAACCCTGAAAACCTTCTGCATAAGGATCAGAATCTTAATGA
TCTTGCTAATAAAGATTTAGCAAGGGAGGCGCTGAAAGTTGAGGCTGTTAATTCAGTTAA
GGGGCAAAATCCAGGTGATTATAACTCATTTCGTAACCCTGCATGGACTTATGAATTACG
GATCGCAAACAACGGCGAGTGGCGAGTTGCAAGAAATAGCGATAACAGCACATCCGCTCT
TTCTGTTGGTGCTGGCGGCACTGGTGCGGAAAATATTGAAGGTGCAAGAAAAAACTTTCG
TGTGCAAGGTGTTTTTTGCATTACTAGCGAAACACCAGGAGATTTTAACTCCATAAAATC
ACCTGATGGAAAACTAAATATGCTTGTAGCTAACAATGGTGTGTGGGGTGTTCAAGATGA
TTATGGAAACATCAAACCATTACACATCGAACGAGGAGGCACTGGCGCTCAAAGCATAGG
GCAAGCAAGGAGTAATTTTGGCATTGGTGAAACTGACATTCCTGTTTTTAGAGGAATAAG
CCTAACAGAAAAAAACTCTGCAAACTCCGGCATACTTTATTTGTTAAACAAAAATGCAGA
AGGAGTACAGATTTCGTATTCAAGGGTTTACAACGAAATTCAGGGTGGGATTGCAAAGGC
AACTATTCAAGTAACTAGAGAAGGTGGCGACACAAACTATTATCAGTTTGATGAAAGTGG
CAACGCGCTGAATTACAACTCAATAACAATCGGTAGGGGGATTGGTAATGCTCTTGGTAG
TAACTCTATAGTAATTGGAGATACTGATACTGGATTTAGGCAAAATGGAGATGGCATTCT
TCAAGCTATTGCTGATAATCAAGTGATGTTTGCATTTACAAAGAGTGGCAATGTTGCATA
CAGAACTATTCAATCATTTGCTCCAGAAGATGCACGTTTTGCTTATGTTGAAGGTGTTAG
GAGGGGTGGTGCGAATTGCTTTATAGGTGGGCATGTTGAGGGTGGTGCTTTTACTGCATG
GCGTGATCGCGCCGCTGGTATGCTTGTTGAACTTCCAGGCGATGATGTAGCCGTTAACGT
TGTTAAGGTTGTAAGGTGGGGTTATGATTGGGTTTTTGGTATAGATGTTGCCAGATATGG
CGCTGGAGGTTGCGAAGCTCACCTAAACGTAAGAGGTACATCATACACTTTTAATGATGC
TGGTTATGCAAGCGCTGTTCAATGGGTTAATACATCTGATATTCGACTAAAGGCAAATCT
AAAGGAGATTAAAAGCGCCAAAGATAAAGTTAAATCAATTAAGGGATACACTTACTTTAA
GCGCAATAGCCTAGAAGAAGATGAAAATTCTTTCTACTCTGAGGAAGCTGGCGTAATAGC
TCAAGATGTTCAGACTGTTTTGCCGGAAGCGGTTTACAAGGTATCTGATTCTGAAATTTT
AGGCGTTAGCTATGGCGGTGTAA

[0140] Tolerable variations of the bacteriophage sequences will be known to those of skill in the art. For example, in some embodiments the bacteriophage comprises a nucleic acid sequence that has at least 60%, at least 65%, at least 70%, at least 75%, at least 80%, at least 81%, at least 82%, at least 83%, at least 84%, at least 85%, at least 86%, at least 87%, at least 88%, at least 89%, at least 90%, at least 91%, at least 92%, at least 93%, at least 94%, at least 95%, at least 96%, at least 97%, at least 98%, or at least 99% sequence identity to the nucleic acid sequence set forth in any one SEQ ID NOs: 1-13.

### Methods

[0141] In another aspect, the invention includes a method of increasing antibiotic sensitivity and/or decreasing virulence in pathogenic bacteria. In some embodiments, the pathogenic bacteria are drug resistant. In some embodiments, the pathogenic bacteria are multi-drug resistant (MDR) bacteria. In some embodiments, the pathogenic bacteria are pan-drug resistant (PDR) bacteria.

[0142] The method comprises contacting the pathogenic bacteria with a lytic bacteriophage selected from the group consisting of OMKO1, LPS-5, TIVP-H6, LPS-TLTL, SFA1-1, SF60B, SFNHSI, SF37B, and U136B. In certain embodiments, the bacteriophage binds a molecule of an efflux pump, OmpA, OmpC, Type IV pilus, LPS or peptidoglycan in the bacteria and the bacteria either genetically resists bacteriophage infection or becomes infected and lysed by the bacteriophage. The genetically resistant bacteria have impaired efflux pumps and increased sensitivity to antibiotics, or have impaired virulence factors, such as reduced production of pyocyanin or elastase, that are responsible for decreased virulence.

[0143] In one embodiment, the bacteria are contacted with bacteriophage at a multiplicity of infection (MOI) of bacteriophage to bacteria in the range of about 0.0001 to about 10¹⁰. The MOI may range from about 0.0002 to about 10⁹, from about 0.0003 to about 10⁸, from about 0.0004 to about 10⁷, from about 0.0005 to about 10⁶, from about 0.0006 to about 10⁵, from about 0.0007 to about 10,000, from about 0.0008 to about 5,000, from about 0.0009 to about 2,500, from about 0.001 to about 1,000, from about 0.005 to about 500, from about 0.01 to about 100, from about 0.05 to about 50, from about 0.1 to about 10, or any range therebetween.

[0144] In another embodiment, the method further comprises contacting the genetically resistant bacteria with an antibiotic. The antibiotic includes any of the antibiotics described herein, any commonly known agent, and any combination thereof.

[0145] In another embodiment, the method comprises or further comprises contacting the genetically resistant bacteria with one or more antibiotics, e.g., 1-100 antibiotics or 1, 2, 3, 4, 5, 6, 7, 8, 9, 10, 11, 12, 13, 14, 15, 16, 17, 18, 19, 20, 21, 22, 23, 24, 25, or more antibiotics.

[0146] In yet another aspect, the invention includes a method of treating a bacterial infection in a subject in need thereof. In certain embodiments, the bacterial infection is drug resistant or multi-drug resistant (e.g. caused by a drug resistant or multi-drug resistant bacteria). The method comprises administering the pharmaceutical composition as described herein to the subject with the bacterial infection. In one embodiment, the composition is administered directly to a site of the bacterial infection. In another embodiment, the method further comprises administering an antibiotic as described herein to the subject. In one such embodiment, the antibiotic is co-administered with the pharmaceutical composition. In another such embodiment, the antibiotic is administered before or after the pharmaceutical composition is administered.

[0147] In some embodiments, the antibiotic can be administered minutes, hours, days, or weeks, before or after the pharmaceutical composition is administered, e.g.: 1, 5, 10, 15, 20, 30, or 45 minutes; 1, 2, 3, 4, 5, 6, 7, 8, 9, 10, 12, 14, 16, 18, 20, or 22 hours; 1, 2, 3, 4, 5, or 6 days; or 1 or 2 weeks, or any amount of time there between.

[0148] In another aspect, the invention includes a method of disrupting pathogenic bacteria associated with a biofilm and compositions for use thereof. In another aspect, the invention includes a method of preventing formation of a biofilm.

[0149] In some embodiments, the biofilm is on Dacron and/or any other prosthetic material.

[0150] In some embodiments, the pathogenic bacteria are associated with a biofilm. In some embodiments, the pathogenic bacterium is Pseudomonas aeruginosa. In some embodiments, the Pseudomonas aeruginosa is a Pseudomonas aeruginosa biofilm.

[0151] In various embodiments, the bacteriophage are selected from among the bacteriophage listed in Table 1.

[0152] In certain embodiments, the bacteriophage comprises a nucleic acid sequence selected from the group consisting of SEQ ID NOs: 1-13. In certain embodiments, the bacteriophage comprises a nucleic acid sequence that has at least 60%, at least 65%, at least 70%, at least 75%, at least 80%, at least 81%, at least 82%, at least 83%, at least 84%, at least 85%, at least 86%, at least 87%, at least 88%, at least 89%, at least 90%, at least 91%, at least 92%, at least 93%, at least 94%, at least 95%, at least 96%, at least 97%, at least 98%, or at least 99% sequence identity to the nucleic acid sequence set forth in any one SEQ ID NOs: 1-13.

### Administration/Dosing

[0153] In the clinical settings, compositions of the invention can be administered to a subject by any of a number of methods, each of which is familiar in the art. For instance, a pharmaceutical formulation of the composition can be administered by inhalation, topically, locally or systemically, e.g., by intravenous injection, intramuscular injection, intraperitoneal injection, retro- or peribulbar injection.

[0154] The regimen of administration may affect what constitutes an effective amount. The therapeutic formulations may be administered to the subject either prior to or after the manifestation of symptoms associated with the disease or condition. Further, several divided dosages, as well as staggered dosages may be administered daily or sequentially, or the dose may be continuously infused, or may be a bolus injection. Further, the dosages of the therapeutic formulations may be proportionally increased or decreased as indicated by the exigencies of the therapeutic or prophylactic situation.

[0155] Administration of the composition of the present invention to a subject, such as a mammal, for example a human, may be carried out using known procedures, at dosages and for periods of time effective to treat a disease or condition in the subject. An effective amount of the composition necessary to achieve a therapeutic effect may vary according to factors such as the extent of implantation; the time of administration; the duration of administration; other drugs, compounds or materials used in combination with the composition; the state of the disease or disorder; age, sex, weight, condition, general health and prior medical history of the subject being treated; and like factors well-known in the medical arts. Dosage regimens may be adjusted to provide the optimum therapeutic response. For example, several divided doses may be administered daily or the dose may be proportionally reduced as indicated by the exigencies of the therapeutic situation. One of ordinary skill in the art would be able to study the relevant factors and make the determination regarding the effective amount of the composition without undue experimentation.

[0156] Actual dosage levels of the cells in the pharmaceutical formulations of this invention may be varied so as to obtain an amount of the composition that are effective to achieve the desired therapeutic response for a particular subject, composition, and mode of administration, without being toxic to the subject.

### Routes of Administration

[0157] Routes of administration of the compositions of the invention include inhalational, oral, nasal, rectal, parenteral, sublingual, transdermal, transmucosal (e.g., sublingual, lingual, (trans)buccal, (trans)urethral, vaginal (e.g., trans- and perivaginally), (intra)nasal, and (trans)rectal), intravesical, intrapulmonary, intraduodenal, intragastrical, intrathecal, subcutaneous, intramuscular, intradermal, intra-arterial, intravenous, intrabronchial, inhalation, topical, intra-orbital, intra-aural, intra-articular, and topical administration.

[0158] Suitable formulation of the compositions and dosages include, for example, dispersions, suspensions, solutions, beads, pellets, magmas, creams, pastes, plasters, lotions, discs, suppositories, liquid sprays for nasal, ocular or oral administration, aerosolized formulations for inhalation, compositions and formulations for intravesical administration and the like.

[0159] It should be understood that the formulations and compositions that would be useful in the present invention are not limited to the particular formulations set forth in the examples. The following examples are put forth so as to provide those of ordinary skill in the art with a complete disclosure and description of how to make and use the cells, differentiation methods, engineered tissues, and therapeutic methods of the invention, and are not intended to limit the scope of what the inventors regard as their invention.

[0160] The practice of the present invention employs, unless otherwise indicated, conventional techniques of molecular biology (including recombinant techniques), microbiology, cell biology, biochemistry and immunology, which are well within the purview of the skilled artisan. Such techniques are explained fully in the literature, such as, “Molecular Cloning: A Laboratory Manual”, fourth edition (Sambrook, 2012); “Oligonucleotide Synthesis” (Gait, 1984); “Culture of Animal Cells” (Freshney, 2010); “Methods in Enzymology” “Handbook of Experimental Immunology” (Weir, 1997); “Gene Transfer Vectors for Mammalian Cells” (Miller and Calos, 1987); “Short Protocols in Molecular Biology” (Ausubel, 2002); “Polymerase Chain Reaction: Principles, Applications and Troubleshooting”, (Babar, 2011); “Current Protocols in Immunology” (Coligan, 2002). These techniques are applicable to the production of the polynucleotides and polypeptides of the invention, and, as such, may be considered in making and practicing the invention. Particularly useful techniques for particular embodiments will be discussed in the sections that follow.

### EXPERIMENTAL EXAMPLES

[0161] The invention is now described with reference to the following Examples. These Examples are provided for the purpose of illustration only, and the invention is not limited to these Examples, but rather encompasses all variations that are evident as a result of the teachings provided herein.

[0162] The materials and methods employed in these experiments are now described.

[0163] Bacterial growth conditions and media: Bacteria were grown in LB broth with 10 g tryptone, 5 g yeast extract, and 10 g/L NaCl. LB agar included 15 g/L agar and LB top agar included 7.5 g/L agar unless otherwise noted. Overnight culture incubation was performed at 200 RPM shaking at 37° C.

[0164] Phage library screens: To isolate phage U136B, thirty-three phage isolates collected previously from various sources were screened. Each isolate was screened using the plaque spot test on host lawns of wild-type and knockout E. coli from the Keio collection obtained from the Yale Coli Genetic Stock Center (FIG. 12). Those phages for which a difference in plaquing was observed in the library screen were then screened for differences in efficiency of plating (EOP, the number of plaques formed on a mutant divided by the number of plaques formed on BW25113). The initial EOP for phage U136B on the tolC knockout was determined using a full plate dilution series in top agar that contained 3.8 g/L agar and serial dilution spot tests of 2 μL to obtain phage titers on each bacterium.

[0165] Phage TIVP-H6 (Myovirus) was discovered by screening for phages that infect Pseudomonas aeruginosa strains which overproduce the virulence factor pyocyanin, and determining that evolution of phage resistance led to reduced pyocyanin production in bacterial mutants.

[0166] Phages LPS-5 (Podovirus) and LPS-TLTL were discovered by screening for phages that interact with LPS of P. aeruginosa, indicated by classic ‘rough-colony-forming’ phenotypes when phage-resistant mutants grow on agar (Luzar and Montie (1985) Infection and Immunity 50:572-576).

[0167] Phages SF37B, SF60B, SFNHSI, and SFA1-1 were discovered by screening phage isolates from various sources on Shigella strains PES77 and/or BW25113.

[0168] Phage PG-I1 was discovered by screening phage isolates from various sources on Staphylococcus aureus bacteria.

[0169] Mutant selection procedure: To select for phage-resistant bacteria, wild-type bacteria and phages were mixed, then plated onto LB agar and incubated overnight at 37° C. To ensure the isolation of independent mutations, each replicate was grown from a single isolated colony. To confirm the multiplicity of infection (MOI, the ratio of phage particles to bacterial cells) on the agar plate, bacteria and phage were plated in triplicate and counted cfu/mL and pfu/mL, respectively. From each mutant-selection plate, a random colony was picked, plus any colonies of notable morphology, and streaked onto LB agar plate and incubated at 37° C. overnight. The colonies were re-streaked to obtain double-purified isolates and each grown in 10 mL LB at 37° C. with shaking overnight. Freezer stocks of each mutant were archived in 20% glycerol, stored at −80° C.

[0170] Assessment of phage resistance: 10 μL of a high titer stock of phage (˜10⁹ pfu/mL) was streaked along ˜10 cm lines on LB agar plates. Phage streaks were allowed to dry, and 1 μL samples of overnight cultures of each bacterium were streaked perpendicularly across the phage lines in duplicate. Plates were allowed to dry and incubated overnight at 37° C. Bacterial streaks were scored for signs of phage lysis. Isolates with signs of lysis were scored as susceptible to phage while isolates without lysis were scored as phage resistant.

[0171] Bacterial growth curves for phage resistance assays: Cultures of wild type and other bacteria (e.g., phage-resistant and gene-knockout strains) were grown to exponential phase as measured by optical density at 600 nm wavelength (OD600) of 0.25-0.38. The exponential-phase cultures were diluted 1:5 into wells with LB to a total volume of 200 μL with phage to reach the target MOI. Cultures were incubated at 37° C. with shaking at 288 RPM for 18 h and OD600 read every 2 minutes using an automated spectrophotometer (TECAN microplate reader).

[0172] Bacterial growth curves for comparison of differing mutants: Bacterial cultures were preconditioned in LB medium overnight from individual colonies, then transferred to fresh LB in 200 μl total volumes. Cultures were incubated at 37° C. with shaking and optical density was monitored at 5-min intervals for 24 h by a TECAN microplate reader.

[0173] Single step growth curves: Overnight cultures of bacteria were diluted 1:100 into 10 mL pre-warmed LB broth and subjected to shaking at 200 RPM at 37° C. until exponential phase. These cultures were then inoculated into pre-warmed LB at an initial concentration of ˜2*10⁷ cfu/mL to begin the assay. Phage were added to an initial concentration of 2*10⁸ pfu/mL, for an initial MOI of 10. The assay flasks were incubated with shaking at 200 RPM at 37° C. Every 10 min, 50-μL samples were removed from each flask, transferred to a Spin-X column (CLS8160 Sigma), and spun at 14,000 rpm for 1 min. At 2 min and 12 min, bacterial samples were obtained from flasks with and without phage, and were diluted and plated in duplicate as above, in order to preliminarily assess infection rates. Within a week, each filtered phage sample was diluted in a 1:10 dilution series in sterile LB and 100 μL diluted samples were plated in soft agar overlay with 4 mL 7.5 g/L LB soft agar and 100 μL overnight bacteria (e.g., FIG. 12). Plates were incubated at 37° C. and plaques were counted the following day. For each time step, the dilution step with the greatest number of countable plaques was counted and used for analysis.

[0174] Transmission electron microscopy: Images of high-titer phage lysates were collected at the Yale Electron Microscopy facility in the Center for Cellular and Molecular Imaging. Samples were negatively stained with 2% uranyl acetate and imaged with FEG 200 kV transmission EM.

[0175] Broth microdilution method for antibiotic MICs: To examine colistin MIC, an original colistin solution (Alfa Aesar) with a concentration of 50 mg/mL was diluted to the following test concentrations in LB medium: 12.5, 25, 50, 100, 150, 200, 250, 300, 350, and 400 ng/mL. Bacterial cultures were grown from single colonies overnight in 10 mL of LB incubated at 37° C. with shaking. Each culture was diluted to ˜2*10⁵ cfu/mL in LB. MICs for colistin were measured by dispensing 100 μL of a given colistin concentration into each column and 100 μl of diluted bacteria into each row of a 96 well plate and incubating at 37° C. with shaking for 18 hr. Bacterial growth was scored visually as a binary variable (no growth vs. any visible growth). The lowest colistin concentration at which the well was completely clear was the value recorded as the MIC. For cases where replicates gave different answers, we report the mode.

[0176] Statistical analysis: All analyses were performed in R Studio (R Development Core Team (2010) R: A language and environment for statistical computing. (R Foundation for Statistical Computing, Vienna, Austria) using custom scripts.

[0177] Genome sequence analysis: Genome sequences were collected at the University of Pittsburgh Microbial Genome Sequencing (MiGS) center. Genomic DNA libraries were prepared using a modified Illumina Nextera library preparation (Baym M, et al. (2015) PLoS One 10(5):e0128036). Paired-end reads of 151 bp length were collected to a final coverage of ˜100-fold across the reference genome. Sequences were analyzed using breseq with default sequence end-trimming mode (Baym M, et al. (2015) PLoS One 10(5):e0128036; Deatherage D E & Barrick J E (2014) Methods Mol Biol 1151:165-188).

[0178] Complementation assays for gene knockouts: Electrocompetent bacterial cells were made by inoculating 10 mL LB broth with 100 μL of overnight bacterial cultures grown in LB broth. These cells were then incubated and shaken at 37° C. for 2-3 hours until they reached an OD600 of approximately 0.6. Next, the cells were centrifuged at 4,000 rpm for 10 min. The supernatant was poured off, then 10 mL of chilled 10% glycerol was added to the pellet. After resuspending the pellet by vortexing, the cells were centrifuged for 5 min at 4,000 rpm, then the supernatant was poured off. This glycerol wash cycle was performed 4 times. Finally, the cells were resuspended in 150 μL of 10% glycerol and were frozen at −80° C. or immediately electroporated. Plasmid DNA from ASKA clones (Kitagawa M, et al. (2005) DNA Res 12(5):291-299) (FIG. 12) was purified using the protocol found in the QIA Miniprep Handbook from Qiagen. The electrocompetent cells were then either transformed with an empty plasmid or complemented with a plasmid containing the gene which had been knocked out. These transformations were performed by thawing electrocompetent cells and plasmid DNA and adding 1-3 μL of DNA (<100 ng of DNA) to the electrocompetent cells. After being chilled, the mixture was pipetted into a chilled cuvette and electroporated. Immediately after electroporation, 500 μL of LB broth were added to recover the cells. The cells were then incubated for 1 hr at 37° C. with shaking. 100 μL of the electroporated cells were then plated on LB plates containing approximately 20 μL of 30 pg/mL chloramphenicol. These plates were then incubated overnight at 37° C. before isolation of transformed colonies.

[0179] Bacteriophage enumeration and efficiency of plating for complementation assays: Soft agar overlay tubes were prepared by mixing 4 mL 7.5 g/L soft agar, 4 μL of 30 p,g/mL chloramphenicol (for transformed strains only), 20 μL of 100 mM IPTG, and 100 μL of a bacterial overnight culture (grown in LB broth). These soft agar overlays were poured over LB plates with added chloramphenicol. For non-transformed strains, no chloramphenicol was added. A 1:10 dilution series was performed for 4 phage stocks from 10⁻¹ through 10⁻⁷, and 2 μL of each dilution from each phage stock was spotted onto every bacterial overlay. After these spots were completely dry, the plates were incubated overnight at 37° C. Finally, pfu/mL was calculated for each plate, and the EOP was calculated by dividing the pfu/mL of a test strain by that of the wild type.

[0180] Assessment of tetracycline resistance: Overnight cultures were diluted in 1:10 dilution series in sterile LB, and 2 μL spots of each dilution were immediately plated on LB agar plates containing varying concentrations of antibiotic: 0, 0.12, 0.25, 0.5, 1.0, 2.0, and 4.0 pg/mL tetracycline. Plates were allowed to dry and incubated for two days at 37° C. The MIC of tetracycline was recorded for each isolate as the concentration at which colonies no longer formed at the 10⁻⁵ spotted dilution. For cases where replicates gave different answers, the mode was reported.

[0181] Preparation of phage stocks for the evolution experiment: 20 μL of cryogenically frozen U136B phage stock was diluted in sterile LB broth in a 1:10 dilution series. 100 μL of each dilution was plated with 100 μL of an overnight culture of DH5a in 4 mL 7.5 g/L LB soft agar overlay on standard LB agar and incubated overnight at 37° C. Ten isolated plaques were randomly chosen from the 10⁻⁷ dilution plate, suspended in 750 μL sterile LB, and filtered through a 0.22 p,m Spin-X column (CLS8160 Sigma) at 14,000 rpm for 1 min. The ten phage stocks were enumerated by top agar overlay plating and subsequently diluted in sterile LB to a target concentration of 1.0*10⁷ pfu/mL. 200 μL samples of each replicate phage stock were combined in duplicate with 200 μL sterile 40% glycerol solution and frozen at −80° C.

[0182] Preparation of bacterial cultures for the evolution experiment: Cryogenically-frozen E. coli strain BW25113 was streaked onto LB agar and incubated overnight at 37° C. Twenty separate isolated colonies were randomly chosen and suspended in 10 mL sterile LB in separate flasks. Cultures were incubated overnight at 37° C., with 200 rpm shaking. Samples of these founding cultures were archived by combining 900 μL of each replicate bacterial culture with 900 μL sterile 40% glycerol solution in duplicate, and frozen at −80° C. The experimental populations were established by adding 9.8 mL sterile LB to 50 mL glass Erlenmeyer flasks and then inoculating with 100 μL of one of the BW25113 bacterial cultures described above (each flask receiving a distinct starting culture) to an estimated concentration of 2*10⁷ cfu/mL (assuming final E. coli overnight densities in LB are 2*10⁹ cfu/mL). For the +phage populations, 100 μL of one of the diluted U136B phage stocks prepared above was then added to 10 of the flasks (each flask receiving a distinct starting culture) to a concentration of 1*10⁵ pfu/mL. For the 10 control populations, 100 μL sterile LB broth were added in place of phage. Flasks were incubated overnight at 37° C., with 200 rpm shaking.

[0183] Serial passaging in the evolution experiment: Each day (24 h±2 h), the appearance of each flask was recorded and 100 μL from each experimental flask were transferred into 9.9 mL sterile LB broth in fresh flasks. To reduce risk of contamination, the transfer micropipette was wiped down with 70% ethanol on a between each transfer, and flasks with phage and without phage were alternated to enable detection of cross contamination. To archive the evolved samples each day, 900 μL samples of each replicate experimental volume were combined in duplicate with 900 μL sterile 40% glycerol solution and frozen at −80° C.

[0184] Daily enumeration of bacteria during evolution experiment: Each day, 1:10 serial dilutions of each experimental volume were prepared in sterile 0.85% NaCl up to 10⁻⁸, and 2 μL spots of each dilution were plated on both standard LB agar plates and LB agar plates prepared with tetracycline. Plates were allowed to dry and then incubated overnight at 37° C. The following day, the most dilute spot with colonies present was identified and colonies were counted in order to determine the total bacterial population density and the Tet^{R} bacterial population density for each replicate flask.

[0185] Daily enumeration of phage during evolution experiment: The dilution series prepared above was also used to enumerate phage daily. For the 10 flasks with phage, 2 μL spots of each dilution were plated with 100 μL of an overnight culture of DH5a in 4 mL 7.5 g/L LB soft agar overlay on standard LB round plates (when square plates were used, 125 μL DH5a was used in 5 mL soft agar) and incubated overnight at 37° C. For the flasks without phage, only the least dilute concentration was plated as a check for phage contamination. The following day, the most dilute spot with plaques present was identified and plaques were counted in order to determine the phage titer.

[0186] Isolation of bacteria from evolution experiment: Two individual isolates were obtained from each population at day 5 and day 10. Isolated colonies were selected in the most dilute spots that contained colonies on the bacterial enumeration plates described above. One colony was picked from the total bacterial population (on the standard LB plates) while one colony was picked from the LB plates containing 0.5 p,g/mL tetracycline. The colonies were streaked onto sterile LB plates and incubated overnight at 37° C. For each isolate, the colony most distant from its neighbors was streaked onto a new sterile LB plate and incubated overnight at 37° C. For each re-streaked isolate, the colony most distant from its neighbors was suspended in sterile LB broth and incubated overnight at 37° C., with 200 rpm shaking. To archive the isolated bacteria, 900 μL samples of each bacterial culture were combined in duplicate with 900 μL sterile 40% glycerol solution and frozen at −80° C.

[0187] Kirby Bauer colistin disk diffusion assay: Mueller Hinton plates were prepared by pipetting 25 mL of Mueller Hinton agar into each plate, then allowed to dry for two days. Plates were then used either immediately or refrigerated until use. Overnight bacterial cultures of each strain were prepared by incubating a single bacterial colony in 10 mL LB broth at 37° C. for 18-20 hours. After incubation, 1:10 dilutions of each bacterial strain were prepared by combining 900 μL 0.85% NaCl solution with 100 μL bacterial inoculation. To prepare the disk diffusion plates, 100 μL of each bacterial dilution were pipetted onto a Mueller Hinton plate then spread evenly across the plate with a sterile plastic L spreader. Plates were then allowed to dry and cardboard colistin disks (ThermoFisher, #CT0017B) containing 10 μg colistin were placed in the center of the plates using sterile forceps. Plates were incubated for 20-24 hours at 37° C. Finally, to measure the diameters of the zones of inhibition (ZOI), three straight lines, each at a different angle, were drawn through the center of the ZOI using a ruler. The diameter of the ZOI was measured along the drawn lines.

[0188] INSeq transposon mutant library preparation. The insertion-sequence (1NSeq) transposon mutant library was made via conjugation. A donor bacterial strain containing a plasmid was conjugated with a wild type recipient strain on agar plates, at a ratio of 1:1 donor to recipient. After 3 hours incubation at 37° C., conjugation mixtures were plated for single colonies on plates with antibiotic to isolate transconjugants that were resistant to both markers (i.e., marker on plasmid and on recipient chromosome). Following 24 hours incubation at 37° C., colonies were scraped into LB medium using a sterile spatula and stored in 20% glycerol at −80° C.

[0189] INSeq screen. Aliquots of the library were thawed on ice, washed once in LB and resuspended to a concentration of approximately 10⁷ CFU/mL in LB and incubated at 37° C. for 1 hour, with shaking. A sample of test phage was added, in triplicate, to a final concentration of approximately 10⁵ PFU/mL, for MOI≈0.01. Following overnight incubation, cultures were harvested and genomic DNA was extracted and prepared for sequencing. DNA libraries were pooled and sequenced at the Yale Center for Genome Analysis via the Illumina HiSeq2500 system. Sequences were analyzed using scripts modified from Goodman et al (Cell Host Microbe 6, 279-289 (2009)). Briefly, using Python scripts adapted from analysis packages previously described (Goodman et al. (2011) Nat Protoc 6, 1969-1980), sequencing reads were indexed by barcode, and transposon sequence was trimmed leaving 16 bp of adjacent genomic DNA. These 16 bp sequences were aligned to a reference genome using Bowtie2, by counting the number of reads for each insertion site, normalizing to counts per million reads and binning by gene (Langmead and Salzberg (2012) Nat Methods 9, 357-359). Transposon insertions mapping to the distal 5% ends of any coding region as well as transposon insertions mapping to intergenic regions were filtered out during analysis. A Z-test was performed using the log ratio of normalized output count to normalized input count, and Q-values from false discovery rate (FDR) correction of <0.05 were considered significant for further analysis.

[0190] Efficiency of plating, and adsorption assays. Efficiency of plating (EOP) was measured as the ratio of the test phage titer on the experimental strain to its titer on the WT strain. Phage binding to cells (adsorption) was measured over a 20 minute adsorption assay (Kropinski. Bacteriophages. (Humana Press, 2009), pp. 151-155), which estimates the rate of ‘disappearance’ of phage particles (i.e., reduction in titer) in liquid LB medium over time when viruses are challenged to attach to bacterial cells.

[0191] The results of the experiments are now described.

### Example 1

[0192] Bacteria frequently encounter selection by both antibiotics and lytic bacteriophages. However, the evolutionary interactions between antibiotics and phages remain unclear, in particular whether and when phages can drive evolutionary trade-offs with antibiotic resistance. Herein, Escherichia coli phage U136B is described. Its reliance on two host factors involved in different antibiotic resistance mechanisms: 1) the efflux pump protein TolC, and 2) the structural barrier molecule lipopolysaccharide (LPS), was demonstrated. Since TolC and LPS contribute to antibiotic resistance, phage U136B should select for their loss or modification, thereby driving a trade-off between phage resistance and either of the antibiotic resistance mechanisms. To test this hypothesis, fluctuation experiments and experimental evolution were used to obtain phage resistant mutants. Using these mutants, the accessibility of specific mutations (revealed in the fluctuation experiments) were compared to their actual success during ecological competition and coevolution (revealed in the evolution experiments). Both tolC and LPS-related mutants arose readily during fluctuation assays, with tolC mutations becoming more common during the evolution experiments. In support of the trade-off hypothesis, phage resistance via tolC mutations occurred with a corresponding reduction in antibiotic resistance in many cases. However, contrary to the hypothesis, some phage resistance mutations pleiotropically conferred increased antibiotic resistance. The molecular mechanisms underlying this surprising pleiotropic result, consideration for practical aspects of phage application, and the importance of ecology in evolution of phage resistance are discussed herein. It is envisioned that phages are useful for the reversal of antibiotic resistance, but that such applications will need to account for both unexpected pleiotropy and evolutionary context.

### Example 2: Phage U136B Relies on the Antibiotic Resistance Protein TolC

[0193] To identify phages that use the antibiotic efflux pump protein TolC for infection, a collection of E. coli phages were screened for the inability to form plaques on a tolC knockout. This screen identified phage U136B, a curly-tailed phage with siphophage morphology (FIG. 8) that had been originally isolated from a pig farm in Connecticut (FIG. 12) and has no plaquing ability on a tolC knockout (FIG. 1A). Knocking out outer membrane proteins used by other phages had no impact on phage U136B infection, indicating tolC is unique in this respect. Expression of tolC from a plasmid vector fully restored phage U136B plaquing on the tolC knockout (FIG. 1). Phage U136B also had no effect on the growth of tolC knockout bacteria in liquid culture (FIG. 1C), and correspondingly the phage did grow on the tolC knockout (FIG. 1D).

### Example 3: Phage U136B Relies on Inner Core of the Lipopolysaccharide

[0194] In addition to outer membrane protein receptors, many phages also require LPS receptors in their initial contact with the host cell. To assess whether U136B relies on LPS, a screen was conducted on a panel of genes involved in LPS synthesis (the “rfa” genes, named originally for the rough (′rf) colony phenotype of some strains with altered LPS structures). All of the rfa gene knockouts available in the Keio collection were used (Baba T, et al. (2006)Mol Syst Biol 2:2006 0008) (FIG. 12). Four of the fourteen rfa genes were required by U136B (FIG. 2A). It was confirmed that these genes were required for plaque formation using genetic complementation tests (FIG. 2B). These four genes (rfaC, rfaD, rfaE, and rfaP), were all involved in formation of the core region of the LPS polysaccharide component (FIG. 2C). Together, these results show that U136B likely requires the inner core of the lipopolysaccharide. Because knocking out either tolC alone or any of the rfa genes alone provides full protection against U136B, both TolC and LPS appear to be necessary for infection, rather than an “either/or” mechanism.

### Example 4: Phage Host Range is Limited to a Subset of E. coli Strains

[0195] Phage host range depends largely on receptor availability and receptor structure, so host specificity can be constrained within species. U136B's host range was tested on a panel of divergent E. coli strains and more distant Gram-negative bacteria relatives (FIG. 12). Among the strains tested for plaquing ability, U136B's host range was limited to E. coli and had strain specificity, with plaquing ability on E. coli K, E. coli B and UPEC, but not on a commensal isolate (FIG. 5).

### Example 5: Phage U136B Selects for Altered Cell Surface Factor Genes

[0196] E. coli phage resistance mutations were examined to determine potential evolutionary paths bacterial populations may take when evolving in the presence of phage. To do this, modified fluctuation assays were used, which reveal pre-existing phage resistance mutations that have had minimal time to compete with one another. Twenty independent cultures of E. coli BW25113 (K strain, U136B^{S}, Tetracycline^{R}, Colistin^{R}) were plated with phage U136B, yielding a mutant frequency of 4.0×10⁻⁶. One phage-resistant mutant colony was randomly picked from each culture. After streaking for double-isolation, the genomes of each mutant were sequenced. Either tolC mutations or LPS-related mutations were observed in 100% of these mutants (FIG. 6), with LPS-related mutations occurring more frequently (70%, ˜2.8×10⁻⁶) than tolC mutations (30%, ˜1.2×10⁻⁶).

### Example 6: Phage Resistant Mutants have Altered Sensitivity to Antibiotics

[0197] To determine if the phage resistant mutants had altered resistance to antibiotics, in particular decreased antibiotic resistance via antagonistic pleiotropy, their minimum inhibitory concentrations (MICs) for tetracycline and colistin were determined and compared to their wild-type, phage-sensitive parental strains. Tetracycline is an antibiotic that binds to the bacterial ribosome and prevents peptide chain elongation. Resistance to tetracycline can occur by efflux through the TolC-AcrAB efflux pump, and it was predicted that phage resistance mutations in tolC would result in decreased resistance to effluxed antibiotics. Colistin is a polypeptide antibiotic in the polymyxin class and used as a drug of last resort. Previously, a large screen of E. coli knockouts suggested that changes to several of the rfa LPS synthesis genes may result in increased colistin resistance (summarized in FIG. 6); here, it was predicted that phage resistance mutations in rfa genes would result in decreased resistance to colistin.

[0198] Supporting the antagonistic pleiotropy hypothesis, all six tolC mutants had reduced resistance to tetracycline compared to the parental strain and a similar phenotype to the tolC knockout control (FIG. 3A, FIG. 6). Some of the tolC mutants also had reduced colistin resistance (FIG. 3B, FIG. 6, FIG. 13). Meanwhile, the other phage-resistant mutants with LPS-related mutations had decreased resistance to colistin (FIG. 3B, FIG. 6, FIG. S13) compared to the parental strain. Surprisingly, a subset of the LPS mutants had increased resistance to tetracycline (FIG. 3A, FIG. 6) at the same time as their reduced resistance to colistin. This result indicates that the mutant LPS also has a pleiotropic effect on tetracycline resistance (FIG. 3C, Table 17).

### Example 7: Antibiotic Sensitivity Evolves in Populations with Phage Selection

[0199] Fluctuation experiments revealed bacterial mutations in tolC and LPS-synthesis genes, so it was tested if these same types of mutations would be selected in evolving communities of bacteria and phage. Compared to fluctuation experiments where phage-resistant bacteria have not competed with one another, evolution experiments expose the fitness costs of mutations to selection, altering mutation frequencies over time. The phage resistance mutations may vary in their general fitness costs, in their degree of phage resistance, or the potential for phages to counteract the various resistance mechanisms via coevolution. It was expected that the tolC mutations may arise more quickly and outcompete the LPS-synthesis mutants, as growth curve data demonstrated that tolC mutants are generally more fit than LPS-synthesis mutants (FIG. 14).

[0200] To test these ideas, a 10-day serial-passaging evolution experiment was conducted. Twenty populations with E. coli BW25113 were founded: 10 populations with phage U136B (“+phage”) and 10 control populations without phage (“−phage”), each passaged serially for 10 days. Each day, total bacterial density (FIG. 4A) and tetracycline-resistant bacterial density (FIG. 4B) was enumerated in real time by plating population samples upon serial transfer. During serial passaging, phage densities were monitored on a daily basis. Phage persisted in all populations through Day 5, with half of the phage populations going extinct by Day 10 (FIG. 14).

[0201] Again consistent with antagonistic pleiotropy, the populations evolved with phage U136B show a decreased frequency in the tetracycline-resistant phenotype relative to total population size. This effect was present both before phage extinctions occurred on Day 5 (FIG. 4B, t(10.1)=−6.0, p<0.0001, t-test of unequal variance) and at the end of the experiment on Day 10 (FIG. 4B, t(11.4)=−3.0, p<0.01, t-test of unequal variance). The total bacterial population size was unchanged by phage treatment both before phage extinctions (FIG. 1A, t(18.0)=0.82, p=0.789, t-test) on Day 5 and at the end of the experiment (FIG. 1B, t(11.7)=−1.27, p=0.11, t-test of unequal variance) on Day 10.

[0202] To investigate the genetic basis of adaptation and patterns of pleiotropy in the evolved populations, one random bacterial clone from each of the control (−phage) and treatment (+phage) populations was isolated on Day 10. Consistent with the hypothesis that +phage populations would face selection against TolC, after 10 days of evolution, the isolates from the +phage populations showed a predominance of tolC mutations and no LPS-related mutations (FIG. 7). However, the unexpected result that 3/10 of these evolved tolC mutants also retained the ancestral tetracycline (Tet) resistance phenotype was also encountered (FIG. 3D, FIG. 7: Tet^{R}=R), indicating these phage resistance mutations had no pleiotropy effect for tetracycline resistance. Those mutations mapped in or near the surface-exposed loops of TolC (FIG. 15), similar to mutations isolated under simultaneous selection by phage TLS and novobiocin. Few mutations in the −phage control populations were observed, with no mutations in either LPS or tolC. Only isolates evolved in the presence of phage U136B were resistant to the phage (FIG. 7, U136B^{R}), showing that the phage selection was responsible for the evolution of these alleles, and not a pleiotropic effect of selection in this general environment. The isolates from the control populations also had largely unchanged MICs for tetracycline and colistin (FIG. 3G, 3H, 3I). To follow-up on the tetracycline-resistant population members, isolates were obtained from cultures plated on tetracycline-containing agar, revealing that the tolC mutations do not reach fixation in all +phage populations (FIG. 16). Most strikingly, after 10 days of evolution none of the random +phage population isolates had increased tetracycline resistance, as was observed for some of the fluctuation isolates (FIG. 3A vs 3D, FIG. 17).

### Example 8: Discussion

[0203] The interactions between bacteriophages, antibiotic-resistant bacteria, and antibiotic-sensitive bacteria are complex. One reason detailed knowledge about their ecological and evolutionary interactions is lacking is that few phages have been tested for interactions with antibiotic resistance genes. To gain insight into such relationships, a collection of 33 environmental and commercial E. coli phages were screened for their reliance on the antibiotic efflux pump gene tolC. The screen identified phage U136B (FIG. 5), which relies on both the antibiotic resistance gene tolC (FIG. 1) and the core of the LPS (FIG. 2). Fluctuation assays were used to find that phage U136B selects for host mutations in genes encoding its critical host entry factors, tolC and LPS (FIG. 6). These phage-resistant mutations had pleiotropic changes to their sensitivity to tetracycline (mediated by tolC changes), colistin (mediated by LPS-related changes), or both (FIG. 6, FIGS. 3A-3B), including both predicted cases of antagonistic pleiotropy as well as surprising cases of synergistic pleiotropy. Phage resistance mutants and their associated antibiotic sensitivity phenotypes also evolved in communities of E. coli and phage U136B (FIG. 7, FIGS. 3D-3E).

[0204] The role of competition and community in pleiotropic evolution: Comparing the mutations and phenotypes that arise during fluctuation experiments to those from evolution experiments provides an opportunity to compare the accessibility of specific mutations (in this case, tolC and LPS-related mutations) to their actual success during ecological competition and coevolution. Fluctuation experiments revealed that both tetracycline-sensitive (tolC) and colistin-sensitive (LPS-related) mutants arise readily, with LPS-related mutants dominating numerically (FIGS. 3A, 3B, & 6), likely because this complex, multi-locus trait has more mutational targets than the single tolC gene. In contrast, after 10 days of evolution in a community with phage U136B, LPS-related mutants were relatively rare, appearing in none of the random isolates from the 10+phage populations. This effect was mediated by fitness differences between tolC and LPS-related mutations (FIG. 11). Overall, these results revealed that competition can result in different outcomes than might be expected from a survey of accessible mutations.

[0205] The outcomes of competition over evolutionary time will also be influenced by how long phage persist in the treatment environment. While all 10 of the +phage populations started under identical conditions and contained tolC mutants, these populations otherwise widely varied in terms of phage persistence (FIG. 14), the frequency of tetracycline resistance (FIG. 4B), and the specific mutations observed (FIG. 7). Strikingly, the final densities of tetracycline resistance varied by nearly four orders of magnitude across the populations. Together, these results suggest that development of predictable therapeutic phage population dynamics may be complicated, especially since laboratory conditions will be much less variable than those within and among patients, which would further amplify differences in phage persistence. Furthermore, the dynamics of tetracycline resistance in the +phage populations also varied both before and after phage extinctions, suggesting that the among-population differences were driven in part by the dynamics of competition among the host mutations within the populations (FIG. 10).

[0206] Obtaining a better understanding of community evolution and ecological variability is important in predicting dynamics of therapeutic phages in patients, especially since these complex environments contain other community members that can impact evolutionary outcomes. Such interdisciplinary work may include incorporating evolutionary factors and environmental heterogeneity into computational models of phage infection, tracking phage population sizes in infection models and clinical trials, and including both pharmacokinetic/pharmacodynamic (PK/PD) and phage dosing (rather than relying on a single initial inoculum). Together, these approaches may help to better control phage infection and limit persistence to therapeutic windows.

[0207] The effects of specific phage-resistance mutations on pleiotropic traits: The specific tolC mutations observed varied in their effects on the gene as well as on the resulting tetracycline phenotype. Two types of tolC phage-resistance mutations were observed: one type that lost the efflux function of TolC, and another type that retained the efflux function (FIG. 7, FIG. 16). All of the evolved tolC alleles that retained efflux function contained either nonsynonymous substitutions or small in-frame indels. These mutants were observed only after a period of evolution, suggesting that TolC function may be under weak selection even in the absence of antibiotic, for example through TolC's role in dealing with oxidative stress. However even tolC alleles that lost efflux function retained rapid growth rates and high cell densities (FIG. 10), so the importance of non-efflux TolC functions appears to be weak.

[0208] Data presented herein reveal that phage resistant mutants with LPS-synthesis gene mutations have decreased resistance to the antibiotic colistin. These data are consistent with the results of a high-throughput screen that identified some rfa genes involved in colistin resistance (FIG. 9). Colistin's mechanism of action is disruption of the bacterial outer membrane via interactions with LPS. It is possible that phage-selected mutations in rfa genes change the LPS structure in such a way that makes it more susceptible to colistin disruption, resulting in the evolutionary trade-off between phage resistance and colistin resistance. Although LPS-related mutations were generally less abundant than tolC mutations after experimental evolution with phage U136B, the LPS mutants did not necessarily go extinct (FIG. 16), indicating their potential importance in phage treatments of infections.

[0209] LPS-related changes may also have unintended, negative consequences in pathogenic bacterial populations. The mutation screen uncovered phage-resistant mutants that had increased resistance to tetracycline through changes to LPS (FIG. 6), likely due to a combination of decreased permeability of the outer membrane and reduced expression of OmpF, tetracycline's uptake porin. However, not all LPS-related mutants from the initial screen had increased tetracycline resistance relative to the wild type, suggesting the potential to nudge LPS evolution in a direction amenable to reducing antibiotic resistance. The fitness cost of LPS-related mutations is also more severe than that for the tolC mutations (FIG. 10), indicating that a general trade-off between LPS-related phage resistance and bacterial growth may further constrain their evolution.

[0210] The evolution of pleiotropic traits beyond antibiotic resistance: LPS is a crucial determinant of host range and medically relevant phenotypes like antigenicity and virulence. Many phages currently being developed for therapeutic use are reliant on LPS, so understanding the evolutionary implications of phage-LPS interactions is important in predicting if and when LPS phage selection may change bacterial virulence and resistance phenotypes. In particular, these interactions are important to predicting how phages will interact with their hosts, including potential collateral damage to commensal bacteria and the evolution of host-range expansion during treatment. Additionally, if LPS-related phage resistance also results in reduced LPS-associated virulence, then this resistance mechanism might be a useful means for reducing bacterial load while also evolutionarily reducing infection severity.

[0211] Overall, these results highlight the importance of considering community-level effects, such as competition, when measuring pleiotropic effects of phage resistance. Phage U136B and others like it are useful for the direct treatment of pathogenic infections.

### Example 9

[0212] Bacteriophages OMKO1, TIVP-H6, SFA1-1, SF60B, and SF37B were tested to determine if the phage could grow on the target bacterial species and that the phage could not grow on the target species when at least one of multiple putative molecules to which the bacteriophage is intended to bind was knocked out. In each case, the bacteriophage formed plaques on the target bacterium but did not form plaques when the molecule to which it was intended to bind was knocked out (FIGS. 18, 19A-19D, 21, and 22A). Binding of phage TIVP-H6 to P. aeruginosa genes involved in Type IV pilus biogenesis was additionally confirmed by a modified InSeq (insertion sequence) approach, using the methods for InSeq library preparation and InSeq screen described above (FIG. 22B).

[0213] Bacteriophages LPS-5 and LPS-TLTL in Table 1 were not tested for binding to putative LPS receptors. Rather, it was observed that spontaneous mutants of the target Gram-negative bacteria (Pseudomonas aeruginosa) with evolved resistance to each of these phages showed classic “rough” colony phenotypes, associated with loss of the O-polysaccharide, the most external LPS moiety (Hancock et al. (1983) Infect. Immun. 42:170-177). Consistency of these observed rough-colony phenotypes led to the conclusion that phages LPS-5 and LPS-TLTL putatively bind to LPS of P. aeruginosa.

[0214] The binding target of phage PG-I1 in Table 1 is putatively determined to be peptidoglycan, because of the genetic relatedness of the phage sequence to other phages in the Kayvirus genus that infect S. aureus by using wall techoic acid or other portions of peptidoglycan as the binding receptor.

[0215] The binding receptor(s) for bacteriophages SFNHSI and TIVP-27 in Table 1 have not been putatitvely determined at this time using laboratory experiments.

[0216] Evolution of resistance in Shigella bacteria to phages SFA1-1, SF37B and SF60B can occur through mutations that alter or delete OmpA and/or OmpC. Shigella bacteria are facultative intracellular pathogens of humans, which replicate in epithelial cells of the colon to cause dysentery disease. Mutational changes in ompA and ompC genes of these bacteria are known to be associated with reduced virulence or loss of virulence in Shigella species, because these proteins abolish intercellular spread of the bacteria. Therefore, selection exerted by phages SFA1-1, SF37B and SF60B can cause Shigella bacteria to evolve a trade-off: evolution of phage resistance causes reduced virulence or avirulence in target bacteria.

[0217] Deletion of type-IV pili is shown to attenuate virulence in P. aeruginosa, by impairing pyocyanin production, twitching motility, and biofilm formation (Persat et al. (2015) Proc. Natl. Acad. Sci. 112:7563-7568). Phage TIVP-H6 selects for phage resistance in P. aeruginosa via bacterial alteration or loss of type-IV pili. Data showed that phage TIVP-H6 caused statistically significantly (P<0.001) reduced pyocyanin production in 48-hour cultures of PA14, similar to controls using sub-inhibitory concentration of erythromycin (Kanoh and Rubin (2010) Clinical Microbiology Reviews 23:590-615) (FIG. 23). Also, the phage did not interfere with effects of erythromycin, and the beneficial phage effects persisted in presence of ciprofloxacin, one of the antibiotics that either increased or did not affect pyocyanin production (FIG. 23).

[0218] Deletion of O antigen can reduce ability for CF-associated P. aeruginosa strains to produce extracellular elastase (Leone et al. (2008) European Journal of Clinical Microbiology and Infectious Disease 27:1093-1099), and can cause re-sensitivity to hydrophobic antibiotics and impair iron uptake by bacteria (Delcour (2009) Biochimica and Biophysica Acta 1794:808-816). This strongly suggests a mechanism for phage LPS-5 to select for phage resistance in P. aeruginosa via LPS mutations that decrease elastase production and drive antibiotic re-sensitivity. These data used classic Congo-elastase assays (Sachar et al. 1955) Proceedings of the Society for Experimental Biology and Medicine 90:323-326) to confirm that elastase was below the limit of detection in 48-hour-old cultures of phage resistant mutants of PA01 (FIG. 24).

### OTHER EMBODIMENTS

[0219] The recitation of a listing of elements in any definition of a variable herein includes definitions of that variable as any single element or combination (or subcombination) of listed elements. The recitation of an embodiment herein includes that embodiment as any single embodiment or in combination with any other embodiments or portions thereof.

[0220] The disclosures of each and every patent, patent application, and publication cited herein are hereby incorporated herein by reference in their entirety. While this invention has been disclosed with reference to specific embodiments, it is apparent that other embodiments and variations of this invention may be devised by others skilled in the art without departing from the true spirit and scope of the invention. The appended claims are intended to be construed to include all such embodiments and equivalent variations.

The application's sequence listing, which the Patent Office published only in electronic form, follows.

SEQUENCE LISTING (13 sequences)

SEQ ID NO: 1 - DNA, 91922 bp, Bacteriophage
cggtcggtgctccatggtactcggtcggtgctccaactggtaacgccagagagccgagcgatgaagagtatcggatgatcctgaaagcaaagatcatcaagaacagaacaaactcaaccccagagcaagttatcgaagcttataaatttgtattcggggttcctgaagtattcctagaggagtacgctcccgctgctgtccgtatcggcatcggtaagattctaacgaacgtagagcgtagtcttctattcgacctaggtggtgcaggtgcattgcttcctaagactatcggggttaactacacatacactgagttccaagctggccgggtatttgctacagaaggcttccccggaggacaaggcgttggagacctaaacgatcccactgttggtggaattctgaccaacctagtgacataaggagttataaatggctgatatcggtcaactacctattgaaaatatttggtccacaggcggggatatggtagccccgacccctgcgcagcagcaaggcggatggggtattcagtcggttcctcgccaatggtggaactggaagtggaaccttcacgatactaacctagcgtatttgctacagaagggcatcccagagtggactagcactcaagagtatattgcaaacaaatcgttctgcacaagaaacggtttcgtctacaaggctgtccgtacccatacaggtagcgacccggccaccgttagttctaactgggtccgagctttcgcagactttaccacagctagctctgcacttggaagcctgactccgagagaaggagggattcctttcttcattagcgcatctggtgcaggtgtgtttgactctacggcttatggacgtggcatgctgaacgtagccaacgcagcgggagctagagactacatttcggctcaagagagttctgttgtcctgtctaacctgtctactgtgactagggctgccaacgcggttccgtacttcaacaccgacacctcgatggctaccttcaacattacagcgttcggaagaggcctagtcaacgcgggtgatgcaactaacgcaagaaccttcctaggcctagctaactctgctactatcacggctgatccagccaacagagcacacactctggtctatagagacgctgctggtaacttcaacgctggtgtgattacagccactctttctggtaacgcgactacagccagcaagctcagggctccagttacgattaacggcgtagcgttcgacggaagccagaacattgttctgccgggcctagatacaagctacgccggggttgtagcgaggctccatattaatggagctaacatgaccggaacagataagactacccagttggctcttagaaataaatctgatacagattggattagcttggtggctcctgatgacagctcgttggtatttcaatttagagggccagaagcggctaacgccactctgcgggttaactctaatgttgtgttccacgcgggaaaccagtatggactaggagctactcaaacgcaagccagagagcggctcttggttgacagactggcacagaacacgtctcaaactgtcctgtacaacgcagataagagcaggtacttctggttgcaagataacggtgtttccggtatctgggacgcaacgactaacacccctctatggcgtttttctagactaggccagctcgactacggaacagtccctgttgcacaaattacaggattggccaactccgcgacaattccggcatccgcctccaatctgactaatcagattgttgtgaggagcggaacaggagatatcgcagtacaaggcgttacagcgtttggcgctgttctgggaacagactatattagagtaagagccagcactggtaacgctcacctagtattccagaggaatgatggagcagaggtagggcttatttggggaatcccgtctgccaactctctgaacttcaggaccgcaggcggtgcgacaggcatgtctctggctggtcaggacttgactgtagttggcagggtgaatgctgcgacactcaattcgtctggcaacgtcaactctggcaacagcgtgattgctgccgggaacgtgcaggctgctggccgtgtgtactgcggcgatgcttttatgagcagcaacggcaaccttactggcggagctttcggctcttatgggactcttaccaactgggtagactctgtatacgccagaaaaactgacgtaatgactgatgcccaaatcttggctgccacttctagaggtagtgctcaggctgtgggaacatatgtctttgcgattgcagctagcggaagtggggatgttgggactgtagtagctggtacgtctctaaggtcttcgtctcccgtcaactaccacggaactacgctatccggtagctacaggtgcatgggtaggttcggagccagaggttctaaccagattaccttgttccagaaggttgcagattaacaaaataggcccgtaagggcctttataactggaggtgattttaatggaattcagaaacgttgtaaaaattaaagcggggttcgagtgcgaaataaaccatccagaattgggatggattccttacggcgctgtagagggatgccctacgtctcactccatgtacgtgaagatcgccgcagcgattgaagatggctctatggaagtggtagaaaaagaggacaaatatgatgactttgaagccagattgtggagagacaacgagctaacccgggctgaccgtcaagtagagattgctatcgacgatgaagacgaagtaagagagaaggcttggcgtaagtatcgttctgcactacgtaaatggccagagcacaagaacttcccatccgaaaagagcaaacctaaagctcctaaagaataaggcgaggtaatatatgccaaacattatgaagcctacgggtattaacgctatctggtctgaaaacggccagaaggttgacccgggtgctgtaaaagttgggcttggatgggtgacagaactacctccctaccaaactgccaacttcattgaatacaagcaagacttgttcaacgcgcacgttaaccagcacggtattcccgaatgggatagcgtcacagagtatcagggtaacctgagctacactcaaggcgctaacgggatcatctataagtgccttagaacccattccgacaagattccaactgaccctctgaacattacagccggatattggcgagtggcgtttgaggatgcgggagaggcagctaaggttcaagccaaccttgatcggcatgtaacaaactacaacaccctctctgggattggcaacgtagttattgcaagacaaaacctaagtgtgtatagtaaagctgaaggcgacgcccggtacgctatgaagcacgggaacggctctaatgttttcagcgtcgccactgccacacagccaactcacgcgatcccgctgagccagctatcgactctcgttcctcctgctaccgagactgtagccggggttatggcagttgctacgactatcgagacagaagctggagccaatgataccaaggctgtgagtccgctcaaggccgcacaggtgtatctgaagaagaaagacaacctttccggtctgtctaacgtcactgccgcaagagctaatctaggactgtcggatacagcgactatgccttcttctacattcctgaaggcaggtagcaatctggcagatgtgcctaacaaggcgctggcaagatcgaatcttggaattacaagtagtgctacccagccggaaacctatttcttgaggagcgctcagaacctagcagatgtacctaacaaggcacaagctagagtcaacctaggcctcactgggatggctacaacagaccctgcggcggttatgatgaaggcagacaaccttgctggattggctaacactgctaccgctcggtccaacctagggctaggcacagcttctactagaaatacaggagacttcctgtcgtctggggctaacctgtccgacctcacgaacgtccaagcagctagaaacaacctagggttgaagggagcggctacgctcgatgtatggggtcttcctgcgaatacaactgctatggacttccagtccagtcagtcggatatttccagaggatgggctcgactaccaaacggccttctgctacaatggggaactggtcccggtctgtctgatgacacaaggacgaatatccaactccctgttccagcacgaatcttgaacgttcaagtgaccgtaatggggacgtttaacaactccatcggcccgggcgctttcatgacggatatgtggagcaacaccgggtttagagttagctgcaactggggcaactggtcttacccgttcaactggtttgctatcacttccaccctgtaattcaggagtatcaaaaatggctctaactgagcaagacttccaatcggctgccgatgatctcggagtcgatgttgccagtgtaaaggccgtcactaaagtagagagtcgtgggagcggctttctactttctggcgtccctaagattctattcgaaaggcactggatgttcaagcttctcaaaaggaagctaggtcatgaccctgaaataaacgacgtttgcaaccctaaagctggaggatacctcggcggacaagcggagcacgaacgtctagataaagcagtcaaaatggatagagactgcgcacttcaaagtgcctcttggggcctattccagattatgggattccattgggaggcactaggttatgcgagtgttcaggcatttgtcaatgcccagtacgccagcgaaggatcgcaactaaacacttttgtacgcttcatcaagatcaatcctgcaatccacaaagctctgaaatccaagaactgggcggaatttgcccggaggtataacgggcctgattacaagaaaaataattacgatgttaagctagcagaagcctacaaatccttcaagtaaatctaggaaggttcctaatgaagaagctattgaaaagctggaagttctgggctgctgtaggctctgcaacttttatggctctggaggccatggttcatctttgggagcctatccttcctcccggcgtattcgccgcagtggccacactggtagctgtcggtgtaagaatttcggcagtgtttgtaactgctggtaaagtggaggaagcgatttcggaaaccatagaagatggctcaatagaaaatgatactaactaaactcaaaaactacgccctcgtagtagctgccgcaatggcagcagggtttggatatctgtcgttctctttgtacggcgacttagctgttgcgaagaatgatatccaatctcttcaagctgcgtctcgacagatggaagagcagttccagaaagagcgagcagggtgtgagatcaccactgggagactagaggcacatatagcccaaatgaagagccgacaggagcttctacaaggccacctgtgtgagcttgagtctctacccaacccaaccccaagggagacccaagaaaatgccacagagacgatctctgagccttctactggggatagtctggaccctgctcttacaagcttgctcgacagagctttctgttccgcagtaccaaacgatccttattgtgcccccggcaagcctgaccgaggaggttaaggtataccgagtggagcaagatacagttaaggggctcgctagagcttacattctaaatactaacagtgctgccatgtgcaatagtcaactacaaacaataaagctatgggcagaagagcagagggctctatatggaaagtaaagacggcaaagaaggcctaatcaaggtagctacacagggagttatctctctgctaattgctatcctaatggcttggtctggattcctaagttccagtctttctaagcaggaagaacgtatctttgcgatgcaaagagatatggtatccgaggcaaaacttaacgcactagagtcgagattcaatagccgacttgaaagtgaaattagtaacgtaagaagagaacaacaagaaaccaaccggtatttgattttgattatgaatgccgtcaagggtcgggatacagaaactcaataactataacccgttgacccacactgggagacaatataatgacaaggaaacaagactggccgctagtttcagcagtcggggctttgtttatctccctccttgtctgtatggctattctggctttcacagcgatgactcccgaggctcggtttgactctgtacgccagacctacgagattcgaattagcgaatctgagcggcggtatgaactcaaactgaacagactacaggatcagataaactcggcctcgtacacacaggatcggcaatcccgtttgcaatatgaagaactcgactcgcttaaaaggaagattagcgaacttgagcggagaataaaagaaaaacaagagtaattaagccccggaagcgaaagcttaccggggctatttgttactgctaggttacttcccacacttcgtcaaacagcttgtcaattttcgagataatcttgtttacctttttcttacgacgctcattatcttctggatcggaatggataagctcgatgtcggcagcgttaccccagtccagctccccgtaatggaacagcaccttgacgttcaggcaggtcgctgatctgtcaacgcctgcgacaaccccggtggagcgcgagttgtgttgctcgaatgtacttcccgatggccggttgtacaagtcgcttacctctacaacttgccccttcttaacgtcttccagtttcattctatgcctcctcaatctagtttcattagcgtattgaactggtgcctcaaagacttgaaagcctgtgggccatcgtcctccgctccttcatggatatgatgagcgatcaagtgtatcagtcctcggtctcctagtaacacagagctaggaatctcttttatccaagccacaaagcaacagaagtgcagcacctccggcatggaagccttgaagctggaatcatccagcttcgataggcgttcatacgtggctttgaggtcgggatagcttaactgatatgtggcatcatcgtcaatatgctgatcccctctaactacatactgcaagctcatactacacctctatatcgttgcaccattacaccttcttgccgccttctgcaagacgtgcctctcgcttgtggtcggaacgggtcatgttgtactcgatcttctcgatgatagcccctgcaacatccaaaccccgtacattcgcatagtccatgatgcgaatgatagcgtcggccagttccacctcttccatcttccgctctggcaagtgatcgtccatcaaatccttacggacgccttcagcagcttccgcaatttcagtggtaacgagcatcagcatatgcagagcatcacgtttaatcggctcgcctgtgaccagatcggtgttccacttgcggttaacaacctcaagaccagtcatcattttgttaaaaccgctaacaaactcgaagacggactctcgttcgaatagttcaccgaacgttggctcttgatgttcggcaattgcagtgtggaaaggccactccatccaagcgtcatagcactttttgataagctcttgttcatcaatgtacgagaagacgccctgctcctcaagctgactaatagcttcagccccctcgacccagacgcacgtaccaataagccttggatcgattctcagagaagtcttgtagacttctttccacgacctccatcctaccctaccattgccaaaatacacaaggagtggcacatagccttctcgcttttcctgctccggcgtttctataactacaacaaacgccggaactttctccccatctggacgttcagttagtacgaagtctcccaagttgatattctcccgactagctgggcgaagagattcctcgatatggtctttaactttactcattaacttcttcctcctcacagaacatttcaaaatagcaatcacagcataccaacatgccgccgtcatttacaatttcttcgaccgggagaatgcttccacagcattcacacccagcccgttcgacagcatctgcacaggcccaatagtccatcttcaccctccttcactcctccttcagaaggtactcgttgctaataaccttgaaactaaagtctcggctcatgcttttgaacaccaaaccttcccggtacttaccgttcaacgcagactctccgctagccatttcaattacatcttgcatgtcttttggaacgcctacgtcccacatgtacaccggcacatgtttaacatcctcttcgccgtcatcagctagcgcgttcaggattcccagagtggccagtcgctcttctggaagatagtaacgactctccgaaatgttgtagatatcgtacacatagtattccggtttgtcaactccctcgaagttgccttgaatattcggtgcaaccagttcaccctgaagggcgatatttagaccaaactcccggagacgttcaccaagattaagctcttctgccatcgcagtgaagtgattggagtctttcttaatcacacgcttccagccacgacccttaaagaagttcttgacagccgtgaagaacccgatcttctcgtcttctagacggaaaccgacatttcgagacgccacgcctacttctccgtccttgtgccagatagtgagagacgaaccgtccaatttgaatgtcacttcaaacttctcgtccttctgatgagcctgatcgtaagccatctgaatattctgtacgcgagcctgatccgtcttcgggatgaagttggggaaccctagcttggaagtgccagtccggctgcccttgttgcctccgttgatagctacctgctcggaaggctttacatacttcaggatgcccattcgatcggtaacatcttcgtctactttcggctctggactgcccgctgcatgaacaggtacgatcagtccttggctaagctctttgcgaagcttcatggtcttgattcgagaatactcttttccaccttgttcgaccatattacggccacgcaggaattcaaagatagggttgtctacagggaccatggagtccacttcaatgtagattgccagatcgccagccttatactccccgcgtttgattacgcactgccaacctccaacaagcgccagatcaaggctgtcagcgttaggatgggtcttcacatcgtcgatacgcaccactcgggctagtacgcggtcttgggaattgctcatatttcctcctttattttaaatttactagattaattgtcaaaccaaccgagattaagggcgtgctccaaggctgcgagaagattctcagcgtccatgcggtcgctaattgacacgcggcgccatgtgatgccctctttgtttctagctacaatataggccgaggaactatctcttccctttattaacgagcttgcaaactcagtctttcccccgaacactatctcgctaactttttgggacggctctcgaatatcaatcttcatcgtgctctccttgttaaaaattgttagatttgatagattacttgttaaaccaaccgaggtcaatagctcgttctaaggctcgtagcagattctcagcatctagaagatcacggatcggcatccaactcccactattccccggtaagccatctgcgatgtacacaggtacgtcagtatactcgctctttttaagcccgcaggcacaggctacattgtctccgaagacaatctcgctgacttcccttgcctcgtctcgaatatcaatcttcattatgtttttctcctgttgtgttgaaagtcgttgtattctgcatggattcatctgctgtgtcaatagccttgacaagaaaataatccgtggtaaagtgtgaggcctgctggagagaaatgtccacgtcactcaccggccagcagtatagcgtatgaagaggaaagctgcaagcgcatcctgagtcgaatctgagaacagggcagcgacgacccgaaaggggaaagctcagagcctataaggagcccatgctccccgctcaccgactcatctgcatatgcgtatatctgcatgagagcgagaggcagaccagaggcatgtcttaggcggagaatccgtatggcaagccttgggacaggtctgcctccactaccgatctatctgcatacaagagcttgacagtatcctgtaaaccgtgtagagtaatctcaaatcaaccgcagaggagtgtataaatgaagcatgttattcaccgtgaagaccttatcgacctactacgtgatcgtatgaagcttgaagctctagaagctggcggggtggacaactgggactggtatgaggcctcgctaatcgactgcggatacttcgatgacgatggccgggagctagaggtcgaagctcttgcagattgcttcccaaccgtaggtgcgtgaccgtggaggagtcgaaagctaccttcaaagacccttaccctaggttcttcgacgcttctcgtaggtatggcgaaaccaacgactgcatggtggtgagctttgcagtcgtatggaacaccacctatgaaaaggcacaccagcacctgaaagtgaagtgcaagcgcggttaccggcaaggggctactcagaagcgcttcagctacgcagacacttggtgccctaagacccggatgctctaccgggaggatgctaaggataagactcttaggcagtttgctgaggaaaaccctgaaggtcggttctggatcgcggtaaaggggcatgctgttgcaatcgtcgacggagtgttgtacgatcacactaatgacaagagacgtaccatctggcactgctggcaagtgtggccgggggaggcacctgagaaaatcgagaggaagcctgatccaatctcacctcctgtgagaaaggccccggactggtatgtctaaacacaaacatctgaagtacaaagaggaggatttatggaaattatttcgagagggacgcttcctcaagaggctttgtttactgctaagtgtcaccattgcctaagcattctccgagctaagagatcggaacttgagtatgtttcgttctcattctgtcgccccggggagactgggtattatttcgcagagtgccctgtctgtcacgaagaggtgtctgcttgggttgcggctcctgtcattcctgtggcaccggccaccacggagtatatcacaaaggagcgtaaataatatggaccagttagcaggattcatgggcgaacctttcgtaattgcgttcgactacgacgagacgatcagtctctaccctcttgccttccgaatcgtcatggataccttcaggggctttggaggcgctttcaatgtgatcgtagtcactgcacgccaccctgacaacagcggagagttagagtggctacgggactacgggttcccgatctatttcacggcacagaaggcaaagcgaccattcatggaaaatcttggaataaaagtctctgtatgggttgacgacaacccgttcagcgtggataatgaccttcctccgtggacagtggagcaatacgatgcctacatggaggcaaagaagcaacgagctatcaacagagggagtaaagcatgagcgagattatgaaggttgaagtgggagatcgggtggtccttaaggcctattgcgatacatacactggatgtgcaaagcgatgggcgcaggcgcatggacgtttggatgaactgctggctacgggattcgtagaagatagctgggtccacaccgacgaactggccggaggcttgaaaggcaccgttgtgatgactgaactgggactgaaggaagagtgctgtgcagtacgtctagacgcctacactgaccacagggctgttgtagttgttgacgcttctgatctttacatcgcatgtaaggcagcaaaagctcccgtaagcaccctagacgaggccttcggttgtgaccacgactaccttatggaatctccggctaacgctcagcgactgaatgagtccgtcgagcagctacgaactggccaagtcgtagaagtggacgtgcctgtgagtgtaaatcaagacgaaacctcgcctatcgtagtgtatgtagtagagaagatttacgataggaaaggtaacgtacacctcattctacagtatgaggtagcaggggcgctaatcaggacggtggtggaacagggagaactcatttacttcttggatgaaatgcaaggtatgtacttgaccaagattcaactggaggtgaacaatggagttgtatgaccagtggcgtaagtatatgagcgttgtaatcttagaagaagaagataatgagcgtcagtgcatgcggcttattgaggcagttggcgaactcgatccctatatccaagatttcctagattctttctctattaaaactgaaggaggtgtgtaagcatgagtcagagtaagcgtgatgagattgtagttgaagcacgtgggctagagagctacttcatttcccactggaacggctgggatgtgatggacactgcttgtctcggattttatatcaaacctgagtatgttcttgacccggatattcgagagcttgagcctagcttcttggagcttgatttcgagcgttgccgtttccgattctggggaaatgaagacgaaggcgtggacggcaaactcatggagggcaagttgcagattatgaccaactccttcgagtacgtcttcttcaaggaggtttgagtggctagacagacttacgagtctgcatcagatagggcggtcgaggaggccgtccgttctgagcttgaagggcggtggaagtgttctcttcataagctacctagagcccactatatggattgggcagcctgccggaatggaaaggttgttagctttgtggagcttaaggctcggaataatgaaatgcagaaatatcccgacttctttgtgtcccagatgaagtggctccatgggatcgaaatgcaaagggtgtttgacattcccgcattccttgtggtaaagtggacggactatacaggatatgtcaaaatgacagccaatggcgtcaactacatgagcatgggtggtaggattgaccgtggagactggcaagaccaagaagttatggtccatatcccgctgaaagacttcacacgtttataggaggacaaatgaaacgactctgctaccggtgtatgcacttcggggagcccaccatgcaccgccataagacgggcatttggtataagggttgtagtaaatgtggatcaggagtattctatggctaagaagaaccctgtgtttaagtttctgaacacagtcaacaaaccctcggtagagagggataaaaccaaatacaggcggaagcctaagcataaacagaaggagcgattaaatgaagaagggtgacaaagtgaagatcaatgatgacgctgataccatcttccggggccgtgttgccactatcatcgcagtagacgaagagggttgcgttattgatgtgggcagctacgaagacgaaagcggagagcttatcgagtaccttcacctgttcttcgagcgttctgagttgtccaagcaggtgtaggagggtataatgaacggacccgagtgcagatggtgcggagagaaaactgaagctgagttcgtagacgttgggcttggatggacgcagcaagtcactggaggcatgtgtcaccagtgtggagggtacgagaacggttactaccagaacgacggaaggctcacagaggtcgagtttgccacctactggagtggtccgttcgaagattatgcggatttctcgccattcaatcatatgagagaaggcgactcgccatgaaggctacactgagaaaccacaatctgctatacatctacttccacacgttctcggaaatgaatgagtggttgacagagaacgctgtagatcaatggacagtcacgactctgggctccggctatcaggtggctgttcctatggaccgtgcaatgcgggaccaatacgtctcggagaggggttgacacgaacacaaggtgatgctaaactccgtggttgtctgaagtaaggaggttttatgtccaaaatgaccgtggcccaaattgcggctatgcacggtatcgatttgtattctgaccacaagaccgcttgtccccaatgccggaagaaaggcgctgacaacagcggagacaacctaaaggtctatggtactgatcgtaataccggggaacacaaaggtgcctattgttgggcgtgtgggtacaccttgctctctgaagagcaggaaagagacgcccggggagaagacgaagaggagtggaatttcgtgggaactgaatttaacgcagagatcaacgctcaaattaaagagcaatgctcgtatgatccgcgtggttatcgtggcttgtctaaagagacttgccagtatttcggagtgctacatggtttcgacccggagactggcgagattgcaactcagctatatcctactactactaattacgaactcaccggttacaaacagcggatcatgccgaagaacttctcagagcctatcggcgagaccgggaaggattgcgagctttttggtcagttcaggttcaagaatagcaacagcaagaaggtgcttattgtaggcggtgaggttgaccagctatcagcattccagatgctcaaggagtacgatgaccggcgagcaggcggtaagagtgattatgaaccgactccagtggtcagccctactatcggtgagagtggggcatggaagcagctacaggctcagtatgagtggctagaccggttcgagcaaatcattctctgtttcgacagcgatgacgcaggacgagaggcagcagacaaggcagccgataagcttccgaagggcaaggtgttcatgatggaaatgaaccgtaaagaccctaacgagtatttgaaagctgggcgtcaatcggagtttgtcagtgcattctatcgagcccgtacatggacccctagcggtattgtagggtctgatgcactcgacgctcgaatgtatgaagctgtgcaggttgagaagattcctctgccaccgttcgctaagaagctccagaaggctatggcaggaggcatcccgttgggccggattgtgaatatcggcgctgcatcgggcatgggtaaatctactgtagtggatgagttcactctgttttggatttataactcgcctcatatgccgggtactgtgactctggaatcggactgcggggagtacgcaatcaagctgctgagccgtaaggtaggtgagaaggcagacttgtacgagaccgttgaagagaaagtggcgttccttgatcggcaccgtgacgctcggtacgacttgtggcacaaggaagacggaagcccacgcttctatctgatcgatgaccgagacggaagcctagcagccctcaaggctcaaatcgaacaactgattattcagtttgagtgccgtgttattattctggacccgcttcaggatattctggacggattgagcaatgaagagcaatcggtgttcatgcgctggcagaagggtatgaccaagagccaccgtgtgacgttcatcaacatcaaccacgttcgtaagagtggtggcggtcagaaggctaactcggcaggtgcggaactgtacgaagaagatttccaagggtcttcgtccatcttcaaatctggtgcagctaacattctgatgtggcggaacaaggacgcggagaacgagttcgaaaagaacctgattaacgtgaagctctctaagtgccgatggactggccgcactggaatgatgggcaattggtactacgacgttgagactcatacaatctgggacttggacgactatctggaccgataccctgacaagcgccgtgaatacgaggcttggatggctcagaaggaagaggaaggccgggacacggaatactaaggttgacagaggggtgatgcttatgtatcatccctttcgtcgtttacaggaggaaaggaaatgcaacaacgatttgaaacaatcgagcaatacctcgaatggatgggaaataacaatttcaccaacatgacttgggatatcgaggccacaggcctgttggatgaaacgtctatcgattacactgccagcccctacaagattaagcctagctacaaacaccactgcattgtagtggaggagcacggtggcaatattctggcattctacgatgggccgacctacgtctttgacgggcgagagtacactgagagactgccgaaagcgtcttccatgctccacactgaagaagttgtgactctcaaggactacactccggtagagtatattcacctgccgctgaaagagttcaagaactatgtgctcaagcgcaagatcaagcgcgtagtggctcacaacatgattaacttcgaccttatgtcgatgaagcttgtggaagatatggacttcactatcggcgtagagcacagggatggcggtctgactacgtggtctgctgacacttggatgggcaagcaagtggtattcgacgataccctcgttatctccaagacttgtaaccctgacctgttcggcggtcacagtctggataagctgtctcgtcgtgcaggtggtgacaccaagattgacttccgtaagcatttggcaccggatgttcgattcctcgacttcgcagccgatatgctctactactgtatctatgacgtaaaggcgaacaccgctgtatggcattggttgcaggaccacgaagattaccaactgtccgaccgtgacaactacatcaagaattggctgtccccgattcagttggagaagaaggttgcagagatcatcacctatcaggagcaccgagggtttgttctgaatgttgatctctgtgaaaaagctgtgaaagacttggacgccaagatggaagagcgtcgggcccgggtagagcctgtgcttcctcctcgaccagctaccaagaaattcatggcagactacactccacctgttcgacagttcaagaagaacggggagatcaccacttacctacagaagttcattgaaaagatcggcgctcaattgaaagagggcgatgatcggactatgatctttgagggtaaggagtacaagctgcctctcccggcagacgtacctctgaaaacggagatgcctgctaagattggagatacaacccacatcaagcagtggcttatgggcgagttcggttggattccctctgagtggaaagagacggacctcactgtcgaccagaagaagatcaagctgccgatggaaaacatcgttgctaagatcgatcgctggctggatgtaacgtatagcacagcgtacaaggaagagcggctggacgggttcggggattacatgaagatcacccctcgtagcacccgcgcgtatgtacgtcagaggttgattgatcgtgcaagcaaggggagctgtaaggttctcactaaccctagcttcacaaagggccaagagaaagaaatgtgtccagacctcgaacgcattgcagaacagtttccgttcgcgaaggatgtgattgagtacctgacctttaagcaccggcgaagcgcaatcctcggtggcggcatggactgggacgaaatggaggatggagaggagccggaaaaaggttaccttgcaagcattcgtcaggacggcaggattcccacgcctgctgacacttgcggggctgctactagccggatgaagcaccggaaggttgctaacgttcctcggatcacctcgttgtacggggctgagcttcgagagttgtttggggttggagatgggttcttccaaattggatacgacttcgattccttggaagcacgtaaagagtcggcctactgcgatcagtacgatccgacaaaggaatattgcaaatctcttatgatggagaagccatttgacgttcacacaatgatggctaagcgtatttctgagatcattggtcgccaatttaaccgatctcctgcgaaaaacgtaaaatatgggtaagagatcaagcccatgtaaaactgtgtgaattcaggggaagactagaacagtcaatcctgagccaagctagagtgatctagaaaggtgcaacgactatcgaaaccacggcgggagccggaagggagtagagtagggtcaagtgacccgaagcgcacagggcgcgagagcgtcatgatatagtctggtctgcatgggaacatgcagcggtaacccttgagcaaggttacgggggaggattaacgaccctccctgaacacaacggtacatacggcgctcaagctggtaaagtggcgaaaaccattggtgccgacttgcaaactggtcaactggtgtttgatgctttctgggatgctgcattcccattgaaagctctgaaggacgatctgaccaaacagtgggaagccaacggtaagaagtatattgttggagtggacggtcgccgggttcctacccgttcggctcacgctatcctgaacagcttgttccagagtggcggtgttatctgtgctaaacgtgctatggtgattcatgaccaactgctggagaaagaaggtctgaaggttgactttttcaaagaagactggaagaacaagccggaattctgccaacaaatgatcgcgtaccacgacgaagcgcagttggaagtaaccgccaagtcggtgagcttcaagatgttcccttggtctcttgtaggcggtaagccagaaggagaaaaggaacaggaggaggcggagaagaagctgaaagctctagctcaggcttacaaggacgaacaattggctagcactggcaaggtgtggagtgatatcgcacactacagcaaaggtgaaggcggggtgtttgtagcttactgccgcgctggagaacttgccacgaaggccgtgagagctgcgggagagttctactctactcctctggtgcctatcgagctgaccgctggctacatcgttggtcgatcttggaaggattgccactaaaactagcattaagcgaggaaaggggcttgacaggcccctccgcctcctatacaatggccacatattcacaacatacaaggagaaacacaatgactctggctttcattatctatctggtaatgaccgtattcccagccttgtcgtcggctggtagctttgccctgttcgtcaccatcatcgcatgggttgcaggagggttcgtttacttggcatccattggtggccgagagaatgcggcagttaaagccacactcaaaaatcacctacagcccttgacatttaagctgttcctccctatcattgtagtcggccatctggtcccttcgtctgagaccgcatggtggatggttggcgggtacgctgcacagagcctctatcaagcagacgctactcagcaggttctcagcgaatctactgaactgctcgaagctctggttaagcgggctaagaaagaaactctgaaggctgttgaaggcagcagcgagtgatacggtaatcacagaataggaggtatggtatgaacacggctcgactctacgtctacggcaaatcgtccatggtaggaatcactgttgacaacaaggccaatcgggagtactatacctctaaaggcttcgaggtatcggagacaccgttagcccacaaaagcgtggctaacaaatacaaacagaaaggaggtaaataatatgtctggtgttattcccgggactatcgtcaaactcactcaagtgggatgtgacgtcaccgttggctggccaaaggaagcccgatatgtaggcgcatacgcagtcgcagtagatggacgcgatatcggtctcccggaaggggaaatccggttctgctccctccattggtctattgaccgagacgtcaataatggacttggagattaccagtcgatgctcgctgacaacgaccgcttcgaaattgtagcggtcccgggcaagaagtattatgttaaggctgttgccgcacgccctgacttgatttcccactacttggttacttcggaaccagccttgtacgaaggcttcgagtcgtgctggttgaagagcatgcacgaaggggagagcccgttctgcatgacttttaaaggacgcgttgacattggcggtgaaacctctgacgagttgcagttccagaccctctatcccgagtttgtgctggaggagttcaaagaagaggacgaggcagaggttaaggttgaagctccggttgacgaagagaagaaagaaaaggttgcaaagcctgctgtaatgggttatgctgttctcgatgcagacgggagtcctcttaaattctgcctcactcgcgaagaagcgcgagccaccaagcgctggtggggtggcaaggctgagggagtctcgattgtaaaagtaatcaaaggagaggaggtgcgttaacgcgcttctcctcttgaagaatccgggaatgtccggtataatcgtcagtcaagtggctgacacactcgcccagtctagggtacttaaataggagaaataaaatggcttttaaactgaacgtaactaccaacactcaatccggcaacggcggcattcgcaaggaagtcgattgggatgctctgaacaaccatgtcgttgaagctgccggcactgccgctaaggcgcgttcgatcccgggttatatctccggtatcatcgatctcggcgagcaagagcagaacgatgcagaggttgtgttcactggcactgccgaagatgaaatccaaatcatcaaggaatatccgaacacttacttcaaggatggactggacaagcagactcgcaagcctgtacgtctgaagtgctggccgcagcgcgatatgcaacaaatcgcgatcactgtggacttccctcagatcgaggtagacaagagcctgtacctgaccggtaacagcaacaagtctccgcttcgtgtcctgtacaacggcgactttactctgccgggtcagaagactaagattgttggccgtccgtttaccatcaaggaagtgaagcacccgaacggcaaatgggcgttcgctaagaactccatgctgcacaaactggctgtagctactggcgtcatcaacgaagacgaactcttcaccaaggaccgcgtaggcgagcttctgggtaaagtggctcagttccaagttcgagtgtggatgaagccgggcaaaaacgacatgaaattcctcaccgaggatatcagtctggtcggtatggtgcctgaaggtgttccggtccctgaactggatgagaagtacatctacggcgtgaacctgtatggtgagaacgacgaagaggcagttaagcaactgcgtgccaacgtcatcaacaccatcaagcgagccaagaactacgaaggttctgatatcaaggcgatgatcgaagctgttgaagctgcacgcggtggtaaccgctccagtggcgacagcgaagagcaagctgaagataagccgcagacccaagctgcacctaaagtggagccggttcaaaccaacgtagatgatgacattccgttctaaaagacggtggtaagacaaggggcttcggccccttcttttcaaaaattcaaaggaggcaacacatgcaaatcaattttggtcccatcttccttctggctgctatcgttctgtgtgtactgaaatctgccggagttctcgctatctcttggactgtggcactcatgcccatctggattcctcttgtaattgtattgtcgattctcgtactgtttcttgtaattgtaggtctgatttacgcattcggtgatcgtagtaaactgaactttagctttaaaaagcacttccggaataagtgaggactaatgatgagtagtttggttattgttcgagtacctgagtacattctaaaaggtcccacagtaaacaaccagttcagcggtgacctgtgggagcgaaatctcttcaaagatttgaagaacgctgcggagtgtatcattaaaggagagccggcttatgttgctcttcctaacaaggtaaaccctgacactctacaaacagagtgggacattcaggttgtacagttctaacccaaggggagcttcggctccctttttcattggagataaaaatgagtgaaaaggaagaggatatcgtcctcatcgacggcgaccttatcgcctttaagtgtgcaagtgtcaacgagacccgctccatcattgtcagaaacaaattgacaggagaagaggaaacttggaagaatcggacgacttggcgggagaataacaaagacgaagagggattcaacgaagacaacttcgaaattgaggaccatcaagaccccaagcacgtgtcctacggtatctctgttgttaagaccatgatcgaccgaatctgccgccaagctgggtgcaagcagttcaagattctcctgtccggtcctgacaacttccgcgattccattcccctcccgaaagagtacgagattaccaagggtaaaaagaccttcactcgtggcggcaggtacaagggtaagcgtacagggcagattaagcctcttcagctaggtcagctaaggcagtatatgatcgaagcgtatgacaccatcatccatcccggagaagcggacgacttgatggccgaaatgatgtacaagaacggtgtaagctactccagaggggagactactcagcgcgtgatcggggctaccatcgataaagacgcagacggcactctaggatggctttgtaactacgaacgtgagcctgttcaagtcaagttcatttcaggcctaggatcgctctacagggactctaagggcaaggtgagaggcgagggacgtaagttcttctacttccagttgctgttcggcgaccctgttgactgctacagacctgccgacctgtgcgtagggaaagactttggagaagtggcggcatacaacgtcatcagtccctgcacaacggacaaggagtgctggcaagcaatctacgacacctacaaatcgtggtatcctgagcctgtcacttacacagcatgggacgacacagagcacactaaagatgcaatcgatatcatgcaaatgtattgtgactgtgctcacatgcaacgctgggcaggagacagagtggactgtagggcggtgatggctaaactcggggtagacttaggaggtgcagaatgagcgtaaggcctcgcccttgggaagacttcccgggcatctggaagactgaagctgcgttcttgagttgggtcagaggaggcattcgccgctatctctggtctaagaacccagtcaagcttgagtttgctaaatcccgaaggattaggataactaaccccagcgaaaagagcaagctcaggaatcccactgtatggggctatgtgtgtgagcagtgtggaaaggaaactcctcaagctaacgtcgagattgaccacaagacaggggaattctccctgaagcgagtggaggacatccaatcgttcgtggaaggtgtcgtgtttgtccgcatggaggatttggcagtgctgtgcaaaccgtgccatgagatcaagacatacgccgagcgctacgggctgaccctagaggaagcagatatcgtaaagcaggctattgcaatccagaagcaaaagggatatgataaggtcttcttgcaggaagtgggaatcaaacccgcatccaacgcagagcttagaaaagagcagatcatcgctcatcttaaatcaaagaaggagggtatatgagagagaagtttcttaaaatcatgcgcaagctgcccatcagggtaagggcttcccttgttctggtttggattgctctgttcttctggctcccggttgtagcagcattaattgccggagttatagacttcttttgtactgcaaaggagcagttggaagaggggtactctgttctgttcaatgccactcagggcgcgatctgctgcattaaaacggggaaggagctggagttatgaccaatctagctacatatgttatccgccacaaaaagactaaagagctttggactactcctaaagggaaacgtcaatggaccacgaaaggaggagcggccttagcttggaggaacgcatatgatagtactacactgggagcgtactatgctaaaagagatatggaaaagtggcccgacctgaacattcctttgattgtagagacgggcatccatcgtctggctagctgggaagcagcatcttttaaaaatcaatctgcttttgagattgttgatattgctgaatccttgaagcacgaaagccagttggtgctcgacctactgaaagatgttattgggttcgaagtgccagatcacctcggagacggatacgtccgactcaccattaaaacgtccacatacgacgatatcatcaaactactgaaggaggcaaaatgagcatgactgacccccgagcgtatttcatcaaacaggagctggaggaagcaacgaagcttctagaaagagccctcaaccttctagataacgtccattgctacgatacagatgtatacgaggacattgcagcattcctctacggtcaagagtgcgaggaggaataaggtgcagcgcgatattagtaaaactatagcagaacttcgggacttgatcgaagctgtctctatgctcgacgaggccttggttatgatgcagaaaaacggactatatgatacggacttgtacaaacgtatcgatgcatttttgtattatcaaccgggcgagggcgagtgggaggaagtagaatgagcagcaagaaacactttgtaatctctgatacacaatgcaaaccgggtatcagtctggattacatggaagccatcggtaaatatatcgtggcaaaacgtcccgatgttgtgattcacatcggggaccattttgacctagctagcctgtcatcctacgataagggtaagcgctcctctgagggccgtagatacgccgaagacgttcaagtcggacgtgagggtctggatcggctgtttaagcctctgtgggagctacaggagcgtcaacgggctaatcggaagaaggtgtaccaacctcggttgattttcacactgggcaaccacgaagagcgggctgatcgagcagcgaacgataaccctgagttgtatggcaccgtgggtagcgatgagctagggattcaggactacggttttgaggttgtcccgttcctcaagcctattgaagtagatggcatctactacgtccactatcttcaaaaccacttcactggcaagcctctaggtggtacagcgaacaacatgctcaaggctgctggtcattcgtttgtcatgggccaccgtcagcttctggactgggcaatccatccgacaatcgacggtaaacaaaggcttggcattgtgactggagcgtgctatcctcacgacgaggcttacaaaggctatcagggcaacaatcacttccggggttgtgttatgattcacgaagtgaaggatggttttggtctgccgatgccagtgagtctagactttatgatggagaaaggaggtttcaaatgacagtttataagttctggtgtgaatgggacatcggtatcaatgaatacctgtggcgagactactatcagatggaagaagatgtagctaaagccttgtcagactgcgggattgaggatactattgaggaactagagggcgcaggcctgctcggtttcgactctgttaaagtgattggttaataggagggcatatggctgagtttttccttggggcggcccttgcaggcttgttctttatgtttagtatcactgcgagctttaccgccgaagatatcgagaaagtgacttcaacatgcgagaataacgaaggcgtcaagtatttcggagttgacttcttcggagacggtgctgtacactgcaacagcggcgctattttcaaaatcgaccgtaaatctaaataatcgaaaaggagatataaaatgactgatttcaacatcacccctgagcaaatggaagaagcaatggcaggtatgaacccggagcagcgggctctggtagagaaagccttgaccgaccgtaaatctctggaagattccatcgtgaccgaggacggtgaactggactatggcatgcttgcacgacacatccgcaccagcttgggtgatctgcctctggtaatgggtggccctgacttcctgaagctgatgatcttggttgctgcgatgccggagaccaaagacgatctcctgactctgcacatgaacctgtccttcattctggactgcattcgtgaatcgattagcgacgaggagtaacaagtggccgaagagattgtaaaagaagacctatctggcgacgatctcatggttgactcagcagggctagatgccctgctggccttcctagagagtcagtttaaaggtccgaagggtgtactgaagggatatgtcactatgagagtgatgtgcgctaagatcgagagtcttgacgggtttcaagagttgaaagatatggaggtgaactttgagtaacgatatcatcgacgttcatgctgggcaaccgatttctctggtgcaacggtcaaagaatcctatcaatattcaatattgggacgccgataccatccctcacggcacagtcttggttgttaccgagaaaaggggcgatatccaaaagggagagttggtcgtaaggctggcgagtggtgcagatgacgagcactctgttaaggtatgtagattctctgatttcttcctcctaagggagagaggttataacccagccagtctcggcgacgttgaacaagcgtatgatgttctgttcgaagaccctccggcgactacctttgttaactgggatcgggctcagcctttgacaaacagtgagcgctactacggagactttctgattggcggcgaccctaaagggatgccactattcaacatggctgttcttaaaaatgttctgtcgccttacactgccgacgatgaggaactttcagctatgtctgggaatcccgagacagtagagcacaaagaagttgacgaactaagtgagagggacgaggctttagccgaggtcgacagactcaatgaagagcttgttgcactgggtaagaaggttgtgttcgccaacctagaagattacctaggcaaagaaaactatgccacattggaagctatggctaaccacaaggaggctgtaggtagcggaggctcctctagttactacactgtcaaggtgaacaaccccactacgaaggctaacatgccgtattttgcagagtgcaacgatatcatcgaagcgctggatatgcgattcggtcaaggcaacatgttcaaagcgttgtggcgggctgcggcagcacagaacctaggcaagctgaaggccggtaacgatgttatccgggactacgagaaagtcatcttcttcgctcagttggagatcgataagattctcagagaaaggggttgacattctccccgaggcttgcgataataggctccaagttgaaacgaaggaggtgtgtagatatgatacagaaagtaaaacagaagctcatgatggtgcatcctatcctcgctagcgagatcgtctggtgcctcaccttcgcaatgcttcagtaaaacaagggagcttcggctccctttattgtatcaaagatttaataaggagagtttatgcaaatttctgcaaaagtgattcaacacagttcccggatcggcctaggtacgaagaatcacagattcatcactacattcgaactggagtatcctcggtttattcacagtgaacttatgactcaccgactttttagtcgaaatgctgcaagtagtcgtgccattcccgttgcccatatgatccgacaggtggaagagaatcctgcgatgcctgttcactggggaatgaatcaaccgggtatgcaagctgagttcgaactgagtgagtgtttgcagcgtagctctcagtacctgtggaagaaggctgcaaagagtgcggctcggatcgctagcgcactaaataaaatgggactccacaagcaggtggttaaccgtctccttgagccattccagatgatgaagaccgttgttacagccacggaactagataacttcttctacctgcgttgccataaagacgcacaaccggagatcaaggttctcgctgagaaaatgtatgaggctcttattaaagcgggcccggcagaggctctatatgacggagagtggcatgttccttatgtgactcggttccgcataggggatggtaagctgcgttacgcagattgtaacgggcaagaactgagcgtagaggatgctattaaggtatctgctagctgctgtgctcaggttagctataggaagaacgacgagactctggagaaagctcttgtaatctacaaccgattggtagatactaagcccgttcacgctagcccgttcgaacaccaagcaacaccgatgctccgcatctcggacaatcaaactggatgggaagacggtgtgacgcacttggaccaatatggtgacctctggtctggtaacttccgaggtttcatccaacatcgtcaactaattaaagggcacgtatgtaatgagtactacggccaagaagaggaaggagtttaaaatggcagaatataacctgagtctggaagacctcatgctggtcgatggcttcaaagaggcattccagagtaataatgagaaggtagtgagggagcatctgtggactaacggcatggatgttaaaaactactcgtatgaaatggttttctgtcaacatcgcacactgattggccgggtcgtagagggtctacgattctctggctttgagcggacagataaagagtggctgagcctcggttgcgcctctctggaagctcatattgcagcgtgtgatgatagtaatctacggttcactcttcgtaagatgcgaccagagggatcgacagaggcaacgttccacaattaatgcagtaggagtagatatggaagttacaaaggctctcgcagatgaggccgatattttcaataagatcacacaaatcaggactccaacggagtcctatgcccggaaatatccggtcattgtcgaactagcaaaccagcaactagaagagaagttgtggttctctagcgaaatgaaggtagagctggataagttgaacctgaagtttaagttggaacctcatcagcttcacgctgtaaagactgtccttcaactgttcctcaaatacgaactgatcgtaggggaggagttttggatgggtaaagtagtccgaacgttccctcgcccagaggttaaactagcggcttcgatcctgtgcatgatggaattggcagtccacgctgaattctacaaccagatcaacgtagtgctggggatggatacagatgaggactatgtagcttacaaggatgaccccgagcttatgggtcgaatggattggcttgagtctgtcctaggcgatgaagacgatgttctttcggtaattatcttcagcctaacagagactgcccttctgttcagttctttcgctatcctgaagagcttccagtgcaacgggtataacgatatccctgtcatcgcacgcggggctaaccagagtgctgtggatgaagacttgcacggtgtagtttcggctgagatcatcaaccaatactacgcagagattgggagaccattgtctgaagatactcggcgtgtcgagaagattcgacaagctatcgaccatgtatatgctcatgaatgtcgtattgtcgatatggcgatcccgggcggagaacttaatggggagtcggctgaaaactataaagcgtttgttcgttatcgtttgaatgtctggtgccgaagactcggcctagaagatcacttcgaaaacgatgacactccgatcaaggattggttcgaaatgaacacttatgcctacaagatgatcgacttcttcactccgggtatgggcatggaatacgaactagggtgggatgaagaggaattggcaaaggcttgggaagaggagctgaaatatgagtaagagagacacgttcaactattccgaagctaggaagaacagccaagcaaccggcgagactcctctatggtatacgacggctggctaccagttgttcatgaagaagtattcgaacgagggcgagtctgtacgctctcgcttccaagctgtagctcgcgctatggctcagcacgcccctacggtgtatcctgagtggtgggaggaggacgaatacactagaggcaaggactgggaacaggtattcttcgacgttatgtgggacggttttgtaagcccatccactccgcttctgtcgaacggtgggctccgcaagaagggcactacggtatcttgtgctggcggtctgatggacaacaacctctatgaccgttacaatgtaatgacagagatcgcagtgctaacgaagcacagccatggcacaagctttagcctgaccaactggccatcagaaggagacgctatccgaggcggtgagtctcaaggtgtgatgcctgtcattcgggacgttatcaacgtcatggaagaggtagcacagggttctaggcgtggtagctgtgcatacagcatcaacccccgccatggagacttctggaacgttatcgatcacctgtataagcgcacagagtcgaacaacgtcggatggcttctagacgaccagtggtgcaaggatatggccgagaaagacccggagaccttgaagcgatggaagcgaatgatgttcgtcaagctggccagaggaaaaggctacttcacgtttatcgataagatgaatcggcaccttgcagagccgtttaaacgggcgggtctacgctgtgaagcgtccaacctttgtcaagagactgttctcccggcaaatgactggtatacttttagctgcgttatcctgaactacaacctcgaactttaccgttcttggcctaagcaccttgtgtttattggtcaggttatgtctgattgcaacatcagcgaatacctagcaaccatggatgaggtcagcgttcaggaccgccgagcactggagaagatttaccgattcaccaaggacttcagggcgcttggcagcggtgttctagggttccacaccctgctacagcgggagcgattcccggtcggtagtatggatgctatgttcctgaacaacgccatcttcaagggtatgaaggagcaagcggaagcttgtaacagttggctagctgaggttctaggggagccagagggctgccgtggactagggaagcgtaatgccactacaatgatgatgccgccaactaaatcgacggcagaactcatggctggggcttctgagggcataggactggacgttgctatgtgcttcaccaagcagagcgctggaggtgaattcttccgtgtcaacaaggtgttgctggagattatccaagagcgaggcctcgattgggaagagtgtgcaaggcagattaacgaacgtaaagggagtgttcagcacgtagactggttgactgaccacgaaaaggctgtgttccgtactgcctttgaggtgagaatggaagactacctgcgtctgtgctctcagcggcagaagtacatcgaccaaggtcagagcatcaacctgtacttcacgtcgaacgactcgccggcttacatttcgtacatccatcgtctcgccatggaagacccgaacatcctatctttgtactacatctacagtatgagaggagcgggagatatctccagaacagaagaatgtgaaatgtgcatgtaaaatcattggcccggggcttgacagcttccgggcctttgtgtattctgagcacatcaaaacaaggagggactaaaatgaacaaattctctgaagtgtactacacttggagcgcagcgtgctctcgtacaaatatcttgatagatatgggatggactgctacaatccgtcgagacttcactggcgggatcaaccctgtatgggttgtggagttcacgcgatgaacagcaaactccgcaaagagttcgataaatggtggggacaggacgagcaagaagaacttcgtaaatcctgtgccaaaggatgggcggaatatatctggatggctagtcgaagaaaagtgagtgttgagcttcccgcgccagaaggcggatttatcgacatccaaaagtacacaatcaatcgctgcaaagaagctatccgcgaaacaggactggaggtgttttaatgaaagaatattttaaaaagcgactaatgcagaccagtgaaccgttcgattcagcgacgcaagctatggacgtagcgattgcgtggggaggggctaagtactgcgaattcacttgcgtaactgcggataatcgcgtcatcagcatctgggagtacaatgacgtagagcctgataaaccggtattcaatggacagcaacgaatcttagttccaacttttgaggaggtagtataatggaacaaactattgataaatctcggtatattgtgcttgataacgaaggtcggcacgttctgaccttgtgcgagaaggccgcctataacctgcttaaaggcgttcagtggacaaaggacaagcatggtcaaatccatgtaaatggtgtcacaggcgttgaactcggagttcgtcaagggattatcgctgaagtattcctgtatccgggctacatcatcctagaagaggtagactaatggatatgttcgataaatacatgcaagttatgtatgaccgggacgctttctcaaggcgagtcggtgagttagaaaaagaggtagccgaactcaaggctaaggtggctatcgctaagtgtgatatgcgtgtcgtgaaaaccctactggaagatatccaatgggtgtatcaagacgaagctatctatactctaccgggctacgtttgcccttgttgcggggaatctgcaaactatgggcatttccaaggcagcttcgataagagcccctgcctactagcttgtgtactgagccggagtgaagcatatgaagcctaatgttgtagactcgctaggcattaacatgtgctacgcctgcggaggtaaactgtacgtccgaggagtatgcactatctactgccctgactgcgagaaggcagagaaagataaaccgttcgtcaggatgcagcttctacaggatatcgcagacagcaagagggttgacaacgaatagaagtgctagtaagatggccacatcagacagaggaggagccatggctacaacagagaagatcatcgagtatgtctcggcctgtatcgaacgcttgcaagaggacgtaactgggtactcggagaacttccgtgacagggcgttatctaatcgcacagggtatattcacgggcttatcactatggctgaaatgaatgagcaggtgagtatcgaggactgcgacaagctccgtgtaaagcttcgtgaagctgctgaggctgtgttgaacgtactggattccaaaattaactaggaggtgctctgatgaatatgaaagagattgtgcaggctttgattgtcgttgtcgctctgactctcgcagcaataggttttgtagtcgggattactgcgttggccaacaagagcgcgcccgccgaggatattgtcgtgtctactgaagacggcaccatcaatctcggtcgctccgtgaagagcgagaagctgctgtatagcatgtgcatcaaggtagaagaccgcaaacctgcttgtgaattcaccaccaaggaccgtgttcttagcgaagtgaaacaggttatgcgcccgggcgaggctacggcccgcgatattaagattgcagtaaacgcggctgtgacgtatactggtgagaacgggcaggaagcaacctctctgattaccccgaaaggtaagtatctcccggctggcaccccgtctgaagtacatattcaggctattgcgaatctgttcgacagcgtgtacaatgactacaaacaaaacttcagcaagatgtgaggaggactcatgaaagcacagcctaaagaagtagaaaccctgtccctcgacaagcgccccaaggcaggtgatgttgttcgactgcgatctgacggtaaaacctacgaggtaaatgctgtatatcccacggcagtgggctgggaagcgattctccgcaacatgtacgacaagactaagaccgtcactgtcagcatggagtggtgaaatggcaagaaccgtcaagtgcgtaaacttcctacctgtcactccggacggtcgagtaatcgtccgattcggcaagaagaggctaggctggcttgggaaacagggtaagaagtggcattactacccttacggatgcgaaggcaagattaaatcagaggggtttaagacactcgccgagatcaaggcttggattcgagacccggaggctgtatggcccggtccgcagcctgagattgactaattagccgacgaatggtacaatggtatgtaggaaattccctactcaatataaggaaactagcaatgactagccgctggaaagaggccgtgtatcgtaagtactcggtgcgtcgtctgcggcaggaactcgaagagttcaaagaagctagacgctttgcaccaaatcaacgcatccgtgcatggtttgatgctcatatcgaatttctagaacgccacttggctattcgagagtccggccaagcctacccagacgacctttggtaattaggtaattaggtgtgttgtaggtagagattcaaatcatggttagtggcaaggacgccacacttcagcccgcccacaaggcgggcttctttttgcctgaaatttgcggttgacaaggttggccggaatatgtaaacttacggcatccaacagaggagggaagaaaaatgcaattcaatatatcgaagcaactatgggtagctaaaagcgagcggaagggcgactataaagggacgcttttggcatacatgtctcaagtggacttcaataaagatggtagcttggctgccagcttcaagaaaaagcagcagactggtatgagctgggcaggtaagaatgccgagacttgcttcatagacaacatccctatctcggggcatttcatcggggacagtgttgaacgctgggtcactgagaacaaatatttccgtgtgacggaccctaggggctttgttctagaggttcctaccgggaatatctcgaccttgctctacaactgcacagtaatcaagggagttattcaagagccttgcgtgtgggttcggatgggctctcagcacgttctactgccggaaggctcctctctctacaaagaagctgtaagtttcgtagagcgaaaagaggcggccaaaactgttaaagatatggttgcaggggatcgatgcactcttcttagctatgggacagaggagaaactagaggctgtctacctcggacaggtgaagatcacttggcacctcctagctaaaaagggccggtactctagccgagggtggggcgggggtcggtggggttaccaccatctagagagggaactagatagaaaagaattcactgagaaagattcgaagtgggttagtgtgttcgctaagccggtaggaaagcggtggagtatccattttatcctgtctccaaaggcaaccgacattcaatctggaagcgtcccggatgaacttcagaatctcgacctagtgaatggtgtaaaatgggagtacaacgagaaagacgaccgtccgtcttcctattactctgtgccggagagggtagttaagtgtattagtgtagatgatcctctatgggataatctgcacagctcctcggaggtgcggtggacccgcgaatggaccgtggtcggagcagagtggcgaaaataagccaccattattttagaattgcccggcgagagccgggctttttcatggcaggggttattttcaaattatttttagatttctgggagtttcggccaatatgggcaatatgaaatttctcaggaaaaggctcagaatgctcgtataagagccgttcgagtgtaggtatggtgagctactacttagccgtagaaggacagtgtaacgcttaataggagggttagaatgaagattgacaacggtagcgcgtatgcgtattggctagcggatatgaaagagtttgtttctcagatggatgccacagagattgagaagagggcttgtatagcatacttaattagctggtatcagcgaagagtactgcacagaattaaacgggaggaatacgaggcgatctaagctagggaccggacagatttttagggactggatagattttcacaggctgcaaaattaggaactgggcagatttttaggaactggacagtttttcacagaaggggatttttctacagaggaatttcccctgaaatttagccggatttctcagaagggcggatcgttagcaggctatctaattggttagcaagctacctttaatcgttagcacactaactaaaaattcctaggacggacctcagttggcacgaacgttgcaagcccgcaccagtttcccgggcaggcgtaggcctcgactatccgtcgtgaaggcgatatgtagttggggactcgcaccccgcgtttaagatgcgcccattctactatgacaaacccctttgtcaacataatttttatggcacagtctttgcaattgcaattagcgtgccaacctaaatctcaggctccctcggtgtttatctccggtgctcggcctcctgcctgcgttgcccgcctgcctgtcattatacacaagctatcaagacaagcaagaaaaattatagagaaaaatctacataaaacaggttgacaggcctcctttatatatgcacaatgaccccacattcaacggaacggcaggtaagcagccatgctacatagtgaagcccgggcgatggccctacaagagatggacaagtggagcctcctcgaacaaggttggaaattcagtttcaatcgcaggatgaaacggacgctaggccgttgtaatcacgctaaaaagctcatagagctaggttacagctacgtatctgccaatggagtgcctgcggtattagatactatccgccatgaaatagctcacgctaaggcgggaccggatcatggtcatgattccgtatggaaagagtggtgcggattgattggcgctaaacctgagcagtacgccagcacaaaggaaaaagtagtcgtctatccgtggcgactggccatccatcacggtggcggccagcttgaactactcaaccattacggtttcagacggactagcatggcgagaaaacaggtacgaggacggcctgaaacgttgggcaggttaatttgggtgaagaacgaaaataagggttgacagcttgggccattcgcgtagaatggccctcaagcaaagggaatcaccctgagcacccacgcaggaaagcagatatgaaagctctttgtaatcatcgggcactctacgcggcttacaatcgtagcgagcttgatcgtattgcggtagatttgaaccgctacttccctatcgagaaagatgatgaatgggaagacggcgtatacatgtatcgtcgccgcacctatctggtgaagcattcgaagggtacagcccgttggcacagcctttactgcaatgggaccgtccaaggcgtcggggttatctttgacgtgaaatcggtcgaacctttccgcacagcataaggagattcagaaatgcaagcttggaacgtataccagaatggccagttgatcgatactgttttcttcgatatcatgtgtgctgccgaagaggtgcggaaatcgctggtcaaccatgacgggtatccgtctgatatcactgtagaggaggccgagtaatggataacctgtccgttaaaatcgttctgtcggaactcagctacaaagccttgattcaagccttcgccttgcttggccgaacgctcgacctagacgaggggttggacgatatacttaatcttattgcggatgagatcgctttccgcgacggcctgccgcctttcgcagacgactgcgataaaacagaatggatgctccgtcgatgggaatcgctcccggtggtatcgtacaatatcgggcaggacggaccgattgtcgctcggtctatcgaagtaaaaacggcatgaggggagaactgatgaccgtcagagtaggagatatcgtggctatccggggcgacattcggaaaaagctcgacggaacatgccaatacacgcccgaacaattggtaggtggtaaattcctcaagcatgccggcacgggagaaatatggactggccgagtgagtaagatacaaggtgatatggccaaggtgggaggggcttggcgcgggatcgaattctatgtgctcattagtgaaataaacgcttgacaacctgacccactagctgcaaaatagcacccacagacaacgaagacgccgataggcgaggagaaagcagatgcaaatgtttttcaaaacccgtacccaagcccgtgcaatggccaccaatggccgcaaagtggtagacaacggcgctcaagctgaaaagcgctgggctgtcaagctgaacaaaaaggaggctaagtaatggctaagtctgttagcgtagaccgcaagcgatccattctcgacgaagcgaaggatgggagtttcttcagtgtggagtttatcaaggcggacggcaccgttcggaaaatgacgtgtaaacgtcagatcaagtcggcgtatgctaacggccagtttgctacccgcaagcccaccagcgccggcaagccgcacctgtataccgccgccgaagtgctgaacatggaagagggtaaatccgcattccgcactatcaaccttgagaccctgacccgtgccaaggtaaatggaatcgaatataaattcgattaaaagcttgacagcctaggccattcctgtagaatggccatcaagcaagacaaacttaaacagaaaggagattaaaatggcacgttctatcaaggcttccgacttcgattccgcttaccagttcgaggccgccaaacgttccgaacgtaaagaatcccgcaaatcgcgtgacaatcgcaaagctagccgaggccgcgctttcgacttccgcgacgatatgtaaggcttgtgcctagccggtgggccgattcgccggcaatcctaagcccattcgtcgagtggttttaggattctcaaccccagcggagataccaaaaaatggttcgtcaatgcgtaccctgtcccgatgctcgccatgctttttgccttgcatggttgttcgccatgccggagttcgccggtctgcccgctcaaaaggacataaaactctttaagacttcgggacagtgggcggtatgttatggctagacgacagcggctcccgtcgtgggtgcaggaccagactgaggatgatactccgctacgggacaagatagacccctaccttagcaagcttggcgaagtcgataagctagagggccaattgcgacgggtcaaggatgcaacggacccggatgaatacaacgaaatggcaagagtgctgaaagctcgacgccggaaaataatgcggcagagggcccgggcctacggtctaccagaggaagagcctaccaacgtccaaggctaccacgtcccggcagaagattaccgcagggtgatgaggctgaaatgggtcgagcctcggatgttctgggcagtcctatctttcgtcattttcgtatggttcatctcaaaaaacagttgacacgcccactgattactgtagaatgggcggcacgagaggggataagcccctagactgaaaggaacaacgatatgaaactgttcacttgtgcgttctccattgaaaactggcaatccatcgaaaaagctggcggagtggtctataccgccggctgcctctggctttcctactatgcgaaagaaaagattgtctaaggcttgacaagtctcgttatttaaaacagaatacatccgctcaccactcacaaggcgaaccaaaatgaatttccatcttaacctcgtctcctccaattctaaaactggtccgatccctgtcagcacgtctcacaaagacacttgtccggacgcttgcccgctcaaggctaaaggctgctatgcctcttacggtccggttaatctccattggaaaaagctaagcaatggtgaacgtggcgtagagtggaaagagttccttcagcaggtgcggtctatctcccgtggggatttgtggcgtcataatcaagctggcgatctcgtaggtcaggatgacgttatcgatgggatcgccctgatggaactggtgaaggctaacaaaggtcgtcgcggcttcacctatacgcactacccgatgaacaatttcatgaaccgccagcacgtattgtcggccaatcgtagcggcttcactatcaacctgtcgggcaacaatgtagcgcacgccgatgaactggccgacctgaacatcgcccctgtagtgactattctcccgatggacgcggagaatgtaagctttacgccgaaaggacgtaaagtggtagcttgtccggctgagaaaagcgacaaggtgaattgtaagtcgtgcggcttgtgccaagtggccgaccgggagtatattatcggcttccgtgcccacggcacagcaaagaaaactgtcgatctcattgctaagggttaacacaatggacgaatctgtttacgcaccattcaatcagtgtaagatgatgggcctagaacgaaccgtgcggagcctagcggctccaaacggatgcaaggtagtcttgtatcaggatcacaagaacaggcacagaattgtcgtatatgacgctctagggcagggtatgtccggagtcatggtgcaagcggatggagaaattcactacaaggaaactcgcaaggccagccaagggcagcacctgacaaggcagctacaagctcagctaaccgcgtggggagtgaagtggtttccctctcagtaccagacgacagcaggcgcagcttgctacaaaggaggcaactgatgcgacagcttaataaatcccagctaaaggccttggggcctaagatcgacctagccttagagctagcttctactggccggggcgatcttatgaatggccacggctctacctgctacattgcaaacaaagctggacacaacatcttgcggatcagctatcataactcccgattcgttgcatatggtgctgagagtgtccgggtgactgggaatgtcattgcagcatgggcggaatggaaaggggtcaaccgggccgcaatcaacgctctgagtgagtatgggtatcatcctaacctgagcatagggcacaacgatgctcttaagactctgcgtgatatcgagcgttaccagtgacggcctcttactcgacagagaaacggggccagaggtgggccatcatccgtactgagcccggttatagaggtgaccgggtgaccgtgctaggattctgtatcaatcaaacgcacgctcttaaaacggtagccaaattccgggcttggcaagcgctaggctggccctacacactgaaagatgacagaaaaataaatgcttgacagcctaggccattcctgtagaatggcccctcaagcaagacaaaccagccatcaggaggctagaaaaatggaagctgtagctcagttcaaaagtgaagattacgcaagcggtgatagccgcaccgccaccgtttacaaagacgtttacggcgcatacgtagtgagcgttttcggaactagcctgagcgagcctattgccttccattggggaccgttcgaggataaagaatctgcaatcgatgccgctaagtctgctatctaactgaaaaaagggccacagaatgaaaatctccgctatcctgaaggaccagttggaatctagctatcagccgcattcgtttatgtgtgcttgtgttatagagatggacttgagccgggaccaacggtctgtagttatgaaatttatcgaggaattgctcaaccccgaagaacaggacgaatgcttccccacgttacacgccaagctcagggcagagcttccgggggtttatcataaggaggcgtgggatcaggaagagtgggatttcttcatttccccatcggcctacaatatgcgggtaatatggtggaaaactgtcattgcacaactagaggaacaagggcaatgactcaagctaactggagcaaaggcgtccgggttgtcggcggaaagcgggatggtgagatcacactatttaccgatgccaacttcagcgaatctatgggcctctgcggtggtgatcccgatttgatcgaggctctgccgatgcctgctgcactccgcctgctggtgaaatggaacaaactgtgccgccaaatgaagcttgactatcggtacgaactactgtaatctgcaatctccatcaaaacaggaatgctccaatgtcgatcttagccttaactctgaccctctgctctgctgtccaatgcgatgattacatcatcgaccacacactcccgggccgggccgcagagtgcaatgctcggctggtagaggaggccgaggagtggggcgacgcatgggtggcgaccaatgccgacgcccgactgacccgctaccttagccggttcaatattcaagttgaccctcgctttgttttcgactacgattttacctgtcaactgatagcagaggatgaactgccatgatcgctccacatatcaccaacaaacaataccgccaacgtgctgctgtcatcgtccgccgagtgaaatactatgaaaggcgctggctccggaccgtagagtttttctcaggtgctgccgctcagaacatcgcagaacgctttgcctacgctgggcatgctgaagagcaaatgtccaagctcaaggctgagtttgcagccttcccggtggaggtgaggctagatgctctaggttggataaactggaatactcataacgacggtctgctagaggagtggattcatcaggatagtgaccgtgccatcatgctagagtatgacagcgaatcgaagcggcctgtagcctgctgggaaaccactgtctatgctcttcccaagctggcaatgctgtaaaatatcgcccgttaggctgaaataatgcttgacgggcgtttttgtacctgtagaatgcctagccaaggggtgcataagcgccccacctcaaaggatacagaaaatggccatcgttgatcgaaccgcaggtaatgaaagcccgaatcactgctacatcgttactggcggcattggaccagagtttgagccggccctgttcactacccatgcgctggcaaagaagtatgctcagcagatagtgaaatacggcaaagagaacgacgttttcccgccttttacgcctgttatcgagactcgccacaaggcggatatgcatcggttcaccattcacaacaaaatccccgaataggagatatatctatgaaactttctgaaatctttcaagccggtctccactacgcaatttcagccgggatgccgtggtatatgtgcatacgtctgcgggagttagacctgccggggaatctcgacggagtgctaattgacattcaatatatcatgaatgaagcggggataacgtctgacgggatcgacgactacttccgggaaactggtatggctgatgcctatgtgatgacgatgcaagaggccgtcgattacgggagtccagcttacgccatgtgggtgcaattttggtttttcgtaatctttgacttagcccgaaaagggcagtagaatagccagcaaataatgtgatctagagggacgatcatgggtgacaagacaggcatgaatgccaagactgtagtttatcgaatcgagtgcaagaacggcgagggcccttatgttaacgggtgcatgacgaattcgtcttccactccagagcggcctgtccctgagcatgacgggataccagatgttcgccattttgagtatttcgccttcacgtcccctaggcagctagacgattggtttggcgatgaatacgatgtgctgtccttctattctaccgcacggatcagagtctatgaggtagacaagcaacatgtaagagtcggcatccggcaatgtgtattccgcaaggcggaagctgattgcgtccaagaggtgagcatagaccaatgggctagcatggtacgcgccggactattgtccgcctcggtcacacaaactgtagctccacgtcctaccgagcaattgtccctagacctaggggatgactcggccggtgaggcttcgaaagaaattttgaaaatcttcggtttgtagggttgacagcttgggccattcgcgtagaatggccctcaagcaagacaaaccgccgataggcaaaacctaaggaactataagccatgactaccgaaaacctttcctctaaagaaatcgaaaccgccgttgacgaattcctgaagtcaatcgatgttaccgtggccaccgtgtgtcgaggtgagcgcaatagtgaaggttgggtgcatgacctgtgggatgtaagtttcatccgtggcgatggcctccgtggagttctcgacactgaattccgcacaggcgtcgggcatcgcaaagcctcgattcccatgcccgccgacatccgccgtctggcccctaacatcctgatgcgggtagagtgggaaaaacgttacatcaaggctgtagcacctgaggctacctgtatcctgtccagccttatccgggactctgaagcgggcggctacactttcgaggagttctgtggagaattcggctacgatactgatagccgaaaggcctttgacacttacatggcttgtcagaatattctgaacaaggtgcggaatttcttcactcaggaagaaattaaacacatagcgcgtctggtggatcgatactgaaaaaaaaggttgacagcttgggccattcgcgtagaatggcccctcaagcaagacaaaccacaaaccggagactccccatgaacaagccaatgaacaagccaatgaacactttcgcatacgcccactacgtcgcccgcatggacaaggcctctggcactagcctgccctacgccaccctgttccgcatcgctctgcgtaacgcctaccgcaagccgggtgtccgccagtacgattgtgcagcactcgtcgaggatatcaaagcgcgtgaactggtccaaaagcgcattcgggctgaaaaagcagtagtgatggcggcagtaatgcgtgcaatccgtactggcttcactgttagcgtgaaagatggcagcgatggcgagtgggtagtgaaaaagtctaccgatatcaaggaaatctctgatagcctgcaatctaccgacgaggatatcatccgcttccgcaagggcgacggcccggacaacatcgtcggctctatgtgggcaatctacggtaacagcgccggcgaagtgatcgccgactggactgataatgccaccatggccatgattatggctccggctgagcggaagatggaaaaatacgctgaattaggtatctaatgcttgacggggcccgaaaagggccccataatgcacccataccagcaaacaacatcaggaccgccccgatgagccagatcaaaatccaagagtatatcgtagccgagatcaaggttaaccattgcgctcacctgcgcaagggccagaccatccaagcccgcgatgatcgtagcagtgaaaagtggattgcattcatggtggaacgcgggtatagtgcctctgaagccgctatcctgttcaaagacgcccatgatgtggcaatgctcgaactggcagcctgaagaaaatcctactaggagtactgacaaatgaaacgccaatataccgactcttaccagtgcaaagcaatcgacggcatgatctctatcctcggcagcaagaaagttaccactcaagtgccgccgtcgatgaaagcctctcgaaataaactgctgaaaaagatgataaaatacgtcgcccgggcaggatggaaaccgtaatcgactaattatcacagccccggcgagccggggctcacaataggagatagaaagcatgaataccctgattatccgcttgaattccgcctatagcgttcaaactgtccgtagcttccttgtggaggctgtagagagtattcagaatcatatccgcgactatgcgacgcatactgagtacgattcaggcttgagcccggtagcacacaatcaccgtctcgcaatcgtcaccttggacgaagattgccgagtgtttcacattcaatgcgagtcacccgatctttatctggctgaccctcgaatcgtgtttaccgatgttgaaagcccggcatatactatgcctgctaacgagatcgacgagtatagttacatgaccgcatggcaacatatccgccaaaaagatatgacagcaaaagaccacctatccgcttgggcgatccttttcgcctcagaggagaatgtcattgatattgacccgcgtcccaacctgaaaacgcaaatcttgcattgaccgaggagggtcatcaaatgaataacaagtataaggataacatcattgcggaatactgccatttcgacggcagacggccagtcctttccttggcggcacgttgggtccaccatgacagtcgggttgtgaaactggcagcgctctttgcctgtgctggctatggccgtccttacaaagattgtattcgtgcctacaaggccgccaagcagcgggaaaaggatatgcgagaccccgccagatggaagctcagccgagcgactaagcgggctctacgggcccggctggcgtccaaaaagaaactcaaataaactgttgacagcttgggccattcctgtagaatggccatcaagcaaggggatgagccctaagcagtagaagaggtgagaacgatgcaagcgacctaccaagccctgaaaaccctccgcgatgcttgcgaagctgccaaggatgaaaaaggcaccatcaacggaaacaagctgaactcgcttcgcaataaggctgtcaaggaaatgcaagctggcggcgaaacctactctgacgccattagcatggctcacgacttgattaagaagtatcgcaagtaatcaatccgtaacaagccccgggtgaccggggcctctcataggaaagaacatggactacgaatacgacgaaagctgtaacgcctatggccctccaccgcaccctgatgacgtgtacaagcccaacgctgccgataaaacgcgttggtccgcagtatgggcacgtatggcgcatgaccgtaacgtggaacgtgccgccgagcgcaccgaggaaagaccatgaaaaacgttcaaatctgttgttcgaagtgtggagccatcaacggcggtaacagcaaacacgattgggttatcgcattaggtaagaagtggtgcggtcattgtgggtccaatctcgcaacccttcgtcgctaaccattcactgaagcctaatcgaggaaagatcatgaacgccactctggcacgcctacagaacgaacgctgtgcaaccctccgcctgatgctcctgccggaacatcgtgggtatcagttctctggccatccttgggccgagcgcatccgcaatctccacgatgaagctaagtgcatccgccgccatcactaaaccgcactaatccattaaagctctaacagcccgccttgtgcgggctttgttctatctgcgaaagcggagctttcaagtgtaattaacatgtaatgttgtaacactctgtagaggtaacaccagcatgacaagatagaccacttgtaacgttaacgttacatgtataacagcatgacagcgaaagctgtacagatagcattctgtccagttcactcctatcaaataaccccacaataacccacctaaaacctatcggttttaagcggcctgtgaggccgtatatgaagcgatagcttcgctatgttagtctgcaccgtcaaggcgaaagccttacagtaagaggcttgtaggaggttttagggccatatgcgattagcataggatgttggttgttttaggtagatttttggtataacccctttccgcgctaccattgtctggctgatgttaagcgacagcttacagccgctctcattttgcaatgagaattgcgtacagttcatcatgcgcctcgaaagtgacttcactttgcatgcggatgcatgctatagtataccctgtgatagctccgctatcccgttttgcatggcacacgaattgcataagcatgacaagggtaaccctcgaaagcggagctttcaaagtggtctgtgaagtgtaggctctacctctattatatttgcgaccggaagtagtgacactgaaaacattgactctagcccagtaaatacgttaaactaaaaggttgatagctgccgctatcgagtaaccaacattcacacaaggaggcacaatgacaagcaacaatcatgccaagattcacatccattacgctaagcaaatctactacgccatgcgtaaacgtgtcatcgcaggcgatgagatatgcaaggaatgggccaagcccaagacaggctttgaagcgttctatgattgggtggtgaatgtgtcagggtacgccgtaggctaccgcctagataagaatatcctcttcccgggaaacaagctctatgctccgcatacgtgcgagttcacgcctacatacatgcatacactcttcaccaactgtgacaagacaagcaataaccgtgccaatacgtgggatagctatatccctctaggcgtccgcctagcacgctatgacaagtacgggatgcctgtatacgttgctcagtgtaggacacttggaaagcagtctacccttggatcgttcgacgatccgatgcaagcccatgcggcatggcaacatgccaagatagcagccatccatgaatgtattgatctctatcagatggaggatgttcacagtgtgaacgttgttcaagcgttgcttgagagagtggacaaacttggcaaggatattgcacagggaagagagacaacccttttgcaatgatttgatggggtcgatggtcaacccttcgagagtgcgagaactcttgtgcgggaactccgatagcgaagctatcaaacgtatatgcatattccatgccaacatgtggaaagatttcacccggcagggcgggagcccgttggcattagttttgcatagcttagctgtcgctaagaaggaaagaccacggccacccattattttgaatttactaggggttaggagaggacagtgggttcgtggttaagtagctcggaaatagaaccacaactcccgaacaggatacactcggacgtagggccacactacatcattattttcccagccatagagtaaacgcactcttcaagtggtcattatttctgggagggggattggggtcgtgcatacaatagcaagctccgcttgcacagggagaatggccaatgcaaatctataggattggtattgggaataagctgacaacagctagaccgtaactgtgtaaaagagagccccgggcagcaaaagctgcccggggctttttgtctctactgattgtattccatgtcctctgcttccaagcatccctgcataaccttgcagtactcttcgttaatctggtccatgtactgcaacgctcgttctttgctctggtcaggactgaacccgttgtgacggagaatcttgttcaaattctcatcatcccagaagtctctggaccaagcctcccaagccactgctttcagactctttatgcacccgataggggctggataccaatattgctcagacattagaccctcccgaacgttacgatcacgccttgcttggctagggttgcttgtagctcatccagtgagaggggcttaccgcccacgatgacatacttatctgcctctcctagagtcatcacacacttagtctggaaggtaggcctatacaaggcgtacatatcgggttgccacttgcttcgcaggcctgttccgtagctaatgaaccggtcttcggaatgatcccggatgtacaggcaccggggactatcgtctggcccatctacggagatagggtgttccatccactccctgatcttatcaacgacgccctctcctaccttcaattgagcgtactgacagtactcaaggaacgcatcaaactgttcggcagtgaaattgctgacatcgatctctttagttttcattctcttcctccatgtctgcaatgatttccttcaacgcttgaagcgtgtaggtgccatttagctctgtagtaggaccagtgtcacactcatgaagcgtgtacgcggtcactttcttctcagtgacgaaatggaagtctacccttcggaagtcgtaggtcgatttcgagtatccaatggcctctttgagttcttcctcgtaccacaggaatgtcattggacttccgtcgcttttacgagtgtagtccagcagattatctccaacccacagtagcacttgagccttgtcgtacatgaagccgtttccgctcccaaactcgataccataagccttaaggtgctgttgtactgcaatgttctcttcgggggtcttcacaatagtgtaaaacttcaccaaacgctctttcaatttcattcctcctgtctgtgttttatgggagtgtaaaacgttcccagtccattgtcaagctctctgtggggatagaccgttccagacgctctctagcctcttttagaatgatatcccactcatcgccttcttggactcctacatacttctccatcatcaacgcacggtcaatcagaccagccttgtagttatcccggctacgcttgcgggctaccagcttgtcgatgtagtccttcttatctgccaaagcggcgatagccttcctagccataagggcagcgtattctttttcctccgaagtcatccacggcatattggtcagtacgaggtcagcggcgtccctgaccaaggggatatctctccataggaatcctaccggtatcaggtctgagtctgcggtagctctccactgtagcactgttccggtcttagaatctgtaatatgcaccttctcatcgatacggtgggccatcatcgaaaatctccagttgcggtctacgatccatcgcttccagtcgaagaatgtagcacaaatagccttaaccgggtctccgaccttagcatccagttccttcagacgtttaatctgcttagcgtttatatactttacaggccgggaggctggatcatagcactcctctacctgaaactcctcagcccgagactccaacactttaggctcatcgttactttcttcctctcggaaccatgcgaacagcttcttaaacatattcagtcctcctctcctgtgatagctaccctagtcagtctccacacttttctagggagactaacgaggaatagcatagccataaacggtacggcgataggccagaatattccagctaacaccgctcgggcctctttcttacgcctctccgtactttctcccctccacccaagaagggggcgtagagattcccatacgaacatccctatcacagagtagaacaataggcagaccactccgacgactatgcatacgagaatgagaagccctacttgttccatggtgcgatcctcttaagtagtttacggctgttccagatagacagagcccacttaggtaacaacaccactttcaaaacgctgtatgttgcgtagagtagcagaaagctagcatacactgtgtatgtaataggccatagcagtcccagtacaatggcaaaagcctcgataccctctctgtgatctttagtcgcactagctgggaagttatctttgaaatactccgtgatacccatgtaggtccacatgaacacaattccccacgcgagcgagaggacgaatagcattgggattatctccattactcccctccttttcgaatcaagtcgaagtaggcccacacgtagaagttgcaccacgctctgcctatggcccagccttcccaatagtcttcccagtccttgttcggagggttattctcgaacatggataacacgcatgaatcagctacttcgtccaagaggtgcattaccgagttaagcggcccgattccaaaggtcttatctagccaccccttaaatcgtcccacgtctgagacggtgacgctggagtcactgcacagtgccaatctctccagaatgtagcacatgtatggttcctcttcgttctcgaagaatgcccgcatgccctccttgattagaggtgcaatagaattagagttcattgttttcctcctttgagagccccactagggctctaaatttttggttcgacctgcggtcaacacatcacaacccagttgtacaggtcagcctcctcgtaagccgatgggtagcgattgtactccaagaagaacgcatggtcaatagctgcgtatttggttgcgaagctgttgatgtacgttataaacccgttgtcgccccggctaaacagggcgtattcctcagtcccatccttgaacgtatctaacgcgataatatacttgtcgaagatcacagcatttcctcccggctgatgtagtaattgtattcgtcctcttggacgaggaacgcacgatagaagcctttctcaaagtctcccttgaccagcaccagattgccctccaccttgcatgtatagatatacatggtgtttgctactcggataacaggatcatccccgggacgaacatccagagcagagagcatagcctccattggcatgcttgtcaagtgtgcaactacagccgagcagtattctgcatcgcggccagaagtgtcctctgcataagcaggagcgaccccgcacgaatgcagggcgagtgtaaacgcaatagctacgagtttcttgaacatactaaccctcctcttggtctgtctggggaacatccggcttggggtagacgaatgtctctggatacttcatgcatcttagctcatctttgcagaacccgtcaatcaatttctcatgtgcgaattccgcagccttgtagtagcgattagcctgtcttgcctccactcgaaggaggtggcttatcgtgtgagcgttgatattactaagacttgcaaaaattgtcaagagcttctttgcagagagggggattgacctttcgtcaggtctgtaccaatcaagtctggccactccttggagaacgtcgtccacccacagagggtagtctccatcaagctcgaccatgacttcgtacatttcaggctgaacagcgttgaaaaagaaagagggctttcgccctctgctggtatctagaggaggaacaagccccctctccaccttgtgaatcaaccgatcagcattcgcccctatccgagactttagctcctcgatctcttcacatgtcaacatacggagggcacaccttagatttctcgatagtgaacacgccttcgcatgtcaggttagcaggtccataccacttgaacatgttgttgatatcgtatcgaatcaactggcggaacttctgcccgtcgcacatatccacgtcgaaccacgccacgacccatctgacgtaatcttcagggtcgttctcttctcgccatctgcactctagatcaacgtgactgggctctagaacgtaaatgtcttcgaaccctgtactctggttgttcttaagtcggatgattcgagcgcgaatccattgcatgcacctgcggtttgggtctgtgatatcgcagactaccggaacctctggaacctcaactgtatacatgattgtacctctatttgttttacaagaacgccatgattctgtctctgtctgcatggcggtacagattgaagcaaggcacgcctctagaggacgccagttgccaagcggtcctagtcccgccttctggaatcccgttgtggtctgtcttgctccagcacaccaagaacttgctaggcgtgttgagatcgattcccagcacttggaaaacgttccgagtgtgggctcgtcttgcgaatggactcagaacaggctctccatcatttctgacagagttccaagctgggtgtatccggctagcaatactcccagcttcctcccactgctccggccactcttctggaaggattgtagctcctagagtctcagttatcacatactgattgaacccgggctccggcagatagatttctgccgtagtccctcctttgttattggatatataatccagccagccagcctcgaacgctgaatccgctcccttcgctcctcctgaccgaagaataaaacctcgttccgctagtttacgacctagctctctgagaatgccccactccttgttaggcgtatctctacttccgactcctgtataatatctcatcgtctcaccatttgtcccagttctccgtatgtaacccagtggtgacgataatccccttcttggttggtgtactccactaacaccggatagaagttgtcttcgtagtctatactcaccaccttgcattcacatcctctgggaacagtgtatccatcgctgctcatggttaagagcattccccggtacacgtcttttatctctagctcaccttctccagactcttcaaacttgagtctcaatttctcgattatttgagcttgcaaatggagaagttcgtacgctgttaagttgtccagatcaatagacatgtcactctctcccttctagctttttgaattccttgtccagcttagctagatgcttatccagcttatctagctttttatcctgataaagctggaaagcctccgagcccggggccaaccaagtccccttatacttaattgcaccccggatcatatatcctcctattacagttcgtaaacgtatacctgaaactggccgagcgtctcctcgataagaggctcgacattgctccagtcctctccggctaaaccgcagccaatcttcggcagacctacacacaactccgaggtaggaatcgcccgagcgtcagcctctgcctcaaggaacagagacatagtgtacaaggcttggcccagtgcgtcaagctgagtgtagactcgaccctcttctcggccatagttgtactgtccgtacagattataaatcgatccgtactcgttcattgtgaaggtcagggagccgagtttacctcggtcccctttcaccgttgcttggtctgcctcgtaggcctccgggaattgctcccggatttgcttagcaatgccgctgcccatggtgttgaagcaattagcctgatgtgcaatagcgtgcaactctttgtttttgaacgcggcgagcaggtcgccctttcggtatttaatcatttgaacctctctacacttgtgtatctgatatccaaacctctcgcatcggctctgatgttatcgtacatcgagtctaatgctgcgaatggagaccagtaccctttctcccagattttaaacttgaacaatctatgtcctttattctctggtcggccttgctcgcagaaggttgtaaaatagtatttagccaacatcctcacctcctcttatacgccgttcttaatccgataacggatagattccagatcattgttcttcaaatcttccgtgtcccatttcccgtctttgaagaacgtccgcaaggaaccagtagcctcctcctcttcagatacattatctttcaactggaggaatcgcccattttgcaggtctcggtacactttcaggagacctttagccgacttcttcttgctgtcagttttcgggtctttgaagattgcaatgccttcaccgttcacttccgtgtaggtagctttcactgcgaatccgaaagtatcccgggtgttgcactggtaagtgtaactgccaactccaaacactacgttcagggaagcgaaacctttctccttcaagcgctccaagattttagctgctcggcgagtcgtaatggaatccccatagatcaaaccgatatgagaatcgagcatcttataacctgcttcattcacagtaccgccgaaggtttcccacagaacttggatagctccttttacctgcgcctcgctcacttcttcgagtttgtagccaattacatactcgtattgatcccactcagtgggaataaccttgaagtacttatcttcaaagttcagaacaaatgcatcgtttccatttactgcatccatgatatcccagtgttcgagcgactcgacaacttcaatatcacccagtccgcagataacctctacaggatcaccagagtctggacgaataaccagcttgccatcacgctccatgatctgatccttgatggacggcagaatttcagtaagcacgccccagaagtcgaagctgtctgccacgtacgacagaataccactcgggaacttacccatcagttcgataaggaatcgacgttctgcttcctcacggccaccttcaccttccccatcctgcatttctttctcaatacggaggatgttgctagtagctacagcgtgttcagtcgcaggtacggagcaagctaccagaccagtcgcgctatagtagtcctcggcgtagatagccgctgccaaggtgtccgagcctacgaacgaggtcaagtgaccaacaccgcttcgggccgcgtcttcaatcccactcataccccgggcactgaagtcgtgaaactgaacggacagcaggaagtcgtcgtagcacccagtgtggttcgcgtagtaccggcccatagctgcgtattctgcggcaatggttgcgttggttgcggtcttccaagtcatagccgaaatcagggtctcatggtagttcaccagccagtagaactcaggcagggtattcttgatagttagcacaggcacgcccataggaacgctaacgccctcggtcaaagacttaacctccagaggcagatagccgagcttgtgaagggcgcgaagctgctccacggcttccatttcccggccaaaatagccagtcaggaaccgggaataccggccaacggcgttctcttcttcagccgcgaagaagccttcccaagactctacgatctccatccaagcggcccgtccgccgacccacttgagagtgccgtcgtagaagtcggtggcatgcgtctttcgataaatcttatcggagcgaggggtcaggttgctatagacaagctgagttccttccgagtacatggagccgtgtccaatcttgtacccatcagtggaaagatgcggcagaattttcatgttatttcctcctgttgtgttgaataggcccagactacatcaatctgggcctcctgtcaatattcgacttcttctactggcagcgtcagcacagggtagatgcatggaaggcgcagcaatggttgcttcttgctgtggaagtcttcccaaaacttatcgtgcatcgtcttgtaccgagcgtccagttcctccttggtgtcgaactcctccaccttgacaaccctcttctctggagccgaacgcttatactctacaatccagatactcaagctcacaggcgttccgccttggagtattcaaccggaatgacagtcagcgcttcgtgctctttttgagggagcgtatccgaggtgtagatgcatccgaaggaatccagcaagcagtcgatacccttactgaagattccatgagtgacgaacaggtcagggagcactttactgtactctcttagggccttagacacgcttcggaatgtagcacctccgtcacagatatcgtcgatcaccagaagcggaagttcaggatcgatatccgaaggattcagaatttcaaagccttcgattttaccggtctggagatcgcgcttcttattgcaacgaattacagcggctgctccggccttctttgcaaaatcctcggtccgctttgttgctccgatatcaggggctacgagttgatattgctcccactctgaacggctcagtaggccaccgaagaccgaagattgacggacaacttcgacgttgttaatcaggtgcagagttgcgtcgctgtgagggtccacaacgataactcggtcatatccggcagagttcagcatgtttgcaaacactttcaaactgaaggcgtcgcccggattgcaccgacggtcttggcgagcatacgggacataacccagcagaagagtcatgtgcggattaatcatttctgctcggatcgcctcggtgacgttgagaagagccatgatatcatcactattctgaatctgagctttaacgtttacgaacgcatggctttcgatgccgcccacattaacgcccacttcgccgcccgggaacgtccacacttttgcctcttgccacggacggctcataacaccttccatttcctgaaggcaacctacagcataactaatcatacatcctcctcacagtttcacagagaagcgattccgcattgcttccatcgtgctctcgggaacatcgtgtacagacttattcccatgacgattctctacaatcagagagataacagtgtagccaaactcttcagccatgtcaatgtatggtgctacctctcgctcccgggtactagtattggatacgataaccgcatctagtcctatctccatagaccgtcgcgctttgtccatgcactttttgtgagattcaactaccctctcagctttccacacatacttgccgaactccatttggtaatcgtccgcttcgcagatagacgcctgccggcctgactcccaagttttgttatacagaatctcggcaagagaggacttcccggagcccgggagtcctcgaatgatatacatgatcttttcttgcatacttcctcctttaaattcgagccatatcgaagtaggtttcgatcagaagtcgtcgctgtgcatcggtcatttctgagaaccgagcctcatccacttcatttaccaagaagtctaccagaggatagaactcttcgtcaagcgtctgcttgaatccagccgggtcttggtacatcgcattgaccttcttactacccatcctcatgataaacttcttgccgaggtagtgagttgacttgcacttcactgtccctagccctgtttgtaccatgtaaccttctttctcacaagaactcagaagaccctttgcatgttcccagctacactctatgtgctctggacgaagaatctttacagaactgtggtccgttacacctagggcgtgagagtcaagaatatattctgaaagctggcccccagtgaagatatcgcggataccgatcaaatatgccccttcttcttcctcgacaatgtgagggtcgtctggagagcatatctcgaagttatatgtgaagcctgcgatgtaatcatctgggttattcgacacatacttctgaccaagggcaacgtaatcgccggtcaatgaccccgtagtactgaagataagggagccattgtgcttagtcacggagaacatgaatccattcactttctcaatcagccgcacacggaatttaggatggaggaaactcccagcaccattctctcccagattaaacaccttctcgaaggggcgtacaatacaatcaccggagtgctggtcaaatacatgaccccgtgcctccagaaggagcggatgctcattccacaggttctcgtagaacaccttccgggcatactttataatcgacataccgttgaagtgcttaacagtcaccagcttattagcgatcaggtctttgtacattgcaatgttgagattaccttccatcctacttctccttatttcaattcgacaattgggcagaatttagccttctttgcctttagatacgataccagaatcccatccttgctggacgatttactcgacataaagcgagagaatcggtagaaaacccacacgccataaaagacggcgatgattccaatccatacaaaccccatgacagccagagtcccacctagaacatatccggtaagtggaccgagagccagagaatacaatacagagcctacaacagcagcgagcgctacaaccgttaacgccagccacacgacgaggaatactgtctgccagaaataagagcagagggttacaatttgccaaccgcttgagatagccgaatagaccggggtctcgaacgtacgatggagccgcatatgccacgaattcttatcaatcttcatgcttgttcctccgggaagatgttgaagttaagtacgttatgctcttcaagttccatggaggctaccatcttataacctccgagcttgtgaacgatctccagtatactctcaatagagaatttgtcaacatgctgcttcatcagattggagattcggctctgatgggttccacaccgctctgccacttcccgttgagtcagcccagactgagtgatgtagtgtgcagcaacaaccattacagttttcttgaaatccttgaccggatcattcatgttagtcctccttattgctcagcgttactttgccatcgaatactcggaattgagcgatctcaaactgatccgtccagcgggcgtcctcgaaagccactccttcaaaagtcccgtcttgtttaacatcagaagtcatgaggacgataaaaggaactccgtcgtcatggatcagttccaccagagtgttagctttaggtttaacatcctccttgtcacgcgaaatcaacacattgaccattctttcctccttttatttatggtggtctacaaccacaaactcttgctctcgcatatattccctcacttcgtcgtaagagaatacctgatgatctgggtgattgtcaatacctacatcaaggcgcttacccttggaaggcaggctgccgtgagtgtggccgtgcaggtgccaagctccatgatgggcagtattccacgtctcgaaaggatagtggcacatgacgatcttaactccgtcaattcgaatctccttgtactcacgaatgtcttctacgtgagagagattgctatcagcgatcaacttccacagacgagagtcgcaatgatttcccttcaggaaggtgatacggccattcaactgcttgatgatatccagcacaggctgtagcttgttctttcctgcaaatgcgaagtctcccagatggtacacttcgtcaaaaaggcctacccgggagttccaccgagaaataagctcctcggtttgctcctcaaaagtccacggcctgttgcaatactcgatcacattcttatggaagaagtgtagatcggaagagaaaaatacagacattatgcctccatttcaaattcgtaaattttgttaatcctgcggatgagtcgcatagcggcccctcccagcagatgttcacgctccggctccatactagccatagccttgaactctgataacatatcccgacgctcgtagtggaaatctactacccagtaatggtccgcactaatcttaccctctcggtacagatgcccttcgacacccagccagcgatccactgcatctctcttcagtagctctttcggagaccacttgtctacaccccgcaacttctcgaagaaagagtaaggacgagaatagttgttgatggcttcctctacagccgactcagcctgcaatttaatgaactcccatcttgcaagaacttctttaatctcctcggtggtgaccggggtgtagctgtactgttctttatattcattccacactgtactgttctcctacatagcctttgaatttgtcggaacgagttgtcttcttccgtgccttgttttccagaactgatgcctccctttcgagcatgctcagttggttgctatacttcttgatccgcttcgagttaccactcatcacagaatttgtaagatttgcgatagtatcgcaaattttcacttctcttgcaaccggatgattacggcaagcttcgatatacttacggtagctctcagcacggttcttatcgagaatgaccaaagcctctacgatgtgaggcatcacgcccatggactccaagtcttcctctgtcaactctgtatcctccagaacgtcgtgcaggaagcacacagcgagaagagtgtccatgtacggaaggtcggagaaagcctgacccgggtccatatctttaggagcgttgcgggccacgcagactgtatgcacctgattcagatggtaagcatacgggaagttggtctctccgtaccgctgaccttcgtgagccgagagtgcgatctcaatagcgataccaagctgagtgttcatattagtctcctttgtagaatgtgtggttgcctatcttgattgtgcgcttgtatttcctagcccaccgaggaagcttgccattattagcccgtctcaccttcctctcgttgaggtagtgatcggctcctctcgttggatcgacagtatacccatatagggcgttgtatgcaacatgtttcgctgcctcccacttgtcaagctccttgacaccttgccgcatactcccatcgcaggtgtaggaatactggcacttgaagtagagcactccggctactgtgctcggccacctgtcgtgcttcattctgttcactacggtatgagctacagcaatctgaccgatctccggttctccccgggcctcgaagtatacagcttcagccaacaacctgcaaggctttctgtactcacacaaggtgcgcttgctttctatgatttgaccgggactggcttggaattccactacaggctccgtgccgtattttagacgagagtattccatgtcgaggaacatcccaatgaaggctagaaggatcgacaaaacgagagcttctaaggtttccataacacctccttagacaaagaagcccgccttgtgggcgggctgtatatcactcggctattatacttcagcccaagttgtaacgacgggcgtagtctttgttggggaactcgaccatcatcgactgaatgtgaatgttgcctttacgatccttctggattttggcatttttcacaatcttactagcctgcgcctttgccataagctctggacttacaaccagatcgatgaattctgcactccgatacccggcaccagccggggcccagaagccgtactgggtcaccgtcgatgtaggtacaaggtacaggttgtgcagacgcaccgcagtgttgaaactcagcttactgatgtgcttcgctccccgggtttcagtttcaaaacacccagtcatgtaattgaatttgtaagtgagagcatccatgaactgaatgacacttcgaatctggatagcagaagtatccaagagctggaatttctcagcagattcgattgcagtggtcacattgacagacttagcgttgaacattctatatcctccttattcttcagggacaaatacaccgccgattacccggccagcgcgaattagtttaccagttgggaactgagcacgcaaggtctttttgaaacgactttgaatttgcacagtcagccacttaccccggtagttctcaaaattagtgatctggtctttacgggcttcaaagtcgccatacgtcacctcaagcatctcttgaggtacagggtcgaacaccaccagaacagcgtttccattcttgtcaaccacgtagttcacgatctgcatttccatatcgaagaactctttgtacttctggagaccgctggagcgcttaccagattcgtacaagccctctgggctgcgccacatgataccctcataaccgttctgacggtacacatcatgaagacgtttcagttcttcaaaggtggagcagaatacgtactcaacaaaacgaatgctccccagaccactgtgtagtgcagactggaactggaagtctaccagacgctccttaaatgtcaaggcatcttttacgatatcgaagacatggaactccatccgcttacgaagaccgtaaataaaggacgtgctgtccacttccttcaggagacgatcatactcctcctctccgttctctagagggtaagcttcaagagctttctcggccttcatccacttatcgtaagcatcctctcgcttgaccgccgagttgatatcctccagcacctcaccgtggacgtacagttcgccgtcccacacatcaccctcttgcatgatctcttcgagttctttgatgatgtgcggtacgttgtaaggcttgcccatacgagacgctagcgtcaccttgccgccgaccttcttagccatgcatcgcagaccgtccagcttaggagaaccatagcctgctttatacttcgcaggatcgagcggcttggcgagcatagccattaccggcagatcgttgagttcttccttggttgcacgataacccttgtccaactgcttgctcaccttggactgagcctcagacacggcctgctcctctacagagcgtttctgcttgcccgcacggatgttggtaacctgagaggtcatggctccatgttctttgccgtatttcacgacgatattgaagctaccgtcttcctctccggccacctctacagtccactccttgaacccgcctttcttgtcgagtccatacagtcgttgaaaataactcattgatcctcctcgtatttgatgacaagaacatcattctcccgtaggtgcctaagaccttcgtcgagccgatattcgtgcttatagtacactactttgatcccagcttcaaccaccgagatagcacaatttttacagcaagagtgagtgacgaacagggtagccccttgggcactctcagggctgcgtataagagccctcagtgcgttttcttcggcatgcctcacctctgccttggttactcccgtttcgtcctccagcggcccgtttaggtgctctggaagggcattatacccgcaactgatgatacggttacgttttactagaactgcaccaaccttggaacgagtcgagtcgctgcacttagcgaaggcctcagcggcctccatgtaagctttaatatgcttgaccttcacgactagcctccaattagaaccgcgatctcctcgtagtacccctcttcagggcacgcgaattccatgtagtactcgtcagtgtctgtcaaatagacaacgctaggcgggtaatagctccaagtcgggtctccgtgttcaatctccgctaccttcaagttgccatacacagtgcgaagagtctgtagagcctcgatcacatcgtctatgcgcattacagtgggttcagtcggttcagtcatatctcctccttagttttctactttacaaacggcatcgccccggcgaaggaacacttgcactgatggctttccgctccacttgtcccacgcttcagctttaacactgacagtcttaggattgattgcaaccacctcgcctaccagcataaccattccagttccgcctaggcagaatgctactgcgtcgccgatctcgatatcccttcctgctacgtccttcatttgtactctccatctgcacccttgattaaaataacgaagtcagagggatcatcatcgctgccgtaggcctttgcccgaaactcctgctcgtatttattcacttccgatggctcgctactaccttcaagggtactgtatagctcttgcatgaatttcccaaggtccgtggtcgcatgtgttgccgacaggtagccaagaagcgctaccagcatatcaatctcttcgctctccagctccaacttgtaaccatcgtaatcgtatactttcatatttcctcctatcgcttctgtccgcttacgtcaaagtacgatttccattcttctccgaatagttctctacccttatcatcgtagactttatgagcctcttctgctgttttatagcaaccgaggtaaattctcttaccttcatacctgatccgggcaacgtacctgttgtttctaaaaaagataccgggatacccgtttgtattacgggtagacgcgggtttattctgctgctgctccgagtccgtcgcccaccggcaattagacttgcaatacccttttgtcgagtcctttctatcgagagtctttttctcgggtcgttctcccatgtcctcatagaacccctcgaatgtcttccacttaggatcgatggtaacatccttataatatttgtaactcttgtgctttgggttcgtacatctgtcgatcattgtcctccaagaattgtatgtcggagttccgtacattccatgggaggatagtagtttagactgcatgcacccgcaactcttattatctcctaccttgagtgctccagttctaattttcaaaattgccccgcagatgcattcgcatagccaaagaacctctcttgaattactcctcgctccagagtctccgactaccctgagatatgtgaatgtctgccctgtcaggtctttaactgccatcctacctccttacttgacgagtggctacgccgtaagctggcttgctcccctcgcccgtgttgtgtttcttctgcgctcggctggcattgacggtgtaacgtcctttgccatactcttcgtctatccacgcttgagccttagctcgctgagacgtgtggacaaagatgtagtagccagatgcatccttgatgaaccaagtggccgggggctggaagtccagcgccgaaaactcttcgaacgataccacagtcaccttctgctttgcaacagtgtattgaccaaatacagtctctttgttacgtagtttatctagcatctgagtaaagagatcagtcattgcgattctcctttctcggctgtaaacgagttcaagctcaaagagtgataggtgttaattccgtagaaatgcttgttgcacagagcgttcactgcttcttcgtactgctcttcttccagttgccacacagtcccactaattgcagagagtatctgctccctgctcggcttgcttccgacccacagtcgtagcctccagtctggttcatactcctcttcccacacaagctcccacacttccacttcaatattttcagacattcttacctcctttccctgtatctacaggaatcttatatagacacatatttctctttccgccctgatacctaaagacctcgtcttctagaaggattttgggtacttcatccagcagtacatcctctagaacccctgatgccttgattaccgtccgaagctgtgcctcggagggcggatttacagaccacatgccgagtcgttcatctgcctcgtacgcctcctccagaataagctcccatacttcgatcatcggtaaacctccttcttccggatattgtagattacccacttctcttttccagagactggacacgtaacgtccaattcacactccgtgtttgtcaggagggaagccacaacatggtccagtgtctctgcatccggagcaggaagtcccgggtaagtcgagattaccttacggattgtatccgcattagtattgcccaagacacctatgaagtggagatcaaagtccgctgcccagtcatcccactcttgtccaaagataacccaaacgtgattcatacgccctcctcagaatttacataatacttcttgaccgtcgatgatctcgtatttgaggccctctcgctcagtaaaaacgcgaagtctgattttcttaacgccccggtgcacaccctttttgaaggcatcgttaacacagtctctcagtgttctaaacggccctgcaatattacagaacgaacctccggaacttgcccacaccgacaagtagcctatctgcctgtctctgtagacataaactccgttgcgggtcatccgctgaagctttcttttgagtctgctcatacacctgcatccctttgcatctcttcgagacactcttccggcatcacagagagtgccagctcttccagagagtgaatgtagtcctccaagtaggtccactcccggagcaccttctgaaggtacacaccctctttgctgttgtcaatagtctgtcccttcagttccttaatcaattcaaacatcttgtataccctcctttaggcgtaaaaatggccggtgactactgtcccggcctgataatactactctgaaatttcttccattgcaaggcgtttcttatcgaaaaattccccgagtttcgtatccagttcgtctcctccgatgtagagttcttcaccggctttgactcgctccatttcgctctcagttaggaagtccttataaacatactctagccaacggtcgcaccattctgtgttgaatgctgcgtttcttaggctgtttttgtagtcagcgggaacgactccgaaagatggagcatggatcataaagtatgtgaactgatcgatcgacacggaatcacaagcaagtgcaattgccgtcattgcagatgcacactcaccttccagccgagcatgaaccggggcttcacattccctgatcgcacgaatgaggacgtttgcagtctcaacagacccgccacaaccattgattgtgatgtgcacctcgtcattatgacctgcgttttcaagagtccacagctcttcagttaaggtctctagcttattgatgctatagggaaggacgattgagtatctgctaacaacgctctgtgtacaagaaacaggcataacacctcctttaataaaaatggggccataggccccttggttgttactcttcggtagcagtctcttggctgtggttttgacccagcatagcgaagaacggtagaagcacttcactgagttctgcactgatggcctcagctacttcagcgcctgcacgagatacattaatgaactcttcggtctgaacgtacttgtccaccttcacaagtgtcttgaactctacacgctccaagaatgccttgcctgcggcctctgcgagaggttcgaggtttacaacctccagcgcacgatctagagcgccttgatcgatctccagaccgttttgagctgccacatggttgagggtagcttttacgctctgtacagcgtagttcttgaagaattcacgttgagctttgttaaatttcattcacttttctcctttgtagtacgacgacggcgggttttaggtttttcctcttcagaggaaacttcctctgtttcaatctctttcgtatcagtctctgcctctgcctctgccttcgcctcctcggtggtgacccgggtcatctttacggtcttcatggcgaagctcatattcgcgaactgagggtcttctttgtcgattcggaagccttgatcgaaagcgttctgcatgctcatcagaagactgaaaacatcccattcttgcacaatcacttcgcttccgtcaagctctttttcaatttcatgttgtacgccgtcttggcggaacatttggacttgacagagggttccgtacaccgggtaaccttcaatcgaacgcatgactcggaaaccttcttccatgtgagcgtgaacggaccggagccacacgattgggttgtactcgacgatattaacaacttgcatattctttttactccttgcgggttagtgttttacaataataccacgtttctcaggaatgtcaacccattttgttctggtaaaggcttgacatagaggaaatctgtggtattatcaatattcagcgtgggagagatatgtctgaaagcactcaccggcccacgcctagcgcctatgaagaggaatccacaagggcaacctgaactcgaatgctgttaaagggtggagacgacgcgaaagcggaatgacagcaatccgatgcagcctacatgctgcccctcaccgaactcatctgcatgagtaagaggaattggatagagccaaggcacgtcttaggcagattaaattctgtatggcgagccttgggacgactctatccttccctagccgaatctatctgcatggggtgttctcctgatacacatacacaaatacccaccacagataatccatcaatcaacccataaggaatttctatgagatgtaagtgctgtgatagcgaactctcgtttgagactccagtcatcaataaacatactggtaaggaagacgatctatgctcctcttgccgtaggtttgctctcaatcctacactggatcatgagtattttggtggttggtatccaagcgaaggagttaccgctcctctccctaccggggactaacattgtatatagagtgcgcgtactctgacaatatgtataaatagtagattacggtgcgaataattctttaagggcttgacaacaggagatttcgtgctataatcggagtatatggggcttacaaagcttcagaggatttaatatgactcaagaaagaaacaagggcggtcgccctacgaatgccgagctagaagcccggggtatcattcaaacagacctaaaagcaggactcagacttctaaagaagagctttgcagagaacattaggttcctacaagagcaatctgacaatcctgaggtttctctacaaatgagaatcaagctcaagaaagagctttctgatatgttcgtcgcttactacaaagctgacattgcactcaaaaaagagcttgcaaaaggaacagaatcaggagataatgagaacactgaagaggacaaggctcccggagtagttctcgcgttttgattaattgccgcttcgttcaatggtaggacgccagactttgaatctggagatgatggttcaattccatcagtggctaccaaatgtggtaaaagaacattcacccgacaaggaatgtgtctcgctcagaggacagcgagtaagaaatgtcctccagaattaagggtcggtgagcgtaattggcaacctactggattccaaatcctcgtattctctgttcgaatcggagtcggcccgccaaattatatggaacttgaatccttctgggaccaagttcgcagccggagagctaggctatgctgctagcgaccgatgttctttagagactcggtattctctccaattggtgttgacaggagagtaaggctcctgtatagtgacacaaattgctcgtatagtgtaatggatgcacaacggtcttctaagccgtaaggtctaggttcgagtcctagtacgagcgccaaatttaagatggacggaagctaaagtggatcagcatctggcttttaaccagacttatagtgagttcgagtctcacccgtccaaccaaatttagtgagtaaatcagataggttctgaggctccctgctaaggagtacgtctgctaacgcggatgtggatcgagaccactgctcactgccaaaatcactgccaaaataagtgattttaagtgttgacaaactgaatttttcatgttttaatacacttatcagatgaagaaatacttagcgagtagccctgagtaggtcgggaactagtctagaaaactaggccgctgtgatgaacggtgagggttcgactcctttactcgctgccaaattaaggccctgtggtggaattggtatacacatcagtcttagaaactgacgccgagaggattgagggttcaagtccctccggggccaccaaattaagaatctcttttgctatttggttagggttcgagtccctacccggtcacttaaggccggtctatggcggccaagtagtgagagagctaggggactgacgaaggtagcgctgctttcagacctccccggcgctataaaagttatcatgaagggggttgacaaacaagaaattcatgataatataggtacatagagtaacaaacaatatagccggatagctcaattggtagagcacccgaccgataatcggatggttgaaggttcaagtccttctctggctaccagaatttacaggcccattagctcagtctggactagagcaagcccctgtctagggcaaggtcgtcggttcgaatccgacatgggtcgccaacaaggtcgttgtagagatagatggctactatcatccggctgtaacccggacgccataggctagaggttcaattccttccttcgaccaccaaatagcgagagcgttaagactggctggcgctgtcactcggctcataaccgaacacaagtggttcgattccacctctcgctaccaaattgcactccgaggaaccctaagtggtgggttcagtgtcgctacctatctcggtaaggggaagcgcctaagctggcacgggtaattgagtagctgtgataagctactggcagccagtataaatcgtccggctcgggcccgttatagctcctagatttgaattagatgctgtaagccataggaggtgatccagtatctcccggaggggcccgggttaacaacctcatgaatttagcccgcgttggccgagaggtttaggcggcggattgcaaatccgtctcacatcggttcaaatccgatacgcggctccaaggtttatattgggatgtagctcagttggtagagcagggagctgttaactctcaggtcgcaggttcgaaccctgccgtcccagccaatttccaaaagagactcttcgctttagaagcagagtcgaacgcccgatacgggccttattatctcctcgtagctcagtctggttagagtgtctgatttggaatcagaaggtcgaaggttcaaatccttccggggtgaccaattaggagtacatagtgaagatcaaatcgcgtgtatgtccagcgaagactgagtatcatcgcaaacgaaacaaatgtccttgctgtacgcggcccaattacgtaatggagttgaggcgtcgtcaggaactcaaggaagcgagacttatggtgtctctagtgtaaaataaaagcgggtatagctcagttggtagagcgtctgccttccaagcagttcgtcgtcggttcgagtccgtctatccgctccaaacaatgcatttgaagctaactaggtagaagcgctgggttgaaattccagaggacttggatcgttaccaagcagatgcaccaaataaagcagttatagattaattggttgaaatcgccagactttcaatctggtgttccgggttcgatccccggtaactgctccaatcaagtccaagccggaacattcctccgtatgtgctttcagccggcttggcattattcgtgtggagattgtgtagcccggatgctgcctttcggttgtgacccgattgttggggttcgagtccccgcctccaaccaatgtcgtgcaatggtatatcgcgttgacgctttaggctctctggatcgtaagccagtaaagcgagaatagcgggctctcgcagcagagcgataggtggttcgattccacaacatgacactctttcctcctcgcctgtgctgaacggtttcctcctcctttcccgtctcacaggctctattccctgccctttaagcatttatggtgatgcaccggctttgtaacccggcgaattctgttcaagtcaggaatggggcaccaattcactatcaaagaacccgcaagctcccgatagggttcacactctataaggttgtagcatggaaaacactaaggttcctgataaaaaactcggaccaatcgcgctagcgattaaagaggccagagagaatttcgatctcagccctcatgttattggtccaaaatctttcaaacagaaagagttcacagacagcgatgcaaagatcactgtattcggtggtgctgctggtgctggtaagtcttatctcggtgtaatggacttcatgaaatatatccatgatcctaacttccgaggtgtaatgactcgtcgtactactcctcagattaaaggcccgggcggtctgcttgaaaaagcaacagacctattcaagctcgttgaccctaaagtcaagtggaaagacaaagacggcaagtttgtgttctcttctggtgcagttattttccttcgacacttcgaacaagaatctgacaaagactccttccaaggttgggaggttagtaagttcctagtcgacgaaggtcagcagttcacagaaggcatggtgacataccttatctctcgtatgcgtaacccgaaatgctcggttgttccgcacatgaagattacatgtaaccctgattacaattcgttccttcgtaaatggattgaatggtggctagaccctgacacaggaatcccgatccctgagcgctccggcgtaactcgctggtttgtacgcaaaggcggtaagatgttctggggagacaccaaggaagagtgcattgcccttcatggtaatcccagtctagcgcctgacgatgaagatcaggtgaagcctatcagcttcaaattcatcgcggctaactgtttcgataacccaatcttgatgctcaacgaccctgagtatgtagctaaccttgaagcccttcctagggtagaacgtgaaaagctcctagacggtagctggcacgctagagaagagggagctggatacttcacaagggactggtgccaaatcgttccccacccgcctctacgggtgcttaaaagggtacgtgcatgggacatcagcggtagcatcgaatccgaaaccaacagaaaccccgactggacagccggcgtgctgatgagccgtacaaaagaaggcttgttcactgtcgaggatgttgtcagagagcgtaggttgttcggaggtgttttcgacctcattctagaaacagccaagcaagacggtcaagacgttgaaattcaaatcccatgtgacccgggggctgctggtaaagcttatgctgcccagctaattagagacctagcggatcatggattccacgccagaccgaagacaactaacaaatcgaaagttactcgattcgccccgttcgtatctgtagctgaaactaaatcagtgcaagtcgttgcgggagattggaacgaagattacttcgatgaacttgagcgattcgacggaagtaaggctatcaaagatgaccaagttgacgctacatcagatgcatttaatgctctatcccttggcagcttgattatccctgatttcctaccgcctgatatgactcaatccaacaaattcaaactaaattaataggaggcggcgatggccgagactgaaaagacagcaccgggtatcccgcgacttcgcctaggcgagattggtagtacaggccttaaacaagtcaatggtactattctggaagaacgccgaccagaacttcggttccctagggcatgcagaacattccaaatgatggcagaagaccctaccatcaaatcagctcttgatctcttcgaaatgatgatgagcagggttgactgggaagttgatctaggagttgaccccgacgaggctatgaaggcccgtggtaaattcctgaaagagtgcatgcatgacatggagcacagttggtactccttcatcaaagaggttactagcttctacacctacggattctccgtacatgaaatggtgtttaagcgacgtgaaggataccctgtatcgaagtacaatgacaacaaattcggtattaaaaagttgccaatccgctctcagtctactatcaccaaatggttgtactctgaagacggtagaaacttcctagggtgtgagcaaagtcttgccaatgttgtcaatggcgaccgttacgtcaacctaggtaataaggacggaactgtagagattccagctaagaagatgcttcttttccgggtcgatgctaaacgtgacagtcctgaaggtaacagccctctccgtgcgtgctataacgcttggagatatcgagtagagattgaagagcaagagtccgttggcgtaacacgcgatatgaacggtatgcctacgctctatctgcctcctcgatatatgtccgaagatgctacagaagctgagagggcagtctacgaatactacaagcgagtaattcgtaacattcaaatgaatgaacaatctggacttatccttcctcaagcgtttgacccagaaagccgacaacctctgttcaaattcgaactgacctcttcgcagggcagtaagatgtatgatacagatgccatcattcgtcgctgggacaacaaaattctgcaagccttgtttgccgatatgctgaagatgggtcaggaccaagttggttcttactctctagctggtgccaagactaacatcatggctatggcgattgaatcgcggctccgcgaaatcaaagacgtactagataataaactcattcctacgctgttcgcactgaacggtgattatagtccagacttgccgaagctgcaatacggtgagctagatgaaatcgatcttgaagagttctcgaaagggattcagagaatcggttctgtcggtggtcttgaacgtgaccgtgaggtttacaacaagattcgcaaagctctcaagattaagcctcgaccagacgacgagcctgttgatgtggataatatcatgggtggtcagtctcaagcaggtaaagctggagtaggtaatggtgcatcaacatccgcagccggtagagacaacgccgctgcaaataacgcataaggagacagaatgctgactcttgaaagtgttattgaagctctcagcaatgctttcggggctcccgccaaggcggaagaagccccggctgtagaggtcacaaagtccctagacaatgaaaagaggatggctttgtttgtcgttcttgagccccaagaaggcgactccacgactgacctacacgcagacacctactccgaagaggaagtagagaaagcttgcatcaacttcaatactcattgcaacgtagctaatatcttccacaagattgaaacacaggaagctgagattgtccagtccttcatcgctccatccgcattcacaactgacgacggaagagagatcaagaaaggtacatggctccagtggtggcacttccctgaaggctctgaagtagccgatgcactatgggaaggcgttaaatctggtgaattcacaggcgtctctatcggtgccagagctacagtcgaggatatcgaatgaccgtaaaagcaaaacgtaaactgaccgatatcaagtttgaacacgaaggtgctcatgtcgctctggtcagtaagctccaaggtggtgcagccaacgggcacactactctaatcacaaaagctaccaatggcgtaactgaagagcttatcgataaagctgctgaagttacagtcacaatgcagttccctgagttccttcgtaagttcttcgggatgtattatgaagatgccgaagttctctctgttgccatgggatatggcagaacggagtatccagaactagatcacaaagactggatcgaccagcgggtcgagtctatgtccattcttaagtcggtttataaatcggctgacctgaatcaagctctctccgagcttacccctgagcagaccctttcccttaaacaggatcaggaactgcttgaaaaggctctggaggtagtctccgagcaatccaatgaaaatccatccaaggagattaccaacatggaaactatcctgaaatcggcccacctagaagctctagctgacgctattgcagttgaaaaagctgctggtgtcgctgctgttgcagaagttcagaagcaactagacgccgctaatgtagagcttacagctcttcgtgaaattgtcaaggctgctgaggcagagaaaaccgctgctatcgctaaagcccgtaaagagcaactggctgaagtcctcccggctgaccaagtagaagatactttcaagtctctggaagttctggacgatcaagcttttgcacaaacagtaggaacgctccgcattcttaaagctgctgctgaccaaaatgacatgcttgtcgagaaaggtgtatcgggcgctggggaagaagacgactctgttgtcgccggtgttgccgctatcctgaaagctcgccacggctccaagtaatatctagccaatctagaggaattccaaatggctcaaaacattatcgcaaaagatcatcagcgtcttagcaactggctgaaagaagaacaaatgggccaccgtggcctgttctacactcgcgaaactctgcctgtcgctgacattgatgttaaaacaactggttctgtcctagacagcactggcaagctggtaactaaggctactatcgccgacgctacctacatcctaattaccgacctgcacgactatgccaacgctcagatgagccacgctgtcgtccttgctcgcggttttgccaagatcggctccaaggctgttatcttcggtgctgacgttgacgacgctgataaagctaccgtctttgaagctttcaaagccaagaacatcttcgccgttgaccagatcgaaggcgcattcgagaacgttaccttcgcgtaagcgagggtcgttccagtaaataaatactaggagtaactttaaaaatggctaacacccgttcctacctaaacgatggtcagttctacattgccgaccagactgaaaacctgcttatcatcccgaacacttggaccctcgtcgagaacatgggcgtcttcacaagtgaaggtgtgactcagaacactgtccagttcgaagagatcgaaactcgctacggtctggttaaggatgccatccgtggaactcgtcaccaagttgctagcgaccaacgtcgtcaactgcgtgccttcgcgattccgcacttcaaccaagacgactacatcactccagaagatattcaaggtaagcgcgctttcggtgctgaccgcgaagaaactctgaacgaggttcgtgctcgtaagctggaaaccatccgtcgcaactgggctaacaccgctgaagttgcttccgttagcgctatcgtaacaggtaagagctacgccccatccggaaccatcgagtacgactggtacgacctgatgggtaaaactcgtaaggttgtcggcttcgacctgaccaaccctaccgctgacgttatgggcaagaccgaagaaatcttcgtccatatgcaagacaacagccaagacggtctgatccgtggtgacttcgttgccctgtgctctcctgagttcttcactgccctgattaaccatccgagcatcaaagagttctacaaagcttaccaagctagtcctcaatactggcgtgaacgtctaaccgctcgcggtctggaccttcgcttccgtgagttctacttcggaaacattcacttcatcgaataccgtggcgttgacccgtacggcaaccgtctgatcccggctggcgatgcttacttcatcccaaccgacagcggtgacctgttcgctcgttacttcggaccgggcagcactttcgatgacctaggaactctgggtaaagaactgtacgctaccgagcgtatggctgaagaccgtcgttcgatcctgatcgaaaccgagtccaacttcatccacgttctgcgtcgtccacagatgatcgttcgcggcactgtgaatgcgtaaagacttcagggaggcttcggcctccctttcgtcgtaggagggtaccaaaaatggcttacactggtgatccagcaaacaaccctatcgaccgtctacgagagattgtaggggacgtgtgggagcctccgatgctttccgacgaaacctatcaatgggtgttggacaagaacgaaggcaacgaaagacgagccgcacttgaacttatgcgtatgatgctcttccgcctgacaaggggaatgagagaacgtacaggtgatatcgaagtatatggtgctgagtatttcaacaactacttgaaagctcttcagctcattctcaaagacccgaatattacaatttctttggccgtgccatatgctggcggtatctccaaatcggatatgctggctaatgacctagaccccgacaacgtaacacgggaattctacatcggttttgcaagacgggagaagctttacaaccagtgcaaccccggtcctcaagaccttagcatggggtgtgattatcttggcaagcttcagttttaaaacagatcgccgtcgcctcacatccttgattaagagggtggaggctctagacggaacaacggtagaagttggtttcttccccgaggaccgatatggttctgaaaatggaaacctaccagttgcacaagttgcagcttacaacgaattcggtactactcgcaacccaacccggccattcatggctccaacctttgaagaattcacatctcaattccactacgcaagactaatgaagtctacgtttgaaaacgttatccgcgatggaagacaggttaatactctcctgaagaagctgggcagaatggttgcagagcagatgcaagttaacattgacgactacccgggctctaacagtcccgcatgggcagcttacaaagggttcaacgatccgttgttccatactggcaagatgcttgagtctgtcaagttccaaatccatcggaggcaataatgctctatcctaccttctccatgaccaactttgtcaagctagatttgattagaagagggcagcccggagacgacggttttggaagacctacccctccagttgagacagtagtgacaatcacagctaacgttcaacctatcgaaaaatcgacagacactcgtatccttccagaggccgacagaagcaaggcttgcttcaaggtgtactccagaggcgaagagattcgccagttaaaggaaggaccgggagggtggagtgccgatagattcatgtgggaaggagagttgtatgaagttatgaaagtcatcaactattcgatgggaatcctaaaccattacaaagcaatttgtatgagagtagagaggaatagtacagcatgatccatacagagctagaaaactctctctatcttatgataaaagagttgttccctgattggcgtgtcatccaagcatacacaaataatcaggaaccgcaaaccccttatctggctatcgatattaagaagctagatgaactgggaagggaaaatgtctccaacatgagcgatcccattagtccttcgcatggaactgttcaagttcaacaggacttcgcagccaaggtcgtattcgaactagttggcaagtatggagagacagcaagtgtctctgacatggcaatggcgattactcgggctctgcgtactccagcaggacacgccgcccaaagaaagtttaatctatcccttttcaaactccctagcacaagacgagttcctatgctaagagaaacagatatgtacatgttctatcaagttacatgtgaatttggattctctgtgatagaaaccacaactcaagagtttgctgctggggctgatattcacggcgtttattacgacgctggtcgcccgggtcacattattgagtcccacatcgacataaacttcgaacactaataggagacaggaatgactgttcttactgatgtaattgacattcagatcagccgtgagactgctgctgtcgcacagacaaacttcaacgttcctctgttcatcgcttctcacacaaacttctcggaacgtgccagagtctacaacagcctgaaaggtgtcgctgaagacttcggagaatccgatccaacatatcttgccgctgttcgctacttcggtcaagctctcaagccacgcagtctagttatcggacgcagacaagttccttctgctaccgtctctgtcagtgttgttcaggaaggacaaagctacgtccttaccgttaacggactacctgtcagctatgttagccagcaagacgacactgctactctgattgccacaggcctaaaggcagcttatgacgtaactccggtagccggcgtaaccgtcacagacaacgaagacggaactctaaccgtcgcttctaacgaagactggagcctgaaggtttcttctaacctgactatggctgctgctccctctactgaaggttggccggctgctatcacagcagttcaaggagaaaacgacgaatggtatgctctgagcattgacagccacgccgatgatgatatcatggcagtagctactcatatcgagggcaccaagaaagtgtttatcggagccactgctcaggctaacaccaagacttccgcagagaatgacattgcttctcgtctggttgctgccgggttccaacgtacggctctaatttaccatccaaacgctgacgctcaattccctgagtgtgcttgggtagggtaccaactgcaagagcaaccgggtagcaacacatggacccataaagctctggccgctgtagacgcctaccgtctgactccaaccgagtctaccaacctgaagaacaagaaagttaccacgttcgagcgtgttggtggtgtcaaccgtacattcggtggggctatggccggtggtgaatggattgacgtaatgatcttcgtagattggctggaagcccgcatgaccgagcgtctgtggttccgcatggccaactccaagaaaatcccttacgactctgttggtgcaacaattctggaatcggaaatcagagcccagcttaacgaaggaattcgtgttggtggtctggctgaagctccagctcctaaagtcttcgtacctgatgttctatccatgtctccgaacatgagagcacagcgtatcttcgaaggcatcgagtttgaagcccgtctagcaggcgcgattcactttgtacacatccgagggaccgtgactgtataagtctggtccttcccataaggagactcataaatggctgttcaacgtctagctacattctctccagccgatgttaccattgtcatcactcaccctgcaactggtgagagcatggttctcggcggattcagcgaagacagtatcgttaacattgaaagaaacgctgacacttacgtgatgtataccggagccgacaacacatcgactcgcgtctacaacgcctctaagtctgctactctaactgttagccttcaacaaacttcgccttcgaacgacttcctgactgctctttacaactacgacgacgcccgtcgttcgtctgagggattgttcacaatccacgttaaagacaactctggtcgttccgactacttcagtgatgacgcctatgtcggtgttgttccgggttctaacttctcgaacagcatgcagacacgcgattgggttattcatgcacacaacctgcaaactctaatcggcggtaacgccaagctgagcccgggtgatgcggatactcttcgtaacctaggtgtcacactagaccagcgctggctgtaatatagcgcttatgccacatcgacggggagctgccttaacgggtggctccctttgttgtttctggaggatagaaattgattaccacctactcgccgcgtgacgtggttgtaactctcgctggtatccattccgtgacagggtacgcagagggagagtttatcagaattgtaaaagatattaagcctttcatcaagcacggttcgatggatggtgaaatcgcaagggtctacaacaaagaccaaggctggcgagtagagttgacaatcatgcaatcctcgccgaccaatgatatcctttcgatgctttacaacgtggacattgcaacccgaatgggaaaattcccactgatgattaaggacacgaagggttctacaagcttcctagctctgacagcatgggtggaagacctacctagggtatctttctctggacaactggagacccgcacttggattctagggtgctctgaggtcgccatgaacattggcggaaacgtcgatcaaagtttggtcgagcaagctatcctgctgggaagctctcttctgccagcccttacgcaattcggaggcttctaatggctaacacggtattgacatatagcccatctgatgttaaaattgtcctttgtgggtatgctctcactggtgtagtttctttcgaaatgtcttggctttcgagaccctacacaatggttcgaggaatcagagggcaccacacccgggtcttcaatagagacctttctgcgcagattagaatcgaggttcttcagacttcggtgtctaatgatgcattattctcgctagtagagcaagaccgaagaacacaatccgcccgaatcaccttgtctgtcaaggatacccacggtagcaccatgatgagcacagacaacgcttatgtcaatggctaccctagcataacattcaccgatggaatcgagaacagggtctggactattgatgttctggactggaccgatggcacggtaggcggaaaccagcaagtcggcttcgacgtgtttggaactgttcaaggcgctcttagctacctcagataaataaggagtatttatgttcggaaaccaacgtactgtcatccacaatgggacagaatacactatcaaccttctgccagcaactcgcggtatcagcgtactgaagcagctaaccagcttgctgggtccatcccttgccaagtatcaagctgaccacgacttctctggagccatgaaagaactgttcgataacatcgacaaggttcctgttgagaatttgatccagaatctgatgctgacagttttcaaaggttcgatggcaatcaatttcgacaccgaattcgctggcaagtatgacctgctgtacgcactcacaaaagacgtgatcgagttcaacttcggctcggttttttctctaatcggtttcgcagaggcaccgacggtataaagaccggggatgggcagtccgagacttcagtcactactgatcgagttcagagtgatcggagggttagggaggcccaccagaagttctcgcagcattgggagatttatgtggctatcactcaccctctcaagctaacgacgtatggggaactgagtacagtcctcactacagaagatttgtacaacatccttgaggttatagacgttcacgatactatcactcaagtggcaaaagaacacgcagaggctgataagaaatgattacagaaaggattgcccagctaactggggaacttaaatttacagtcgattcccggcctctcactgcttttgacaagaagctcgctggggtcgaagcccggctaagagaattctccaagctgacgaacaagcggtttggagttaagctaactctagatacaaaaactctgagagaggagcttgccaaggcagccactcaaagggtagtcttgaagaacatcgcggtagatgctgccgctgttcgtcttatctctgagaagcttcaagaaagactgaatgcaacgccgatcaggttgaagtctgttaggctagaccttagcggtatccgagatcagaaaaacttcgtaaagacggctctcggccagaccaaggtcgatctaccggttgaactgggcttggctcaggctagccgtacgctgtatgaatggaagaagcgcacagagagtcgttttaaaattcatctgaatgcagacattagccgctctaaattgctccagaatgcacgaaacacactaagggatgtgcagggtaggctaaacggtcttgctgtcgctacgcctcaaattaggctgtctgtagaccgtgcccatcttcgtagagagattcaagatgttcttgagcaaatcagacgcgaagtgagaatccgcattgacctagagtcttccatccgaggaggtggtgcaggtggatcgagaggtacttccggccatatccgtcaaggtatgggaatggggattggtagcgagctagccgggtggggacgcgggtttattcccggccttggtggtgcgttcgctattatgcagcttaaccgtgcaaaccaagaacttcaaggtcagcgcctagcgatgcaagctgtcggaggcggagtacaaggtggccaagaactgcaagctaccctccgtgatatctctcaacgcctaggtctcgacgacagagcccttggtagctcctatgttaagatgatggctgctggacaggcatcggatttcagcaaggaacaagttgacagcatcttccagtctatggctgaatatggtcgagtgatgggccttgacggcgaagcgatgaaaggctctttccgagcggttgagcagatgatgggtaaagggcagattatgtccgaagaattgaaaggtcagttggccgaaagattccccgctgctgtagctctgatggccaagtctcaagacatgactatcgcggaactgatgaaaacgatggaagacgggaagcttaaaagtgatgccctgattccatttgccagaactctcgctgaagaagcccgtaaaggtggcgctttggatgctgctatgcaaggcaccgcagctcagcaaggtcgattccagttcggatggaaccgcactatcgaagcattcgccgctggcggattcgatagaggtatgagtgacttctttaagattgctgcccaaggcatgaaagaagcgcttcctctggtaactgcacttggtggcgggttcgaagctcttatgaggcctgtcaacgctctggtcggtattggaggggagcttggttcccagtgggagaacattgccaagcagttcaacatgaccggcacagggctgactcttaccacggctcaaaccctagccttgctgacccctatgggcaggttgatctctgctattagctggggtgcgttggcactggaagacttcattgtcttcttggaaggcggtgattcggtgttcggggacttcttgaacaacaacgtacaagctgccgagacattcgaaaagctagccagtgaatccagtgaactgaagaacaatctcgacggtatcttctctgttgtcccggggctagctgaagcgctcaaaggtctagagttcaatgaaatgctggtcagcacgatgagagaacttgctgccatcatggagttcttcaacagtgttgtagagagattcgcaatagccggcaagtacagggacgctaagattgctgaagccggaggagacagaagtactataatgtcgaacatcgacacgatgtacgctatgttcaatccggaagatgcaaaagacaaggccaccttcatcggtgacaggctagtagctcagaacattgacgcgatccagacagagacttatacccgtgcaacccagtccttgactccagaccagtttgggtatatgatgcaacgtggtcaagttagaaacgaaatggagggtgccctcaagaagagtgccattgacattagtttcaacctcaatgtttctggtatcgatgctcagggtaacgtcatgacaactgaagcgcaagagcgagtacgagagatcgttagtaacgttcttgaggaagaaatctccagagcttcggcaagttataaggaatcccaatgacaattgctatcaaaagagagaacggagacctaatctggttcgacgctgttacagagttcggaagacagtaccgtggctctgtgagttccaacccaatcgaaacgggaggaaaaatcacagaccacattactacagaaaacccagtcttcactcttacagccgtcgtatcagacgcagacttcaacttgaacaggcccgttatcaacgacaacgaggcccagacatacaagatcaacaacaaagagttcgtgaatacgcagccggtcagtgtgccggctgttatcacaacttctagatttgatccgagccgaattttcccggaagttattactcagtttattcctcctgagattccttctgcaactgtcctccctcaaaagggtgataaagtcgcttatgatattgagcgccaactgatcgacatgcagcgtaatgctgaggtcttcagtttgctggacttccgagaaggtatcatctgggatcaaatcgaaagatgcatcttcaccgacttgtctttcactgaaaacgccgagacaggtagcagccttcaacctcgtatgacaatcgaggccgtgacattcacagacactcgctacattgaagttagggtgaacaagggaagaaagacagccaagaaggaaaagagagacaccaaagatggtgatacaggggctagcaacgctactggacaagactctcccacattcaagcgtagccagatgaaagaggctcaaattagaactcaagttgcgaggtgattaatgagcacgacttacatcgacacacttcctttgtaccaagataggaagtatagatacgcggtagctctggagggcatttcccgtgtcctccaattctactggaacagccgctctaggcagtggcacatggacatattcgacgaggagcttaatccaatcctaacagggttggcattggttccacaatacccgataattgcagattacgctatgcagcacatcgggtttaatgggtacttcttgctcatgcctgtcaacctagaacaggtgaagtacaagcacgatgcaagcgacattgtacctcagttttttgaacttctgtatgttaatgttgatttggaggaagatgcagagtgagacaatacgacagagtatataaattgacgctcggtaatactgagtctggtcagggagtagagattacaaaccttcatcctgacggaagtgttaacagagaaggacttcagttcaggttcgatatctctaaaagctccgataacaaaaagagcggcaactcggctactgttgagatatacaatctgtcgattgcaactctaaaccttcttgaaaccgaataccttacttgcagactagaagtggggtataaagaagctggaacttccgttgttctagatggtaatgttgtcgaaacatccacaagaaagagtggaaacgactacgtgactcagcttattcttggtgagggttacactgctctaactgagactaagctgaagggcacagtatctccgggcaaaactgtaaaggatgttatcgaagagattcgtcttcaaatgccgggagtggacagaggagcttatacaggcctcaattgcaataacccgatcatgtacggctatcaactccgtggtctggccaaagacgctctaaacagcgtgtgtgaagccaacaatattgaatggaacatcagtggaaacgttctaaacgtcacagacgttaacggaccaacaacgaagagtgttcaaatggctcctctcgtaaacagagagaccggtctgatcgatatcccattctacgccagtgccagcggaacggcacagaagaaagataagcggagacggagaggcgttcaattcaaatgccttctcaatcctgagctaactcccggggttcttgtccgggtagagtcggatagattgtcaggaactttcagaatcaacaacgtccgaatctcgggcggatacagagacaacgaatggtacactgaatgttggtgttccgatcttaaccaagaggatattgaccaatgaggagaacaggcctacaagagcttctgaacctgcactcgtccacggaaggctcgaaacagtatactgccataccttgtgtggtattgcgcgttctggacgattttagacgcctttctgtcgatgttagaccagtggtcaatgacctgtacaaagacggcacatcagaagagcaaccagagattctatctgtccctgtcattatgccgggaacagctaacacccttatcagcttcccattgaatgtcggggatacggtgttgtgtgtattctctcaaagaactatggacgtgtttaaaggctctgccactggacagcctcacactccaaacgatcttcgtaagttcaacatggcggatgccattgccattcccgggctgttcaccttccctaggtcgatgaacgaccctgcaagacatagttggccacatgataccaaagaccttactattgcccacaacctgatgacgggacaagaggcggaagttaggatcaaagccaatggagatattctaatcaacagccgcaagactataagcattaatgctcaaaatgtcaacgtcaagtgtgcttcactcactgtcgatgcagcccatacaacatggaacgggaacattgcacatacaggtaactacgtgcagactggtggaacttctacattcaacggtattccattccatacccacaaacacggtggtgttatgccgggcggtggtgttactgctgtcccacaagcttaaaaggagatcatatggacttgtttgtcaaccccgacacacatgacttggtttttataaatggtgaagctccagtcactcaacgaatggttgatattgttgctcagcgactaaagatcaaactgtacacattcctaggtgagtggttcttggatgataggatcggcatcccctacttcgagaggattcttggtaagtctaggagccttcccgctgttgacgcgatattccaatctgagattatgagagaccccggcgtccttgagattacatcttggcagtcggggatcgaccctcacacacgtgaatactccatggagttcacagtcagaaccacagacaatacagaatcccttcccatcactttcagaatgataggagtttaatatggctggaattacagcagaaggtctaacgattaaagacttggaccaaatcctgacagactacagaaacgtagcctctcaggtcttcgccgacctagtttcaactggagacgaagttgacacgtctggtaactctgctctaggccgtctgatcggcgtagttgctccatcggacgaagctatctgggaagttatccagatggtgtataactccttcaacccggcagccgcaactggcgtggctctggacaacctagtgtccttctcggcaattagccggcatgctgcccgtccgacccgggctcaggttgttctagagggcaacatcgacaccgttattaactcgcctcccgctaagatgatttccagcagtacaggccgagtgttccacctgctacaaggcgtgatcctcactcctaaagcttgctctggtgttggaatcttccctcagacagtaggcaacgacctgacatacgagcttaagatgtacgttgatgacattaacacaacgtctatcaagtacacaagccctaccactggtacagtaacatccgagtccatcctagcaggactggccgcagacgtagctacaaatcacggaaataccttgacaagctacgaacagaatggtatacttttcatagtacctattgacccattcaacaccaagactttcgaagaagcctccaacctgagtattcagaaggttagaaagcttggtatcgctgttgacgacgttattggccctgtgcctcagcaagctctagctatcgatacgatctccattcctattgccggatgggacagcgttatcaaccctgttccagctatcactggccgtctgcgcgagaccgacgatgagcttcgcgagagattccgaaactctaaattcgtacaagccaccaacattctggagtccctaatcgacggtctgatgaacgtagaaggggtagaggatgttaggattattgaaaacgataccgacaacccagaccccgttcatggagtcccgggacactcgttccttccaatcgttcttggtggtattcctacagaggttgcacagtccatctggctgaacaagccattcgggattggttctgtcggagatacagaggttcaggtagtagacagtctaggctacactcacagagtcaactaccagcgacctgtcgaggttccaatcgagatcaagatcagtgtaacaaacacaggatcgatgccagagaacattgaagatatcctacggccaaggattgtagcgtacgggaccgagaattacaagatcggagacgacgtaatttattctcgattctatgctccaatcatggaagtcccgggcttccaagttaacagcctgacgattgccaagaaaggacagactcaaggcatggcgaacatcgagatcgggttcaaagaagtggctacattcgccgcagcagatatcaccgtaactacggtgtaatgatagaaggagaattccatggctgtcaaccaatttgacagagaagattatctggaggtggcccgggaacgggtcactgaacagtttaaagagaagccgatctttgatcgcttcctgcaagtgctattgtctggtaagtttgatatccagaatgcactggaagacctccagactctccggtctctggacacagccaccgggaagcaactggacattatcggagacattgtagggcgaccacgcggtctagtgtaccaagatattttcaactattttggattcgctggaacggagcgtgcaggttctttcggaagcctgtcggaccctacggtcggtgctccatggtactcggtcggtgctcca

SEQ ID NO: 2 - DNA, 281705 bp, Bacteriophage
aattattaacgaacgactggagtccagcggaagtagatggtgcgtatatgcgctatcgtggttatgagcgcatggcagggactatttttaatgaactcaatagagcggtacgtgtatttaatatgcgtaatggtggatcagtacaaactgtcgagttagatccgcacgtgatctggcgcaagattgtacaagatccgacagtagccactattgaagattctaaccccattgcaaatatccgtgaacaagaagcgatgacttatcgtggagatggtggacgcggttcaacttcaatggttgcacgtacacgtatttacggtgaagcggatgttggtgtggttagtgaatcaactgttgactcaggtgacgttggcgttattgcttacttagtacctgatgctaactttgtaaacatgcgtggtgttacgcgtatgtttgatccaaagacagatggaccagctagactactttcaactagtgcactgcttggtgttgcaaccgagcatgatgaccctaagcgaattaactttatctcaattcagcagcagcaaggtatttatgctgatgggtatacagttacaccagttcgtacaggctatgaacaaatcatagcccaaagaactagttctatctttgctgtagcagcagaacaagatggtgaagttgtagctattgatgaatatggtatccaagttaaatatgctgatggtaatgtatttggatatcaattaggtacagttcatggcacagcagctggtgttaactacccacacattcttgttacctcattaaagaaaggtgataagtttaaacgtggtgatactatcacatataacaaacgttatttctctgaagataggtatacgcctgggcaagtattatggaaagccggttgtatggctgttgtagcatttgatgataaccttgacactttagaagacggttcagttatttctgaagacctagctaaaaggttaaatactcaaacaactgcaatcaagaatatcgatgttaggtttgatcagactattcgagatatggtgaaagttggggatcatgtcgacttaaattcaattctatgtataattgaagatcctgaaacagctgctcactcactatatgacgaggcatctattgagacattacgcaaactatcagcatattcgccacgtgctaagctcgtaggtacagtatcaaagattgaatgcttctatcatggtgaaatagacgatatgacaccaagtttacaagcattagctaatacgtcagataaacaacgtgctgaacgagctaaatcattgaaagaacctaccttcactggacaagtagatgctaactatcgagtgaaaggacgagccttagaatatgaccacatgattattcgagtgtatatcgatcatgatatcccatgtggtgttggagataaaggcgtagtagctaaccagatgaaaacggtattctcccgtgtaatgactggacgtaatgaaactgaagatggccgtaatattgatctactattcggtaatacatcggtagaagaacgaatggttctatctcctaaaatcattgctacaacaactggtatcttgtgggcagctggaaaacatcttgtagctgtatatagaggaaacactaatgcaaaagctaagtaataatgtagcacatggtcagaacattgctgttcttcatgctgctgttaaactaggtactcaagcaattctacaatcgcttggtggcaccaccagctccccatctctgaatggggagtttttaactgaggctgatattgcagcagctttaaacgctcgcttaatgaagaacctcaatatctaaggagtgttaaaatgttctgtaaagaaacccaagctgcgattgttggctcagcacgtagtctaactgaggataaccttgttctagttatccctaatgaaacatatccccttgcggtctttgcagatggtttcagtgtagatggcaactctaataaagttgccctctctgaagaactggaagcatctgtagaagagttcttcgaggaagctaaccaagagcaacctgttagtgtagaagaagagcaagaagctctgattgcacatgtctgctcatcattacaaaagatccaattcaatacgcagaatgttatttgccctgcaattgaatatatggtacgtgtctttaatgagcgtcaaagcattagttgtcaaccagatgtaagcgctacattctaccactataatgcagttcacagtgatccccgcctaactgcacacgttagtacacgatacaataatttacagccgttacctgagtatcgtacctttattctagaatcaatcgatgctaatgaaattattcggttagtatcaatgggtaatccgcatctagatcaaactgaagttgaagaatggctactatctattcctaatagcgctgctgttattgaaggtgtatggaattctatcttcaatgatggtcgtcttctcattccaggtgaacttgaatatgttgtgggtagatccttcccattcactgttgattcactagctctggcttacatgatttgcggtcactacatcgataatccggttgaagttattggcgagagtgatgttgacctagaaacatggtcactaactatccgtaaactacatgagatgtttggattctatctcaagcgtgcttatgaacgtcgtcaagctgatcgcgatgcaggtctactcatcctagcttcagaagctaataatgtagttgctaattctcgttgcaaagtaatcattaatggtgatgttgcacctcaatttgaattagcaggtggtgacatccaagctatccttggtgcagctgtagcaggtagtaataacatctacctagagcagattcttaataactcagaacagtttattcaacgttggctatcggtatatccgctgattaaacagtcagctatggataaaggtttacgtaaactacgcaatgacatccatgaatcatttatggatggcgttattaatactgaacttaaagatcgtcatgttaatgaactcgaatatcgtattaaagaagcaatgagtacgatgacgactgaggatcttaagaatccttacattacctttggtaaacttatctgtaaaacattctttacagaaaatgtttactggcaatatctgttagccattgatgaatttagtcaaatgtatcctgaggccactctacgtgaactcaatacacaatcactaatttcgctaatggcagcatggctatctcaacagattaaagttgagcggttcactggcgttgttgatccatatgcgaaactgccagtaaaagaagttattgaaactgtagaagatgatgacactgaaactttagatgatgttgaaatcgaagaagaagtttccaattaaattatcttaatggttaataatcattaaaacatgcaatcgatgataaactccggtatttggaaggataccggagtaatacagcgaatatttaaaggtgcatgattttgattaagtattttaaactttacataaatgaacaattaggacatgataatggacgtacgttctcttcgacgggatccagaacgggtccacagtcatctaactgatttagaagataattcagtagtaactaatgccccatgtaaaatacagattccagaaagatttacaggaagacatctagctgttattggcagtgaagtatttactattggtatatttcctattatttttaatgatgaatattacgcagtgaataataccattgcaatgatgcggataaatccagtctccactgaacgcgtccacatcaatggtgaagtttatctagagtttcattttgataaaggcagtaagattttccagaatacttacttagttgttaatgatacattaacttactatgtttatgatgagttaattaacaaaggaaacttcccttggtatattaactattatgacaaagccaaattatttgagacagctaatttacacgctggtgttaatcttggtggatggcctacattacaacttattatttcaaccactcagcgtgcctcggatgatatgtcacaactatatcgacatgtgctaactagacacagtgatatcgtggataatccaccagtcgacgtaccattccgttcagttatctggaatacttcagacacaacatcaaaactcaatggggcttattttgatcaagctatcacatcagcacttgttaacccatctgagtcagtagagcttattgaagaactcctcaggacctaaggagttgcgttatgcaaccatattctaatttttctggtttgcaacagcgtactaataaccaagtagttatcggcagtgatatgttagctggtactaataaaaaaggtgtattagtgcctgatgcggatggttactatctaactccactaggagcttatggtacccgaaattcagctggtatgttctatgaaatggcatccggcgtatctatgtttaatccagactcacctttaatgcgtcgtgttaaaaagggtgttctattcatggaatacaaacaccctgaaccctatcgtaaagatggcacacggatgaatgaacacgagtacctaatgcgcattcgtcaaatcgatgatgatcgtgtgtgtgcgcatattaaggaacttattctggttgattctacagatgagaaaggtcttcctattaaactagtacttggcaaatgcaaaccatacggtccttttggtaagtacttcgaagcatctattaccaatccttctcagaatacttattgctcagtaaggtcaataacccaagatgatcctatgcgaggtattaaatatacccgtgagatttcaacttgggatatggttggggaaggtggtatttacggtgctaataaatggaattcacctgcattagagaactatgaagatcaattaatggttatcacgcctgatactctatatcaggtacagcgtgaacgtgaacgtcaaattaacatgggttttgaatgttctgacatcaccaacgtgacggatctagcaaaaagtcttggctgggatatttcaccagttaaacatagacgccctggcttcatgcgttaaaaaataaaaaaaaagacataatgccctcccgcaatgggagggcttatgctgtcatgttggaatagcgatcattggatacatatccctaaataactctaatgcttgcgctggcttataaaaaggtgccacaagcataggcgtcctatatgtatcattacttagaaacagtgtagtagcatcatcagaggctgtttgcagtacacctaaattaaatactttttgagtattgcgcaatgtccaaaaccaatctggttttagcttgtccatgatacctactaacttacttaaaatagttggatagtcctcaggttttgtaccttcaggaaatacataattagcaattatcctatttggataatctggcacatcagcggtaagggcctcagctccagagtgtgtaattattcgatcaattacatctaaatcaatattattacccagtgagtcagcagtacgtttagttaatgtgaatctaaaatcatcattatacttgtaatcatatccaacccagttgcctgacccatcataacgctttgtagcaccgaatgtatcgtcgatcaggtcagggataccccattgtgctacttcttgtaatacccctcttaaaacggctgcctcggcccctaaatcaaagaacttaataatggcgttagaaccagacatgtcttctaagaaactaagaatagaagacatgttttgataattactgttttgtttataaacatccactccattaatgatcatctttacttcattggccattcgagtggcttgttgtacataccctggaccaccatttgaaccagttagttcaccgaatatgacattctctaagctttgggcaatattctgtaaatctgatctagaaccttttaaagcaccttgaatacgtcgtgaagcatctgctagattaatgccgtcagatggtattaaatcaccaataccgcgaacagctttaagagtccgattaaggataccgctaaaaccttgttcaaaattcgaaataccagatactaaagaatttcgcacatccgaagatacttcggtatatgcgtcgatcttagcaacttcatctttacctgtacctataaatgaaggtaatgcaaaatcaaccatggtagtctccaacaaaaaaaataatctataagattggggccagataccccaaaggaatatcaagccccaatattagaaactactattttttataagtgataaattttccaatatgcttgaatcctttacaactaatagtaactttaatcggatatttagccctcattacataaattagacgggatccattaagcggtgcatacagtataaaatcattatctaccatttctttatggaacgcattaatcttatcttggactagtttaatataatcctcatcattaataatgctttgtttatctgaaataacaatcttatctacagtatcgccttcggcgcatagtctttcatatacagcagtacggataaatgtattaactgcgatatatgtattttctgttacttgtgtagcttgcgcactataaatatcactaatatagtaattaggtttatatggaccaaatggatcaataatatctttaatagatacactcttttttggtagagtatggggtggttctaaaaatgaaacactgtcatgtgcatcgatatctaaatacttattgactagtggggcaacgcggttgaatgcttcttcatagatagcatacatgtagtcacggtaatctggtaaagacgcataataattacgctgaacagcagtctcggcactactagcataattataaaaaatacccgcgtgccttaaaacatttttaaactcatctacacctagaattgaactaatccaactaacatcattatcgtggataaatatagctagacgaaggttttgccgttttgggttagtttcatcttggaatggatatgttgtatatagttcagtgatagcctgtttaactacatctgaagattcattgatcagttcctttgagaattgatcaattgacataatctgtcttttctgatatagtacattaatacatgcttctacctgtaatagaaaattcatctttttactaatttcgaaactatgactattctgcattacactattcctatctaattgatttaattacttcgcataccacatcaaaccattctttttcctgaattgttggatttggaccttgtagtgataaagcgccgagatttttagctttaaatagaacgaatggtcgactattaagatttaataatagggtatcacgaaggatattagtaagtccatctacatattggtattttaaaccataatctagtttataatgagaattgacttctggttgaagaaaagccttttcttttttaccagtgatgagatacatccgaagacctttgaatgaaaagaaattctcattatcaagtgtggtcttcttctcttttccattaaactgaaatagatcagggagcggtgtattaccgctctgatctacaatgatactatctacaggataattattttgtacccatggggtttctggattattcatctgaattaggctccacccaatgaggatcaggtacaggaacaatatgtacactgtcctctagtttatctcgaagattaggatcatcagtccattgtagagaaagagtatatctctcctctttaggccgtagcagtaggaatccacgtcttaatgtattccaagacatattgggtgatagtaaaccacgcctttgtgtattagccaatgaagtaagtttctttttatctaatccaacaaggttgactggattatttaaaaactcttcccatagcttatcccacttctcctggttaattccttctttccagagaatatgcctatacagatgggccattgtagttgtagctggtttttgattcttaaaaatttcacattcttcataggggaaatcatttgcagagcaagttacctcatcttcagttggatcaatattgatcgtataaactgaatcaggttttgatgtaccccaaatcagacgtacctctaatgttgctttaacaggtgataagaaatcaatagctttcttaaagccatcccaactcattgtatcagctttaagtgctttattaagattacctttatctgggttattcttgttatgtggtttttgaaaatatgcattcaaacgtttatcccaagcaaactgtgtcatattcctccacagtaatacttctcggaaaacataacacaaaaccccttcagcctgccttaatcctttttgaggatcgcttaataagtcttttacagattccatcttttttacacctacggtgaattgataataaacacactttatattaatttatacttgtatagtctgcacctcacagtaacttaataattgctcttgatagttcaataatatcatagtacattctatccatctgacgctgatatgcctgatggttaatctgttcaagatattcagtttgttgccaaattaggtcacgcatagttttaatagatttacatacatcaataaaactatcattactgtttataaaatattcatcaaggtcaattgatttcctgtcgataaactcattacggcacatttcactaatctttagatcatcttcatttgcaatatgatcatttaacctggttagagcatctaataaataaccaatactgtaatgtcttagatagacaggaacacccatcatcttcctgattgtcagagtttttaattcatccagattaattaattgccagaaattattaatagcttttaatcgttcttcacctgaaataatatctttatctatccgttctaattcaattagaagttgttctttaccaacttccttttggaagccccggaaatattgaataattttcttaaacatgatataggacctatttttcagatacttagcatatggtaagtatgttaggtattactattactaattagaggataataaaatgttccatggtgcagatttacctgatgaacctttagaaaagaaatcatccgctacagaagaaaaggtatatgctgatctagaatatgagcagcagatacggtatacacaatcagtcaaagagaaagtactaaaagcagtgttagagaatactacaggcaaagtacctactgacaaagaatcagttgatatgattcttaaattaacagattcaatggataagacaacaattgctaaccggcgtatccaagttgattctgaaggtgcgcgttctaaccgtgaacttgctgaaggctttgctgaattcgttaagatgcagatgaaccgtaatccattaatacgtgatccgaatgatggaccagtaacaccacgtgagattccagatatccctgatgaggaatttgagaattacactattgaagaaggtgaaactgaaatcggtatcatcatggaggagtccaatgcatttatggaacggatggatgctgcacgagaaaaagaattagaaaacgactgatattaacgacatatagccctcccattacgggagggcgttatgcacttaatacaaatcgatatctaatacatcaccaactgtatttacgattacttcgacaggtggtagctcaatattaccaattgatttcttaataactttcatttggttaataacttgattatgatcagatgttactttgagagctaatagtccaatagcagttaaacttacaatagcagttgagttatctgaaatagtttcatatgcagctttacctactttcttaatagttttaaatagagtaggtttattttgacgaattagttttcgttcttttgctttagctagctcatcatcgaattctttattaaagctacggcgtttactccaatcataaacacctggtgaaacttcttcaaaattggaagagattgcaccaaaatcactagcatgactaaacatccatttaaagataaagcgattagaaagaacccacgcctgtagattagtttctgcatcgttgattagtttaatagcatcacttccagtagccacttggccattagctttaacaaataaaatcagtcttacagtagtaccattgattactgtgttattaacatttgcaatcctggtataaatttctttaataattcgcttttgtttatctaaatcagcaccatttaaacgaatattaaattgacggtctaatacggccattgcagtttcctctagggttattgtacctaaagtatactgcatgaccgtattattttaattttttacatgctttataaaaccgtgtaccaacgtacaaaataaacccgccaataacagcaactgatgtgattgtttccagcggcatgcgcttagcgggttcttcaattggtactgtaacagctggtaattcaattcttttctcaataacttttttaccagttaacttataataaacatctggttctaatgttatcgattcaagaatctgattactacatggatagcgtgtgacgcctccatgtccatctgcaacatagaagctgaatgtatcgcctacacgatgtaagtcaaccacactacccatatatgtcatatgagctggatagagttctgccttgacctttccatcgttgaataagtcaatgacggaactcttctttagctcacccattaagtttgctaaagtgaatgccgccattagcgataaccctattatttaatcgacttgttgagcactatcatcaatatcgattttatctagctcatcagttagaatatctacttcactgtctagtaccgtatcatcatcagctacggtgtcatcaataacggttgatttagaaacggccttatatagattaatagcggcaacagcgagggcaccagttgagataattgcagctgcgatctttagtactttcattttctattttcctaatcattaagttttaataagtatccaatatagatacatgtctgtaatatagatcttaaactttttttagtgtaataaaaaaattaatgcgatataaaccccctcccgaaggagagggtaatatgtatatcagtattccatcgaagttaatactcgataatgatctaatagtaaatcaataacagagtaaaaagaatcacagttgaattgcgtatctatatttgcagatactccagtaatacgattgataatatggagacacttaatatctccaccacgttgtctgataaaaacaactgcccacactggccacgtactatctggtgtggtgtcttgaataactaatctgtaatacccatcatttactgtttcaatggatgcttggattggatcatctgtataagccgattctacttgaacatattgatcattataataaaacatttccttaataagtttagcacaggcatgtaatgtctccattaccttagctgaactatttggattatattgttgattaaacatgtcattaacctcttaagatattgtatgcatagtagtaatatatatcttaattattttttagtgtagttgtgaaaacttagaggaatatacgatgcctagtaaaagtaaaaaacaacataacttcatggctgctgtagccaatgataagaagtttgctaagaaagttggtgtaccacaatcagttggtaaagactttgttgaggctgataaaaataaaaagagttttgaaagtgtttcacttaatagcacttataaagatagttactaatataatgccctcccattgcgggagggcttatgttgcttataattattttaatactagatttttattaaatacttctggagtactaatattagctggatcaagtacaataaattcagcttggttaaatgcaccgtgtgttgattcaaagtggctgatgaagaacacttgattaacaatgccattttcaattaacctgttaatgaatggaatagcattggctcgatgttgttcatcaaaagtcctgctaaattcatctaagaaaaggggcatgtcatctagatgtaaaaatttcaagatagccattctaaaagcaaaatcaacaatctctaattgtgagtcagacccgtattcaatgtccggtggctgaacgtcaccacctgcaatatgcattgggaacttataatccatgccatctttgtcaacattagaaggtaatacttctaacctataagtccaaatctcattgatgtatgcatttactagtttaactactccttgtaagaaacctaataaatagcgaccaagaataccactttttggtgataatgctttttcaagaatagctaaatcagtagccatttgttgtgcatggttaacttctgattctaaaactttaatacgttcttcatgacgttccatttcacttaaacgactatgcacactagatagttctaagttaacagcatcaatctctgcttggtatgccttatctacaaagttatcagctgtatccactatctttttaataaactgctcccatcgttcaataaaagaatgatacttatcttcccattcacgaatagcattaccagctttattgaaatgagatgcttttctttgtaagtcagctgctacatgtgttttattattaatttcagtttctagtgcagttgtacgtgccttaatgaaccctaatgcatcttgatccatctcagcaataacacgtagtcgttgagctaataaagtagcttccgcatgagcttgcttagagacaatgagttgctgcattgcatctcgccagtctaatgcatcatttatatattttgctggtgtgcgatacattacgacatgttcagctacatagttccataatgtatcaaattcgttatactctttcgttaattgaacgtagccatgtacataacttacatattcattgaagtcagtcatgtactgttcaagaaccttgatctcatttgaacagctatccatcgcttcatctaacttagctttgcgctcttctgctattgtgatatcttgttcactaacaccaggtttaaatgaatgagtgcatgatgggcaagtaatagacgcacattccttaaatgaatttaggcgttgattaatttgtaaatacatgccttccatggttgaatatttactttttaattcttttagcctttctgcatttttaatagcagtttctttacttaagtaaccattctcattattagggaatgtagtgagaagtttgatccaacgatctgagagatcagtaagtttaccagatggatcaccgttaacagaaatgtcaaccaaaggaaatctaccggtatactttttatatttactaatagcttcttcagcaatgcgtgtatgatgttcatgtctatccttaagttcttgtatttcttctggagacatacgttcagctgtattcggattagagctttttaattcctctaattcttcaactaaacgtgcaataactgcttgtatagatttatattcctcaatcttcttattatttagttctaagaatgattcatacccatctactttaacttgaataggtaacattggaaatgacattaacaatgaacgagcttcatctaagatagaatctaattctttacgtgcagtagtttcatctctaaaatgaaggacacctttcttatcacgtgttttataaagtaaatcaatacggctaactaaccgttgtttcacttctttcaactgtgtcatttctgaatcattcaataccccatggtgttctgtgaccaatcgcttattaattgttttaacagtaccttgctggttagataattctttacgtactttgttataaacattaaatgcataatcaaggttaactacagacattctagttaaccatgctttacgttcattaggttttaactttgtaaaacgcatcttacctgtcaacatttcatgcagttctcggtttaacccgaaatgcgccattacaagttcttcttgttctttaaaggtatgaccactatttaattcttcatcattacataaaaaggaatgatgtccagtgccacggttatatttagaaattaatttatagtctttaccatttgcatgacaatggaaatgtttctcgccaccttgcttgaagtttgaactgctagatacaacaggtgtcagttcactaataatagatgatttgccagaaccattactaccaagtataaccatcatctgtttgcttggagtccattcaaaataatgtgtattattggccatcaacctagtatagccaattagcttaagtagcttgatctgcatgattaacccttaataatgtcttactctatagagttaataaccctagtaaatattggagtttataatggacgaagctgtgtcactcttatcaaatatgcaagatagtgaaatacaaacatcagaatttaggttatggagcattggacgcgctactgaaaataaaccacgtaattcatttacactaatggtactacctattgagtcggcaactgctactgatggtgaaacaacattcaaccctgttgaagaagtagttgatggtgtagatgccgatggtagggcatatactactaaagttagtgtatcgcgtgatataccttgtatatggttacctaatgaagataaccgtgcaacgccacctgatgtaatgcgtggtgagaaaattgcaatatacaggttaggtgatactagtcaattctattggcggtcaatgggtttatcaaatgatttaaggacattagaatctgtggtgtacacttttaatgcgtctttatctcctggtggtgccggtaagaattttgatacctgttatttcatgcagttctcagctcatgataaacacgtaactattgggacatctaaagccaatggcgagccttatcgttactcggtacaaatcaatacaggtacaggtgcagtctatatacttgatgatattggtaataggtttgaattggtttctaaagataaacgactgatgttaatgaatgctgataattcttttgtgaaagtagagaagaaagctattgatttgaatgcggatcaatatatcaaattgacatcaggtggttctacattagaattaaatccgactgaatttaaagttaacacaaccaatacttctatcaaatcaagtggtacacatgttcaagaagctggtggaactatgacacacaaagcaaatggcaacatgttgtttactgctccacgctatgactttacttaagaggttaatatgccgggaatagctgtttgtaatatggacagtgcaggtggtattatattacctggtcctaatgttaagtgtttttataaaggtcagccatttgccgttattggttgtgcagtagcaggtcatggtaggactccgcatgattcagctaggatgattcaaggttcagtaaagatggctattaccggtatacctgtgtgtttgcaaggtagtatggctagttgtggacacacagctactggtcgacctgatcttacttgtggtagttaaagaacataatgccctcccattgcgggagggattatgctgttaaataccttcattctcatagtgagtaatgcagtgactaacaaatgttaaccagactttaagagttactgctaaccaatgggtgtagttaccaacaggttctgctaattttcgggatatctcagcgagcatattaattgcctcgccatttgcccttcctaacaactcactacgttcagctagctgtcgaattgaatcatctacaactaccttaactgttttatattctacttcgccttgcttagcacgttcagcgatcgttaaaatattagcaataccagttacaatatcacttagtgtagttacagaaggtacttctatatctcgttcagtgttatcaattgcattgatttgtaactctgtaaactccatcgtaaatgtattgcgaaccatttctagtgcagattgtttattagtaactgatgtggctatatggtcagcatcagtataaacaaatgcacgattagctggtaaaatataacttctatgggtaccagtagaagtagtctcacctttctttagtggttcatcccctggcggtgctttaaaatcacgacgcacgatatcggcaaaagattgtaataactcatcaatgatttctgtagtagtatcttcgccttgattatctaagatattcaatgcctgtctactaatatttcgagcaatattagaagtcattttagggtaagtcattaaaatataattagtgacttctttgatatctaaaagattatctggtcgatcgccaatgaattcaccgttaatagatagccgctgtaaaccagaaacagtcagtcgagtattagtcgtacgattacctagttttgcaagtcgcctagataacttttgctgtgttttacgcacatgtgaaatactgccagtaaacttgacgtagaatgccgtaagtgtttcgattaccatccgcacaatatcacgtgcagccttagcagctcgaactaatgcatcttttaaagcacgtagtgtaattataccgccttcttttatggagaaggcgggatcgatactttctaaagcaaatgtcatttgctttagacaggtcttcagatgctacgtcacgtccatctagcagatcttgataacgagctaatcgatggcgatatgcttcaacagaaacaatagcctctttgagttcattattggtaattaatagttctgcatatgtggacattatgtttacctattcagtttccttgatttcactatcaactagtttctcaagtacggtgatccaaatcatcacacatttaaacagatcattactagcttcagtggtgccagttagataagccttaccgacattagttgcttctttatcagtcatctgtgcaatgatttcagcagttgactctttagagataccgcgaatattatttagatgatttagaaggttatgaactgcttttagctgagccataacaacattcttatcaactaatagttcaacagtaattccatagttgggtttacccggtgcatcaagaatggagaagtctaccgcagctttgtctttaccaaaggtataaacacgattaccgggtacaaccggactagcatagcgaacaccattagcattaattttggtagctgttccaaacatacctttagctaaagccagtgctttatcatcagttgtttttccagctaaggctgctttaagagcacgcagtccattcttttcaatactgtcaaatagattacggattacagtgaccccctgaacagggtctacacccacccaactctcaccagtgtcacctagaatcagatcgcgtggaattgcgatagtacgaacttcatcgggtagttcattctctttaacgcgtttcatgatcttattaacgcgttctatttgattactgacattctggcgaatacgttgataagtttctacaacaatgcgaattagcttcttaatgaaatctaatgcaacagtagatacttcttttgctttagcttgtagattatctaatacttcaatagaagctttaggccgagttagcggtgatataaaggattccattgatggcacagtgttattaaaatatttatagtcaaatgactctagcgcgatgctaatagctttagctagatcatgatcgacatcatgcccgcgatgatggcggttactaactaaaccaatatagttttctaatgcagtttgaacagattctactttagtcagttcatttacaattgtaaacatttcaactgataatgattctagatgatcatctagttcaccagtgatgatatcttcagtagtttccagtagtgcggtggcatcatagccatggtctagctgctcagtctcattggcttccataatagaaatgtcttcattcgatgggacatctgcaatttggtgtggttttttggtactaacattaagatctttagtatcacttactttagtgatcatttcatcagctgtttcagtgatttcgttttcaacacgatcacctttagctacttggaattcttttagcccttgactaacatgaatcttcttatcattgatcttatcagcagttccatcaacatctggacctttgcatacgtcaattggggtattggtaacgacattggtaacttcatcacatggatttactttaccatcttcatcatcttttaattgttctggtaattctttaccaacatcaagattgacattcttatcttcagcatcagaaacgcgctcaagacttgcaaagaaatccattgcgggaactgtttttttcttagccattttaaaactccggagtattaaagttcataaggttgttaggagataataccattctcaatgagaagattctctgcaattgctaacctttgtgatagacttgtgttatctgcttctaacttaacaattctagcgtaatcagtttcacgatctttgattttcgcttcacgtgcattttctgctgcttcgtgttgttgtggtgtcacgtctgacataagaggcattgacccaagatttataacaggttctactccaatcacatcagaaataacaccggctactttagcttgtagattagttaagtctaatgttactggaagagcccctagtgatgcggatagaacagtttgctggtatggcacaccgttcaaatcaggataacgtgcgatataactgcttggtacatataccgggttatattgttcagtcgtgagagtaacaatatattcgccattctcacgatctttattgtactccgatatatcaatatttaatggtttatagtaagtgtcataaacatttctaccattattttcaatatcgataaatgctcgtacagcactattgacataaagtgtattgggttttatgagtttgtcaaaaggtgaaattaactcataacgccctttagtcccaattggtgggatcattagagattttttctcagtagccattatagaccccaataggttaattattcattcaattgagcactatagttactttaagacgaaataatagcggatctgctttaaagcagatccgctttaaattaaaatgcttgaccaggacaaacccaaatataatcaccagttgtttggccattaggtctgactaatataaatctttgtccaaccgtaccgcgcacagaagcatcttcaaatggaaaacctctaggtataactaatttaccatctttgtcttgtgcccaaaaacttaatgagttcctagtctctgcgccattaataggatctttttcatagaaacttaatacgaaagtaaatccattcggcaatgacgcattgtatttaataacagtgccaatgaatgtaggcgttgtcggcgatgatacatatccatcttcttctttaaagataatgttagtatcaaaataatctttaacatctagtagattataaataacatcatctccataaagagggtgtttcatttttaatggatatttatttattgttgtgtaaaatgcaccaggaatgaaattatcacatttagatgtatctgccatgatttactcctgtacatccatcattacacgtccttcaatagaccagtataattcattttctaatgaattataaaccgttctatattcacatgcctcacctttgtttaattgacagtcaactttgagtactctgttaccaactaaacgattaccataagcacgaatcaccagtaatccatttgtcttattagcaatagtaaatacatatttaccttttttggtatcataagcagtagctggtaaatttactataaatggactatctgaattatcattatcagtataattaggatcttcaacgataatgtgtgcattaagataagttgagtcaatatcaaacttacgtccagttgctttagacgtatcaattactttcataggtgggtagatataacagaattcactcatgattgcatccaccatgatagaccaagtgtatacatcgctttagttgtttcattataacagataaatcgagtatagccattattaggtaagaaaccagtacttgtatacattggcctaatgatactctgttgataagcagtggctatatcaacatcttcattagttaaattcagtattcgatattcagcaccagctttaagtttctcgctattaccagagggcagtataacacctttaggtgactctactatttgagcatcatctggtttaggcattagtactaatagtctacctatagcttggtcataaggtggacaaatccaattaccaaatttacctgtttcattatcaactgtaattgtaaatggtacaagcaattgcgggaatatctgatatccatctgttggttctggatcaggatctggatcagggtccggcggatcagggtcaacatcaccacctgaatgtaaccatagatttaaccatcctctccaccatagtgacgaatcaatagctttaaataaaaagtttggttgtttcttaccaccggtatacgttatattagatatttctaaccatatgtcactagcagtaaaatttaatttagctttattagcaacatacgcaactaaagcttcgctattttttaacccttgaacaaccgttacttctgatgctgtccaatatggatttttaatataatcattaacattaaaacgattataaagaaagtcgtaataaacagcactattagttgcatctttctgaatgcgaacaaatgccctattaggctcatcgatagttacactatccattaccattacaataatggacttatcctcagataaacctaaatccggatatgctgttgtaactgctttgaagaaacctattcgtggatcttgtccacgcgggttatccgcaagattaagagtgaatctacgcattgcaccacctttagattaatataagagagggcctttgccctctctcatttatgcattaaccaaattgttctacactcttacgagttacaaccatgtagttaatattcttatagactttagcagcatagataacatcatcacggatcattcgtgacatacccattggtactgtagtgtaacgatccatatcttcagcagctttcaatagatcagcaaagactaataagaattcgcgtgtttcaacactaatccggttaatgtcttcagatgtgttagtagcaattatgtaatctgggaatacttgagagaactgggttaaattattacggttctttgcattaccaattacactaaaaccaacagagcgataaatattgcaacttaactcatagtgactatcaaagtaagttgtagtataaccactaccgcgtgcagtacgacgcattaaagcgatccttttacgtggatcgataatgggactatagataccgcctcggaaatctgagttctctaaagctaattgattccaaaaaggacagatgatgaattcagttgtccgaaaaagttcaggtagaatcttctcccactcctcacgggtatgggcagatccatctaataactcatcacaaatagcatctttaatgatatctaagttgttaccagcaacgccgtaaatgatcacaatccaataagctgggaattgcatcgtatcatcacgtggattatgataatcaaatcgataagcgttctggtacgtatatggatactgtgcacgttttgcttgaacttcttcaagtttggtaggtagatcaaatttatctagaagtttcttaacttctaaaggatccttaaaccaatcgtcgtagttaccttgtgcattcttaccaatagggtgaaccacctcaattttaaattcatcatactgaccagcaaatgcatcatccgctaaccaaacacgaattaagttaggttcattacctgtaacgataagtgaaaattcaatatattctggtaaatataaacgtgtattcatattaccaataggaccagaacgcaccgtacttagcttaccattaaactcagtcatgagcatttggttaacttgagttggggtggtgttctttccaatagtgcctgaatttccttgcttcagtaggaactcaccaatctttaaaacctgtaactgatactcagctgtaatgtcaacaggaatttcgtcccttacgctatgaaaagcaataaaagccgttgatggtgtagactcactggtcaggattttcttgtcttttgcataggttgcactgttatccgagatctcaccaaattttgctactttatcggtagcattatcaatgagactaggatactcgtaaaaacctttcaagttgtacatgaattaatcctcataattagagcgcgatgggtttccatctataaaatcagtctgttctagttgtgttaaaataaaaagtctggtattatgagctttacgtaatacccttgtaacagtctattgatagaaatgccaatactggcttttatgggtaggcatagtactaacagaggtcatcatgctcggtttgactattaaagccttgctcttcgtttggccattccttaagagggctatctttggtgatagaacaattaaggaagtgttgctggaaaacaaacatgtcacggcaatgttaatcctagttgtaatattactaggtaccttattcatagtgactagtgagttgaagtcagttaaagcaagcaactgggccgttaaagccgaaatggatcgactcaagaaaatgacgcctgagaaggctgaaatgcttgagcgccgccgtcgtttaaatgacttgctaaagtaagtaccaaattggtggatcacatgtcaagaaagttctttctaatactcctaccacttatcagtggctgtgtttatacgccacatgagtaccacacgcacaacacgactgtggtccaatatgagcactcctcttctacagatgatcatacatctgttgttacaactaaagaagaggtaatacaaaaagttctgcctacacctaaaaaatatagtaaggatactagtaagaagtgtatggttttcgaactaccaagaaagaaaccggtaccgccaacaccgattattacagagtttatagaaactccggaacaaatcgatatcttgttgactgactatataaaagaattaaagtcacatattgtatctgagcgcgctaaaattgagcaagcatatgaagaatggcgtgcaaagtgtgatgagtaatttacttgatagaattattatctagtttagtaatcgatcacatgaggaaacaataatgtcagacggtatggttttatacactgacggatcattccgacagggtaaagctggttggggtattcatggttatacctatgaaaatgttgcaatgaaatctaaagcagccaccaaacagcaaccaacagctaagggatacttagatgtaggtgcagatgagacatgcactgttttaaattatattgatgcatttggtagtgtaactaataaccctactaataatacaggtgagctaaccgctgcgattgaggctttcaaaatagcccatgaagcagatgctcctagactaacgatgctcatggatagtgaatacgttagaaaaggtatgaccgcatatttacccaaatggattaagtctaattggattaaatcagacggcacgccggtagcaaaccaggacctatggaaacagatggtcgaactaaaagctaaatgggaagaaactaataaaccattaagcatccaatgggtccgtggacataacggagacattggtaatgaaaaagctgatgctaacgctaagcttggttcgggacagaataatgataagccagtgatggtttcggttaaaggcgaggaaattaacaaacttaaaaaacaagttgttaatccacttatcctcgaaagtaggttactcttcgccattaactctggagaagaaccagatgggttctattacacctataacttaggtcgtatgcataactatggtcataaaccaaaagacactgctaaagataaattagctaaagctgatttaattttagggcgtcgtatctctgaagcaaccttcagtgtatataaggcaaatgaaccagatgagtatctccagttactaattaatatgcatacagaagcactgggtactgaaaatccagaactgggtatcatcaatttggcaaacgcatatcgtgcaaccattcgacagaaaattgaatccatggggctacctgctctagtcgtatggaaagatatcaatgttttgtcgacgccaacagatgaactcattagtcggactcttaatccaccacgtatggcaaatgatgctgtagctacatttaatgttatgcgcagtcgtcttgaagattacttggctggtaaacttggagagtcggttggtattattgatattaccgagcacttcttcgaggaagtcgcaaagggtaagaaagttggctatcaactacttaagacgattacatctaatacaggctttgtagaagttccgatcacatttaaagatcgtaagataaaattaaagcttgtattaaatatcgatattccaagtagaaaccaattagctcgtattggagctaataaagttaaaatggaaattcttgtagtagctgaaggcccatattcttattcatattcaattgtgttcgtgacggatgatggttcagctatctatcaatcaccctatacacaatttattctcccaaaatagtgggtattccatgaaccttattagcagattcaaaaagtcggttaagaatggtttcagggcaatttggattaagctctgggactatgctgatcccgaactaaagcggatgtgcgtcatggcgtcactgtactccgttatagtacagtgtaagacaaatgagtgtgaaaagatctctcatttgaattctaacatgaaactagtacgcgatgaagctgccttacgactcccaattcattatgggccgtacgtatggaaaggcgtgatagcaatcgataagattgataaagcagatctaaccactgatcaatttttcatgaggcttattcgtaagactccgtgttggatgaaatatgctgatgatgcaacttttttaaaggatttgaaaactctctttaaattaagtttacatgagaagtgtattccaaattgattggtacgacataatgccctctccttttgggagagggcttatgctgttatccaatgatttcacgaagaatatcttcagtggctttcattgtgttcgcagtctcaacaatcttagtaaagagtgttgaataacgttcaacatggtctgctgcccatgtaaccccttcaattaatgtctgtaatagctctggagaggtgtcagagttactatccataacatcctccataaagctatcaattaattgactaagcgcttctgaagcacgttttacatcatttggacgaacccgtgataaaatgctacgaatatcgttcattttctttgttgcgtcaacaaatgaatttaatgatgggtaaagcttaccaaactcagctgtacttgaccggttgtcactgtcatagaaagaagcatctttagcaagatcattgatcgatgccattgcaaatgaattagcaaagccacgcttatccattcgatcagcacgctgttgtagataatatccaagttgtgctttaaccgggtctaataccgctggaataatagtggccatttccttagcttctgttaatagataatcaacatagtctggaatctcaccattaaaaccaactggttgtggcacgattgtatttgctacttctaaataatcaatgtgtgaaactaaatggcgcatctgcgctggatggaactcaggaataatttgattactccagttagtcatcgacgtaaatgcattacgagcagcgatagcaaaattagcaccgcgtttattgataatgttaatagcgtttgttgcgaaattagcttcttgagaaatagtctcagtaatatctacaagctgttgttttggatcaacttgtactaaactaatatcatcattaacaatattgtcagattcaattagatcctgacaatcattttctagtgaaatacttttagcgtatttatggatgttaaacatgtcttaatttccttgcgcaaggattgttgaatatgtagacataaaattactctccaaatcaattaattgactgtttaacttaaaaaatggagtcaacatgtttggtaaacatttcgaacgtccagctttccgaccggctcttaacatcggatgccttatggacatttcaactggtaagtatgaacaaggtaagcatggtgaaatgattctaaatggtggtatgggatcactaactggtattgcttcacgacctaacaattttaaaactgcattaggtatctacctcatggcaatgatgcgccgtgctttccccggtgcacatgcaatgacttatgatacagaaggtacattaaacccaggtgctcgatttacatctttagcacaagcttatcctgagcttgctgccatcgattgggaaaatgatgagcaatacatgtttactgacttatctcgttatactggggatgagtggttcaaaatcttccgagatgcattatctgaaaaagagaaagctgaaaaagattatctacgcactaccccatttcttgatgtgaatggtaataataagaaagcactgtacccaactggtgggttcattgatagtttctcaaagttcattgtctcagctgtgtctgaaatgtatgctaaaaatgctatcggtgattctaaagtaaacactgatgcaatgactaatggtaaagctaagaatcagttatttaaccaactgccacagatctgtgctaaaaccagtacatacatgattctcactgcacacgttggagatatcattcaaattgagatgtaccctactgataaacgtaatctatcgcatatgaagaaggatacggttcttaaaggggtatcaggtggtttctactctttaccgaataatgtgttttctattgaatctaataaaccgttagtcaataaagaaaaaatgcctttatatccaattgacaattcaactgctattgaaggcgatacagatctacgcattctagaagttattaacctacgtggtaaaggtggaattactggtctaccattccatctcattgtttcacagactgaaggtattcttccatcactatcggaattccattattgccgtgaaaatgattgggggattggtggtaataacattaactacttcgttgagctatgtcctgatatcaaactaagtcgaaccactgttcgtaagaaattgatggataaccctgctctacaacgagctgttgaaatccaatctgaaatgctacaattaattcaattccaacgttggaatcttggagattatgtagtaactccagctgaactatatgctgatcttaaagtaatgggttatgattgggatattattcttaataatactcgtggctattggatgttcgaagaagacgaacaatttagtgataaaaaattcctatccacgtatgacctactacgcatgcgtaaaagtgaatataaaccatactggatgactgacgaagaaaaagctaaaattgtacctcttgaactagctaaagcaaaagcttaatgttagtatagatgttatcgccagttttaaaataactaggggtcaataagatccctagttatgtcaggtttggtatatgaatgtttacacttatcagatagctaaatataagttagttatagagaaaggaataaaaccgctagacataactgttaaatcaggtgcatatcaactcgcacctacgtggttaatggttatgggacataagaaaggaattatatcaagtgatgaatacactgaagcatatctcagtatgttagagcaatcattgattgataatccagaattctttaaatggttcttccaattagaggaagtagcattaggttgttattgtcgcgctggtaatttctgtcaccggcatttattagtagaatggcttgaaacaaaaacagaggtcatttactgtggtgagatatcaaagtaaaataaagaccctaaggaactataatgaaaactacagaagattatcgtttaacactttgtcaacgtctacgaatgtttgatgttgaactatcagaagatctattacgtcgattaccagtgtgtacagacgtacccactttatcagcttgctttcagcaactattagctcaatatcctagtcagacattgacagctagaactaccattgatgattcagtcacctttgaagtatggtatgctaattttctagccaacatattaccaattcttaagagacataggttacctccatgtactgaccagaattcaatacctgtttatcaaggggtatctcgctcaagctaatggtatgttaaacaaccttaaaggaaattaccatgactaaacgagaattggtagaaaaagaatgcctatggattattgacatgtttctacctggtagtagtaatgttgatatctataaagaaatgtttgcgcgaatgaatgatgaggaatttgaggagtggattaataagttagattctggtgaagagatgttggcgttatatgctcctaacttatgcactaagcctaaattaaccattaagcgaaattataaagttgctaaagcgattggtcataatttattccaacacatcattttaactgatccaggtactggccaggtatatcgaactgctaataaacatttagttggtttaataccaatccgtcgtcaagtacagatgcttgagaaaaagaaaagtattccgggttctagtcatgtgattgaccagaggtcagggcaagtaactggtgattctaaaggatcacgtatgtctgcaccagagattcaagttaacgcttcaaaaggtctccgttattccatgatcgaattcatgaaattacgtggtggtgaccagaaggcatataatgcaatgaaccgctctattatcgaaactggtagtgcttctgttgattccatcatgtccacttatgatgctactgtgcaatctaataaaacatttgcatgttatctaaaaggcatgatgctacaaaataacttggtgtaactatgaataatcgtcagatttatgaagatatgtgcgaagctttaattgtatctaatactgagttagtaaatggatacagtgctgaaatcattgcggatattttggatttactaaataactggagtaccaatactcattggtatcacattgctgataaaacagttattagggatatctggaatttattccgtaataaaggtaatcgtcttcaacctatcttaagtttagttagccgatttaagatggctgttaatgattgggaagatgtggtggaattactagctaattctatttatccttatcagcctaattcaactattgttgaccaagaaatgttagcgcgattaattccacgaaaagaattaactgacattttataccaaaatgattggttagtttggattatttgccaatgtttaaatatccgttatattactaatatggttgaatctatcccagttcaagctaagccatctaaaaagaaggcggtaaataataatgtttcgtaaaatcttaattgatcttgactcactattagatacacggttaggaactattaggttactaaataaagatgcagctaataagcttgttactaatggtcaaatttattggcatagggaaatggatgattggactaaactaacagatggtttagtaactaatgaacaatttgtcgaagcttattctaaacgtggtggtgaaaatactgctgatactatcaatagttctatattcactggtatcattccatttattattcaattaatagcccaatcagatttgaatagattagatggtatagttaatgctaattttgaaacatgtcttgaagttaatatctggccatatgaattaacaccagatgctcaagatgaattactatactgcttacataagtacataggtgatcatattcagatcaccctgattaatactccattaacagatcttacttgttctagattaaactctatctattcaatggcgattatgtataattttggagaatggtgtaaaacccatgttcttgaattaggacaagtgttgatgcctgactttacgattattggtccaaagctatttgagaaagatgtaagtgaattagctgttgaagataaacagtttattatcatggatttccagttaaagcataaacttaatatcgactttgatttcatcgatgctgaatacttttccatgtttaagccatgatacccaatagaaagctctaatagggctttctatgctttttttagatataactggcatgatggtatagttaataataaatcaaccttaaaagacaaaataaagccctccccgaagggagggcaatatgtcgttttaaataacagcacctttggaaactacccaattagtaccgtcccataggagagtaagaattgttttagtatcgcctaggtcatctactattaatggagtaccattgttccactgtagcactgcactagatagtgttggcatagctaccttaccaagtagtacaagaacagccgttaccatacgatcaacaggtccattctctagtgtaatggtttggttagcagcagtttgaaccctatagcactgttggttagctggtgttagagttaaagctgtaccagtgaatgtacttgattttagactatatgcatcgaatgatttatctagcttcttccaagtaatattagtaccagtacggctacgtacccaatcaccatcagcggttacatcattattcggaccttggaatagagtccatgatttagccgcagcattacgtaggaatagttgtccactagtagcatcagcttgatcaactataatagttacaggtgtccatttagaaccactagctgttttctcacgtacatagttagtgccagtagcaccttcactaggtacttcaccaataactgcggctggtacagctacccattcaccattttgcatacccatcagagtatcatcggtttgcagaggtgctacatcaacccagttaccagctacacgaccttgaggcttagtagcttgtgcagtatcgcgtactacatctgaaggaatttctgggaatgtaatggtagcccattcagtttcaccacctgcaatacctttacgaacgtattgtgcattgacagttggattaggtacagcatcaatggcaggtgttggtaattcaatagcagtccattcaacagccccatcagcggttgctttacggcgaccatagaaaacaccaacctcggcattgggtacttcatcaacaggtagttcagtccagccgagtttgtaccgaaccattttcttatcgacatcttctggatcgacttcactaactggaacggacattagtttgtagaatacaacccagttagcatctttataccagacagtgccagttttgtcgatacaccagtcaccacggttaccatcgatagatgtaggcgcagtttgaccttcaggtagaattacccaagaggatccacgttcacctttctgaccggttttaccaggcatacctggaacaccttgcttgccctcaggaccttcaggaccctgcggacccatagctaggacacctaggctttcccaagtaaatgtaccttcagtatcgatacttacaaatacttctacttgtccttcagtattggtgtgaatggcaatacctttacctacgttatcagcagatgctactggtttaccagcatcatcaccaacgtagataattaatagaccaccaccttgtttaccttcaggaccttgtggaccttcgacaccctggataccctgctcaccatttagattaattgggccgatatagccatcaatttcctgaccttggtaagtatagagcattgtaccttcattagtttcaacccagtatgaatcaccagttactaagtcaggatcagtgtctttctttggtagttgtgaagcatcagttaaaacacctttgatgtttaaaccttcacccggtttaccttgcggacctgccataataccaacgctagtccagcgactaccgtccatgttaacaaatacttcgcccgtggacttaacagtatatgctttccattggttatcagcaagtgcctctggtggggtatcttcaggagtgtcaatcgctgcgatgatctggataggttcaccagcgggaccttgtgggccttctgggccctcgggaccttctggaccctgatcaccgtctttaccaggtgcgccatcttcacctttaggacctcgatgtgtaccactatttacccaattaccatctatcttaacaaataaggtagatgtgtcttgtgtgaagtacgctgcctgatcaggagcatctgccggtagggctgcctcattggcaacagcaccagtaataactacgttcttaccatgtagactgattaaccattcaccctcagtaccagtgaacccattgtccaatgctacttggaaagccgatttaccttgtgcccctggttcaccaggtataccttgatcaccatctttaccttgtgggccttctgggccctgcggaccacggaatgaacccatggctgtccatgagatatcaacagtcggatcttggccagtcagtacataaaccgtattggtggaacgtactgaaacaccttggtattgttctacaccagtagtggttaatagatcatcagcagtttcaactgctttaactacttctaagttacgaccttgtggaccaggttcaccttgtttaccatcgggacccggatcacctgtattacctggtttaccttgtgggccctcaggaccttggaaagtacctaggtctgaccacgctccttttacaaagatgaatagatgttctggtttgccagcttccatagtaactaagtatgcttctgattctttagctacagatggatcaggtaaatcagctggtgatggtagtgaatccttaatggtgaatggcattgctggttcaccctgaggaccttcaggaccaatttcaccgtctttaccttgaggaccctcggggccctcaggtccacgttcaccctgtggtgtaactgggaaccaatcatagtcatcaatagttggattctctggcggattattacctgagataagcatccacgcccagagttgattattccatgaataagcatctccaggtttattactttcagtcttaggtaattctaagttattaggccaacgaccacggataactagaccagtaccatctggaccacgaagtgaacctgtttcaacccaacgaccttttacagggggatcttcgttacctagcggtgattcccatacccatagccgatcttcaacgaaccaagcatcaccgacattatgcgtatctaatggtttaatttcttgttcgaatgtggctagatcaacattagcgataatattgatagctggaccaaccgggccaggagggccttggtcgccatctttacccggctgaccgtcttcaccctttaatccaggtatagtaacaggatcaacgaaagtggtattaagacccaccccggtagaaaccgggatgtgtccattaactacagaagtgggttcatcaattgatgatacccgtttggggagttccccgtttacataatcttcaaatgcagaagccattatactacttcctcaagttcgattttcatcagtccagtggtgttggatacagcgtttgctgagtcacagttataccacttattgccatccttgatggtgtaggtgtcaacttgatttgcatcatccgccttataagtgaagtttaagctaccagtagaacctttagataggttactgcaacgtagtttaccagtattggttacttcagtaccaatatcagtttcacggttaggccaagcagctacacttagagtgcggaatacaaatccacctagtacgtaagtaccaccatttacactattagcttcaacaccagctaaaccttttagaaccacgctgttaaaatcgtaggttcctttaggatcatcgtcatgtactagtaacgcacgtgtccataccttaccagtggcatcagatttccaatcctcagtagcccacttaccgccaggcgcattcatggccggagctgcacttagtttctgagtagaggttaaagtaatgacatgactttgtacttgggttccaaagttaccgcctgaacgaaggcgagcagcagggtaggtaaccgtcgcagtaggtgccgcatttgcaatagctacaacagcagtagccgtagctacactaccattagctgcacgtttagcagtaattaataggttattagtgctgtcgttataagtacctgacttataagtaactaccttagcaatttctgcttcatttgcactggttatagtgagctgatcatttggtgaggaataaaccacactatcagcattagatactgtattggcaacagtagcagtttcacctactttaatagcactttgaccagacggataagttacttgaccaatattaacaactgggcgaagatcatttaactgcatggtgttaattttatcttcggaaccagcatcactggaagtaaaccattctgaccatgacccagttgatttctgaacacgtacacggaaaccatatgccttagtagtattaccacgatcagctacgtaaagaccagtaacctctagttctttagtaggtgcaacagtaccactactttctttcagtgcaccaaagtcagcaatttcgtacgctactatattttcatcagtaacaactttaattgcaacaaggtcatcttctttaagttctgtttgacctaacggataaccgccagtaaatacagcactagtaatattagcgggagtatcggctaataccttagtagtaaatttagccccatcggcgtgttctacaacaatatcagcataaccttcagtagtaggtgcaccaaggtcaatattggcagtagcaatccacataggtggattaacgccaggagttacaactgcatctacattattgattttaacgctaggtacataactagaatgtccagttattgcatcaacgataacccgaacattactagtagttgatagacatgactgtacgctgtgtccatcaggggtacgcacaatactacctacgttctgactgggatcagttgcttgtacatctttgacgaatacaccgccactaataccttcatttttaggaaggttcttaaggtcaacggttgtttcatcaacgccttcaacaatacggatattgccgtcattcttgaatgcaatgtaatcagttaaactaccaatctggaattcaccattgtcataaatacgaatttcagactcaggtaattcgggtaatgcgccttgcgtagtgggtgcagaagcgttctttagataagaataaccttctgcttccatacgaccttgttccatcatacgctgaggtactttatcaccagcagttaagtcgtcttgatttagacgcttatcaaacaggaaagcaaagttatggaaagcagcgttggatgataatccaccattcttaccagttacacgaagtacatctttaactgtataaccttgttgatttaagagtgtctggagtagttcagcagtcatggttgcatgcagtgatgttaaccattcctgttcagtaccttggaaaccattttccacagctacttcatatgcactcttaccagcatcacctttaagggatgctataaactcttcttcagtaccaacgaaacctagatcgactgcgatttgataagaagatttacctttgagcgaatcaagccattcggtttcagttccctggaaaccatttttaacggcaatctcgtacgcactaagaccgggtgccccagtctgtagttttgacagcagaaacttatagttatcgacttgaccagctgcatcggtatgaattaattcaatatactcgctatcgttaagagtagctagatccggcagttgactgatcttgcctttgtctgtagcatttgccatttttatttccttgctgtataagaaacactaacatgttagtctttcgaagaagactcatacagtaatgtactattgctaatgagtaatattttaacaacataagagagtcccgaaggactctcaaaaagttacattgacacaagatgtggtttatcatgaggggaagtttcacatgataccatagactccattctattgctacatcttattttctatgtgctgcaactttaccatccattaggttataaacttcttgaatggttttaggtgacccatctttgttataaaaaatagatgggtttgcctgagcttcttttgggaaatgggtagccgctaattcattctgaccagtggtcaggaaacgacgggctgcaccaggtccaaagaagtgagctaaataaagatcagtatcagttggttcacgtttaaggacaggacgaagaatattcatattctctttaattagttcggcacccattaaagcacttatacgtggatctttacgtaatgcacctgttggatcagtaataacgccatacttcatgccataattttcaatcattgttttccatgttccagtaaggaattggaaccaaccagtagctgatgaagtcttagcttttatttcgtaatcgaatgctgattcaatagaagcaaatgttaatagcaactggctacgaacaccagtagcattttctactgcattcataactggagttgcagctgcacgtgatttatttgcagttggcatagggatagttttataaggaataggtggggaatatttactgaataattcagcccaagtattcttacctacaataccatcactatctagacaattatctttttgaaatttaaccacctgattaaaggtgttatttccaaaaataccatctggctttccaacatcatagccacataaatttaaaagtgtctggagttgacatacctcatcacccctatcgcctttgcgtaatactttcatgatataacctctacatattaacccagtatgaaccctgggttaggttcattgagggtattacttaactttctagataacggagttgaccattttctagataacgtgctgcaccattctctaatagtcggatagtatctgacgtatcattaatacgttgaattagtatattacattcaccatagtaagcataactactcgacatagctactatcgtgtatggaacaatatccgtagttgcattgattggtgttgtatcaaatgaaatatcatctggtccaagcttccaacctcgtgaacggttaatttcttcagcaattgctttaggtgttaaagtaccaactatcttaaggatagatccttcaccaatagcacgtggatcagcaaaatctaaccgacggtaagttaacatgtacttaatgccagtagtaatgtcgatcatttcaataaatgtacgtccaggctcaatcgtggttggactaaaaaacatatcttcaaatgtaactgtttctggtttgaagtttatttttaaatcatcccgcgcaagttttactagcgcgtccctcgatgccatgtcatacggaaagatatcctgcatgtcaaacctctatagtggtaaaatgtttaatccacatagcattataaagccttcctcttgaagaggaaggctattatagtttttattgcataagcatctttattaattcaaaggtaccttgcacaatagtctttaacacattggcactttcttctgacataggtgcaccagataaaactaccatagtagatactgatgccccaataagagtaacgccaccagctaataccaataccgcattacggtaagaatctttagccttcacttcagcaatttcccggctgagaattttatattgaagatctgaatcggtaatagcataaattagactaagtacttcctcaccagttatacttagatttatacgttgttccttttccaatacactattcaaataggtacgtatcttctttccatagtctttagaagaagataaaggattaccatcgatctcaatcagaacgtcctctagggtcatgactattctccaaattacgttgacgttcgttccattcacgcaatttgtctacttggatattacatagtccaagtgcatcagtttgtaaaagccaatgttcggtcataagtaagaaacgtgcttcattctcatcagtaaccccaacagctttatatctatctaatgcattgatgatctcattagctgtaggtggggcttccacatcacaagggagaagcaaactacttgggattgcaactggtattttcacgggaggcggcacagtagtgctcgtacatccgtttagcaatagcattaatagacttattaatgctatctttttttgtgtcagtttcatgttcaatctcagtagtggtgctttccccattagttgttttagctttaacttcaggccatacaggtggagtatatccacgacctgataaactaatgtactcatcaatcacctcagtgcgtgattgcgcctgctctttttgtatctctttctttttagtaattagttcagcttgaattttatcggagatacggtctgattcaatcctaaccttttctgccgcttcataagatttaatttttccaattaaatctgtagagcgaacaagttccgtctcataactatttttgtaatatatgataccaattaaggcacctatcagaataactaatagtaaccatatatgcaatggtacactaccaattatttttcgtatacctgctaataggaacattgttacctcgaattgttaaacaatcctagtaaggtagtagtaagctatcgcacaagcatccatagagtgatcatctagactatctatgtcgatgttccatgtgatgtcagtacgagaacgcattgcttctttaacatcgtctttagtagtgccctttacttttttcatacccgcattgattttaactgtggtaggatcaatcatgtacaagggtataaatctatcatactcgtataatgctctatgtacataggtcacacattctacaagtacagcgaagctttgggcaaacttaccaagatagttagactctacaataactgcatgtggtttttcagtatgtagtatatttagcaccacatcgctcatttgctgcattctagtaaatctactaccatgaacctcggagatggcagcatatgccggatttgtatctttaaggtggcaagtaaatgcattacgtaccaccttattacttccatccaacttatcttccagaatagctatgccgaggttttgtgaaccagggtctaatgctagtaccctaaatggctcatcactcgctggaagcttaagcatatttaatccttaggtacaaattttgctacgttaatagctttgctacctaacatgggttcaacaccaccaatatcaaaggttaacttcagaccatcgctattataaccaacagcatggttagtagcaatgaagacgttaatctgacatgcaatgacttcggtataaataaagttaccagatgcaccagattgcccttgtacgtctttatctacacctgaacatagtccgatttcagaaatgataggtgaccgaacagaaccagtcctgatcctgtgtgctgtggtaatctctaagatctcttcagctgttaaattaacagtcacaattgcagatgcagaaattgattcatttgaaccaactacagtgccttggttagaaatcgtcggaggagttggattaagatcatcgcggttaggcacgtatggtgttacaactggttcaccatcaacgatagtgatctttaatagtttaggcacaacaccagtgacatcgatcttacgtgcatagtaggcaaaatattgtttaccattatgttcctctaatcgacgtaaccgatacatattacgacgttgggctggtaagtcatcagctacttcacgtaatacgaaaggaatgtgattatagagtgcagcatcattcgctcgatggatattattttctacttcatcagagccatctggtcctttaacaaaataatgaccacggttgccaattaccatatactgaacattaggaatctggccagcagatggtgcgacattttgttgaatagaaaacttttcattaagagtggtattcggaattagtttgaatggaatacctagatatttacacgtttgcaggtatgacccatatgccgtacgtgtaacgttaatatactgctgatcaattgcagacattttagaatccttgcagtagatggttaaaatttagtacactgtactattgagtaaatttgtaagagttcccctccacatggaggggatttatgctgttaagcaaatttttcaggagcaccacgtaccattacacagatccatgattgtccattatgggagcgttttacttcatgtaattgggatagatggaatactaatccttcaccttttccaattaatagttcctcaccatctaaaatgaacttagcatcaggcccaatattccaagcaagaatagtaccggcctcgggtttatctacccaataattcatctcatctagaaatccatctattttggggaaatctaaaaaccatacttgcagtgctttgttaaatagttcttcgcctaaaattggtttaatttctttacgctgtttagcagtccaattaaaccattttgaagtattataaacactacatgctttaaggccattggtgccaactcgcatacggtggccatatgagtctctaaatgaaacttcgcctttaagctttgttaatgtttttagttctgtcttagatagagtcttaagtttaattaccatgttgtaccctactcgtagagatatataagaacgtatcttttatttttaactggagggacttcatgtggctctgaacggattggaaaaatagtagccctacctggcacatcctgataaaacttaccattgatcgttataccatcaccattgtcatttaatgcaataaccatgttgtaacgataaacagcttggtcgatgtgttcaggcatacctgtaccaatttcatatcggttgattagaacttcgcctaaccaagcaccttctaccttaggtgcaatatgaaatagtaagtcccgtaattccactggcatttgattatgacctaaaaaccaataatcacattcagtaatacctttggttgggatactattaatttttttccgattaaaccaccaggaatctcccagtgtatccagataagatacaaggtcagctgcaaattcagctgaaaacacgtccttggtcgatctttcgtgggccgataagctcatgcaggccacctgcatatcgatgtgctttctcagcgtcgagatcttccctggatttatagataacgtctgggctctcaattagggcctccttatgcgcgcgattagttcgtttaacaagatcaatataatcaagcatttcttctagttcatctaactcttgaccatatttttcagctagctgtttaattgcacgtgcaaggatattaatttgctcagtcactggatagcgttcagtaattttgtaggccactttactatttaagtgatcttcagtaattacttgtggcgcttcttctttaggaacaatcttccaatcagaaagtgtaggttgtttaccaggtgtattacttacgactacatcataagtacccatttcggcttcaacaaaaatggtgtgctcacgtgacttagcatcgaatgcatctaaaggtagatagcctacgctttgtaggaatacctcagaagtacggttaaacattaatagtacttttactttatcttcagtaggcgcagtagctaaagatagttcttggagtgataacggattattcattatacaagtgctccagctcgaatcatccaacgccatgtaccattatttctaactgctacatattgctggtaataataggcttcaaagggggtattagttctaacacctacaacagcgtaagtgccttcaggatatttggtattatctgtaaacatcgtatttaacgtgtttaatgcttctgcttcactatttacctgacctaaggtaatggctttaatcttatctttgttccactctttaaaagcttcaacccagtcttgccaagtaccatcgcttgctagataatatctctcagggtcatttaatattgatgcattacctttacctaatgcattccatttaaatacgccactagttacttcttcagctggaatatcttttcgaacatcattccagaaattctgatataccttacctgttccagtaactggataaccctgactattagtagtagcaccaatagtggtcgcattagcagcttgttcattaatacctaataatggagttattttagaatccatcactggtttggtatatgatccaacttggtcagctgtgacagcatgtgggttattaaagtttttaatatgtgctgcaagtttagccaacgtatcaatattaagaatacgataaataccaccaattggcatgtatttattatttacgtttctattaactgactcagcttcagtagcaaaaccccagttggatatcttatcaagcggtggaattaacttgaatcgatcatcagcatgcggattattataatcagttaagtgtgctgtaactcgatctctataatcgtccacagcggtttttgcatcagtgagataaactttataataatcatcggcagcattatccatggcacttctaccgacccgataagcatgtgctattcggtttaattcagttaccattgtatctgtgccataaatctgccaatattcatggccatgaggggcaggcggatatgcatcgggtttaccaacaatatcatcccaagtgaaacttaattcatctaattcaagtttatcaaaaacagctttaagttctaatgctgaaatactaaagaaaccaccaactgctctatatgtaacttggacattaggactaacattaggatcagttactacaacaatgcccattacttctaagccagtcatttcagataactgtgaataaagataggttgttttatattgatctttgtttaaagataaaccagtcttcttatcacgtagattaaagtccttagtataaaaaccaccatgtgtacacataagtacgcgatgtgttttattattgacttgaataagtgtgtgatcctcatctacaatgtaattagatgctaatttagcttttagatctaatggtaaaaaagtaatcattatgccggttcccctatattagtccacgttgatccaactttacgtaggaatagagtattcctataggtagtagctgttgtaccattgccatgtccaataacgaattcttgatcgtagtggcaaatagctaatgaaccaggccaccattgttcaggatctgagaagtatgtgttatggaaagcaattgcttcttgaatagatttaaagttggtgttattccagtggaccatcgttcctgttttttggaagcgattaaatataaaaccgaaatgagtccattgaccattaggcatcaatgtccaatcacgacctggccaggttgctgaattaccaatcctaccaggtgctaatctaccagtagttaatacacttagaggcatcttagcacgtactgtttcacccatgctataaacatcttgtccaaataatagcttagatgtattagctgttttacctttatctaatttttgatttagtaaaatattagcttgagtaacagtatacgtatttaattgttcagccgttaccctgtgtgggttagtggtaacatcgttaacgtgtgccagatattgaactgtataattggtatcaactgataacttcattgaccatggcgtagcatagacattcatgatagcgccatttggctgtttggcttgtgtttcagttgcaataccagcattataaacattacctaatgccacttgccctttacgtgtctggtgtgggttagtggtggtatcattgatgtgtgtagtaagtcgtgcttcaattgtattaagatcagcttctattagacttaactgatatttaaactcatctaaaatggagtcatatgagtctgatgagcttttctttaataagtcagttatttcttttaatttaacaactctaggcgtaaaaccataaagttcccaataggcatgcatatgtccattaggtttaaattggtcaggaatatctaaaatattagaccaatgtggtttacgggtattatttaaaagagcgttagcatgctcagatatggaaggggcaaggttacagtatataccaccgcacatctgagcatcaatgtaaatatcctcgtggacatcttgttttgtaataacaattactgaacaagcttcaagtccagtcttctcaattacttctggattaataccagtacactgataatccatttctggatttaactcattttgcctaccatctctgataaccattcctttagtgtaaaagtaacccttatccatcacgatgatgcgataggggaatcctttctgttttgctagtgaatggtattcaccctttgttcggttactataactctctccagtttcatcaaatggaagaggtaaaagtaatggattcatctaaactatccttatggaattacccagccaccttgtgaacggaaacacacgtagttaggagtataatcaacgaaaatcaatccgttaccagctgcctggattttctgttctttaatagtgaagaatacagtagatccgataggccatgcatctggattagtgaagttagttctacagaaatctaatgctgcttgcacggatggttgtaatcctagtgcataaaactttaacttaaccggatatgaatactctgtggctaattgatcaaagtgtgtaaagataccattcccacggagtggtgctttccattgtcccattgtcccggaaccaatccgatttatattgatgacattactctggccatcgccagctgtaaagttcacgtctgtgtcaaagttcttacgcatccaccaaataagatcgctataacccattaaagtagcagttggttgccctttaggtttataataaaccatattagtattagctactgtatcagtctttaaatatttaccagtaattcgtgaatcaaaatcacttttcaaatatgactgtacatgtgtatttttgactttatgtggattatcacggcgagctatgtgggcattaagtggttttatagctatttcatctaatacgccatatgctaactgcggtgttagataatgcgcattagattgacctagttgagcaatggctggagtagccaatggaaagttattaactaaacctagttcaacattggttggggtaatcttgtgtggattagctttatcttgaatatgcttttctaggcggtcattaaatttctttaagaactcatcataaatctctttaactttactacggtagtcatcttcaccacttgtgtcaccagccatgagtgcctgtgttatccactccatctcgttgttataaggctgatacgtatcaagatgccatcgttcgccaactaactcaccgtctttccaatatggttcgttaccagtgtagtcgagatcttttggctttggcttaccatttgttttccaccagttaatataatcgtcgataactgtgaaactaaacgctagatcaccgcctaccatgtgagctgaagtatacactattggtgtactaggtgtttttaagaaaacaattgctgaacatatttcttgaccgacatacgcactagcatctttgtgataataagtaacaatataatcaatatctttaactaaacgattatatttaccatcataaacttctaacccttttgtatagaatccaccatgatataacttgatgattctatagtcgaatccctgatactgaactagagtatgtggttcgctaccaatgaaacaatctggatttgtacctaatggatcaaatggtaattgtaaaataggattatacataagaaataccttttaactgaaacagcaaaaagagacacagcttttggctgtgtctcttatgccgggtcagatgtttatagacggtctgctgcgtcattaaataatttcgcaagtggaccgtatatgtgcactcgattataatcatctgtccgtttaggagtcatgtacgtagtgttattgaaaccttcttgtgcacgcttcttagtagctggacgatagttagccacattaccaagaccaatatccgatggttgcagattatgtgggttacctctagctgcaatatgcccattgatcctattaataacggctatgaatttattaaggactgccttagtaaataagccttgattactaatagaagcatttatttgagcatccatctcttgacgtgtaacttctgccatttttaaatcctcttatggaccagtgggtggagttggttcaatatgtttcacacgtgtacccctgccattccataataaggagttatcaggtgaatctccccagaacatgacttgattcaaagtatttactgtcacagtgaaattatgccctgctgccaattgaatatatggtccagcatggtcatctacgtcacattgtccattatcgttatttccgaagaaagcgatttggccatcaccatacatcactgtgtaatgtgtgtacaatcctgatacaccaccaattgggttactatttacattagcagttacatcgttaccacgtccatcaaaccataatggcgagataaccataaaggatgtatcattaccattgcggatgatttccatgacatgtactttactagattcagatgtataatcttcaggagcaactaatggatctattgaatgcatgatgatgtgggtgcaaccaattgacattgaatcaataacatgattcaatggtttaattgtgttgttaacaaaatcattaaaagcactaatgaagcttgggataccataagctgtatatacatagtcagcactgctagctggacctatgtttacaacaactgtcatttcaccaggataggtgtcttcagtattggtaaatatagcccatggtttattagcagcaggtactaatagttcagatgtaccacctttaacacaacgataaagatcttggtgctcaaagattgctgattcacctgttgaactaaagatgaacttacctgttaacatatacagagatgttttattcgcccagatacttgaaggaatatttccatctataggtgcagtccattctactggaattggtatcatctcatcgactttagtttcatcgatacatgctgacttggctacaccattctctacccaatactgaccatatcggtgagatacccaggattcctgagcatatcctaaacgctctggtataacagcataagggttagctggcgatttaggatgaactacacagtcatctctgacaattgtacaatcccaccaactattaaatccagcataagcatggaaacctgccgtgacaccttgaattaattccattcggtcatattcactagtatcatccacaataactggtaatgtatctatctttaattgtacatcatcccagttagcgttatagccggctgccatcctttcaatatcaccgaatgatgggaattcatctttccattgctcaggtgttaatccaccaaaggtagaagcatcaccaccacctagtcctgccagtagttgatcaacttgtgttttagtatatgcattaacctggtcggcagttacaacgtgtgggttattttcattactaatatgttgattaagtttctcttctagttcattaattctagaagcatcaccaatctgactatagagaatagatgcagtataaggtgttaataataccgaatcattagttacgtctaccgcagtagttggtgttgcagctgggtagttaggaacattacctaaattaatatcagctgctgttagaccgtgtacgttacccctagccgctatgtgggcattaagcggatttacggcaaacttattaactaatgctaatgtaccacgtgggttcgtaaatagatcattacgattagcatctaaatgctgttgatcacttgccattgcatagtttggaactagtgacaagccaacttgtgctttagttaccctgtgtgggttattataatcatgaatatgttggtcagttgtaccggcagccgcagcacggatagcttctataatcccttcgataccttcaagaatctctttactacctactaatgaatcaataggttgattgtgttctaaaggtgggaaagaagcaggtaatggaccaattgcaccccatgaccgaatcaaggggttatactgtttgcgtgcaagctcagccaggatctgctgattactaaatccccattgcccacctattgtacgataatccataccaatcatagcgtttatcgaacgcttcatgatacgtatagatccagcgataggtctacctatcgattccatagcttcaataaaccaatgcccaataaggtaatcaacaccttctacataagtctgattggtcagtgggttaaatagtcgtaatgaatctacaaagaaaggtgcagcaaatggtataatgaaataataatcatcaccatctggtacctggagagtttggcgctcacctttaataaagttctggggatttgttccattggggtcgaatggatataacccagtttcaccgtgggccatggttgccctcctttaataaaacgctattgcgcaatttgttagcgtaatgatgtgaaattcacataggattgtccaatcattccatggagactaatagatgtacacactagtacgttctcgccacagaatagatcgtaagtcggggcgctggactgatgttgatctagctaatgaaaagatatctaccttatctgtaaagtttggagatatttatctatatatcgaatatcctgggccaactgcccctatattaaatgctttacattggataaatgttactaatgagattagttcagctaatccagatctaaccgtacaagaatggttaacatctcttggagataaatcactaccatttgatgatgaactacccaatgaaaaagtacgtttagtaaaatatgcacaagcatggcatgcgggttatattgcgcagcctgttgctagaaacggacatgtcacggatggtggttctaagtttaagaaagaagatattcttttaacccatcctaaacataaacctgaagatgtttgtcgcaagtgccttataactgtaaatacaatgtttcatctagccgattacactagtgctggtgtaagaatcattgatggaaacaaaacagttagaacagctaatgacaatcaaattggattatattcatttgaaacaataggtgatattaaatatgtccctattaaaactgatatgatttatccgcagcaggttggagcaccgctatttgatgctacctatattgatatgcctgaagatatagacctaactaataagactatcttattatcgctaggtggttatctatgcgtattaggtaaaggtttcaatagggtaggtgtacgtacttggagggtagactttggtagtctatctatgttcgaccgatacatgcagtcacgtgaactaattgacctaagttcattaggtttagaaattgatgacaaaaataaaactctattaagtgtagaacaaattaagaaagattctgttatcaaagcttacatgactttaagtcaaacatttttcatcgtattagatagcccctctttattccaagaatttgtaccacttgaaccattaaaacttcctggcagatatcaggcaactaatacacgtactgaagtttatccaaaatatacaaaacctgatcaactaccagtagttggcgcacatggtaagatgttagattatcacttcatacacgaagataaacattctgtttattgctgcacattaaatattagaaataatttcgatgcgcacacacatgattggaagactgagaaagtagttgatggtggaagatatccggcttggccttttgtacatgacaccgcatatcttagaatattaggtgtagatggttaacgtcataagccctcccgtaatgggagggcattatgttgtttagaaattatccaatctcatctgattcagttgactcgtcttctagctcctcagcctcagcagcggctgccgggtcagatagtccttccatatcaacttcatcctcatctgttggtgttaattcagattcagataaatcatcatagccagcttgtgtatcgaagccagcttccattttattaccaccactacctaaatcatcggatgagtcatccatatcactaccgaagtcaccataaccaccgctgccaccgccagttaattcatccatatcactccgatatttcttatattcagcatctagtcttttcttaatctcggcttcacctttaatgaattccaagaatgctgaaccttgagttttctgaatgttattcagccaatcaagtaagctaaaggctggcttatcatcgccgtctaattcttctagaactttagtttcaggaagaatattctgttcagcgataaactgacgtaggaagtatgatttagcagcagctagatatttctcggctgcgccagatacacctaacatttcatcagggaatagttctggagtaatcttagctgaaagaacgagatctagtaacctagagtattcctccaaggcatcaatctgacgagtatgttgggtattatcaggagcaggaagtgtaacgtaaattgattcaataaattcatcaatcacttcatctactgaaagatctttaaatactggtgtatcaagcatgccaacattcgctgaaataatttcaaccatttctttacggatgatagaactattggctgagaatattttcactagcttagtgattttattacaaaactcacgctgatactcacgaaccctgcgggagaatactaggtcattttgcacaagtcctgtagcaaaatcaggagatgtcattgggtcaaccttctcaggtggtacacccatagatgaaatgtgcattctccttaaacgatcttggagttcggggttacctgcttggacattagtgttgtaatcatcgaaatcaacagctgttgaagcataccctggattatcacctggatcaattttaaagtcatagccagatcgcatcaatgaatccattgcttgggatggatcaggtgaagcaagtgggaaaccacgatgtgccatttccataatactagactgaacatgttgtacagtgtcttctggatctgggtcatctggatcaagatggatagtaacgcgtttacgtccgactgcgttacgcatgccacccattacatcggccatgagtagagttgaacgcatagtagccagtagcttagaccgttctaattgagtttcaccaataccatgtcgattataattgaatgcaacatagaccatcatctcagctggaatgaatactaattgagtctgcttacctttccaagaacgataaagcatgatacgcttaatttcttcatctagtccaacttctagctcttcatcatacattccattgcgtaaacggttctgtaattcgtttacgatgatacctgcataagcatcattgatttgatgttgttctaattcagtatagttagatttattaatacctagtgcatcacgtgttagacgtagtatttcagaactattgtcttgtgaacgaccattctgccatcctgactgtagttcaccatagaaatcacgtgtagcttctttacatacggggtatccatttaaatccactagtaagaaatatccaacatgttcataaggcctgccaggtacatatactggaataactgcttcagatggcaatggtagaattagcggatgaccaactgaagaacgacccatgaattttggagatgaaataacttgcgtatattcaacaccaccacgtgatttttgataaagttcatttatctgatcatttgtgaaatggtgtgtttcagttgcaatcgatactagtgatgtattgtatttgcgtaatttattagtaataagttttcgcctaatacggttagataaatgtggtgctttcaatacatcgatgttatcagtcactgataataatttatcgccgcagatataattagaattatcattgtttagattatgtccttccattgatattcttgaattagtaggatgtccaagaatacctaatggcctacccttattaaggttattgcgaaccatagcataactttccatgctaacttcacgtcgcccattaacaagtgcatctaaaacgttttccggtagaacagctaatacagatgatcctttatgatacaggatatctcgtaacatgagatctagccgttcgttaatcttatagtcttgtttgaaatatcgctcaactggctcgattagtaatcgaccaatctcactatcaaaaatatcttggtcacagtaaaaagttagatcagcttcagctagatctttaggtgataaaatactaccaactaacactgtctcagttaattctagatcaggtagcacctgcataatagaatctgagtcaataatattctgtgaagtttcacgagataatttttgtaattgatgttgatccacaacaatacgtgggttattggtcgaagccccagcttcttttggatcatgacggagtttggcaatcgtagctgccagtggtgttgggtattgcccacctacttgcaaattagcgagaggttcgtaacgcccctcattaacccctggtatagccatttgaggctcctaaattttaaagtgagtaaataccaatgaataacagcaacagtgtgtatttcaaggtataccttgatgacgttatccgattggctcgttcaatagtcataaaatttgatgatattgccgatcaaataaatacagagctttatcgagattatttatttaaagcagatcctgataaaccatggacctggaaatactatctgaatcttgctggtgagtaccatgaaactgatacgatgatgtatgtcacatctgctgacacattagaacgcatcgagttcaccaaggaaaacctcaggctacatcgtgcaactgcacgggaatttacaccaggtagtcagtcttataataacttagtattaaaatatccaacgcaagctggactaatcaatgggatactatatccaattgatatcaattttgcaatagattcagataatggggatattttgtattttgataacaagtatgttgaagggaatgaagataactttattcctgaactacaaagttggatcaaagcattttataactctaactataatagccagtaccttattacagatgatctttatttaactgctttcctaggggaactaacagtattacttcctcttgagatcatgaacatcagactaggtaatgcaaggtctagacgagtacatagtttccatattcgtgaatatctagcatcagctaatcgattagatgagttcatgccatatctgaataaatctcaacaattatggttatacaggaatatacagttcttacgtagaaactcaggtaagcaagcaatatttgaccagttggttgaaaagatattaactgaacgtggaataccagttattagttatactcttgaacaaaatactgcaaacatgccgcctaatctgaaaccagatgtagagatggttaagcatgacatgaatatacctgttgtgcaacctggtcaagataaaaacacagtattagaaatattaactagggaagacccaattgcacgtgataacccactagttaaatatgacgccgaaaaagaaataactgaacaagtatctactagtgcttttagcaatctacctacgcgtgtactagattcagaggttatcgatagatctaatagctctgtaagaaatctaatgaatgtcctacttaataactggttacatttatcaaccagtggtcgttatcgtgcatatgtatccattcctaatccaaggactggtgaatacatgttaatgacggttaaggatgcattcattgtaatgctttattcttacggtagaacaaaggattttaaattcgataaaatacctagtgtacctgcttatgaagtattacgtaatccattcccgacatatgaagaacttcaggtacaagttgataagaaactggtaggtcctaatctactaggtgcagtcagagataactttaccccaatgggcgattatatctcaactgaactcttctatactgatagctctagatttcacaaagaatatttgaaaggttgggaattatattcatttaatgatcataaagatattcgttgttatctagaacaatctgttaagactttctatattaaccgaatgtgtaaactcgttaatgaagatatttcttttgaacagtacttcaaagattctgcttttgctattgctgatttaacaacttctgaatatgagcaattggtagttgattgtattaatattgcgacaggctctgaccttaatcgtgttattacattaggtgaaattcaaagagagctgttaagattagtttctaaactatcatcttatccattacagtttctacgtaatgttagttttacggatttccatgtacttggtattgtaatgcctagacttggtgattatggagctgctggtaatgccaaccatattgtaccaattaataatatcaatgtccaaacatatcgtacatcagctgaaatgacgtactacattaatgacgtagatattattccatttaatgattggtcttattgggctgaagacagatggtggattaatccatttgttggtattaaagaattaagcctatctgaatacacctatcagattccaagtatggttaacgtatggcaatatactgaagaagtatctgaacacacaccacctgatggcggtcttggacagtataataattcaacagatcctaattggcctaacttaccttaaggagtgatagatgtttataactagggattactgtaaggttgatccttggacggctattgttgaaatgattaataataattacatgtaccagttaactcctggtacatgtaagctattagaatttgaagctattgatcataaacgaacacgtatcaagatagatccatgcagagataataagccaggtgaattactacctgtagttgaacgtactgaattcttttatcaacgcttagactttaatgagttttttaaagttccgcaagtagtagaagtaaaagatgtatatctaccttttacaacactagatctagcaaaactaatctgtgaaaagaatgatataaaatttgatttagatgatttctatcatcaagaaataaattcttataatcaggatgtgactatcacatgtaatccagattcattaaggtttgtgggtgaatttaaaataaagcttataaatacagttaggcaagatatctctttattaactaaagtaaattcattcccaactattgttaaatggccagccggaaatggtaataaaccaactgctgaattcattaccatgtctttagactttacagattatcgtagctttctattaccgattaaagcattcaaagaaaatccatattctttagaaatggcagccatcttaaagaaagtaactggtttagattttgttgctaaaagtagtgctactaattacaacattactaacatcgttagaaatggggtaaataacttcatagtggattataatggaccagtggtaccagcatatagccttaggaacgatatcactaatgtgatggttttaaggctgtctaaaaccatgtgtcctaatatcaatggccgtttattaattcactataactgaggtgtgtaatggctgatacaagagctgaattggtagctgcttggaatgtggctaataaacctaaagataataatggtaggcctagggatttaactgttgatgatgttgaattcataggaactgatacattcttagcaactggtacaaatgccaaaacaacaatgagagcgaagaccagttcactttattttaaaggtgaggcagttatttactttaatagacgctctttaccagagtactgtcttggcataaaggtaccaggtaaaccaactgactatactgataatttagaagtagctgaaaaattaagggatgtttacggtattccatttattatagaagagatacaaccgcagcctattactgggaatacggttacgatacatccatactttaataacttgtcatggataccaactataccagtaactcttgaatttgaaagcagttaaataaaaaaataaagacatagcccctctccatgcggagaggggtttatgccattacttaattatcaccattcaaccttaaattcaccgcatttaaatgacagtttattagatcgatgatctcgcccaaaccaacatccttccttggtgactgcatctgcaatttgtggtttaaccatgttgtttttgtatgattcacgaagtgcagtatatagggctttatgacatgtttcgaagaataccttattaataggattcttatcgttaactcttgctagtgaatgtttatcaagcagagtgtgcattccaattgaatacttctggatagtttctaaatctttcttaagtgcccagataccataggttacttttagagaggtattggctttggttgatggaataaatgctgatgggtcatcaatcattggtgctaattgctcagtagaatatggattataagaaagatattgttgaccatcccaaatatacatatccattgtatcttgaacgacatatagaactaggactttaccatttgccggtagatcacattttgtatttacttctacagtgtcattgaaatctggtttatagttattataactattcatcaataccacatcatcgaatagccctgccatattcaccgtgtttttgtttagtaattctttgaagaatttattcattttagctagcattgtattactccttttttacaatatttgattaaacaacacatcattcataaataagcccctccgaagaggggcttttatgcttatttgataagcttaagtagaacagcattatcaacaagagcaccacgaataacttgtagataagatccatcagcagtgataatgtacattttgtgtgtacgtgtatcatctgaatctttagagctatttagacgttttgccattcccatgattacttgagtaatcttaggttcggtaagtttactgataagtactgctttctcagtgtaaatatttaagcaggatagttcttcaagacgccagccagtttggaaacgcactgatagatctagaatagaattaccttcttctggatcaatattaacacacatactccgcccaacaataaacggaatactagcaataaatttatcagctactgacttacccttcttaccgatcagatatgcgataagatcaccgatatcctcacagaagtcatcaatagttaccttctgactcattgaatcagccaggaactcattaactgcactggttagcctttcaactaggaaccgatagtagcgttgagtcagcttaccatctagcattagttgcttaaggcgctttgcaattagatgcggatcgggttcttttcgaatatcctcgatctcatacataacttcagttgaagcatcaaatggatgggacgacgctgcacgatactcatgtgccggaactacatcatcttcacttagctcaagtgcttcacgaactgcattgagtgcgccagcttctgcttcaagattatttgcacaggcaatataaccttctaggataactggatcatgttcacgattatcagttaacccggcatcatttggtgaaaactcttcggctacttctttaaccggtttggcatcacccataatggtagatagcttataactggttgcagtacgtgcgccaccaccacgatgtgcttgacgacggagatcatcttgaagctcatgctttagataatccatttccatgtgattctcccacttacgatatacttcatgtacagtgttatcaggccatttagcaaggaagcgacaatatactgccgggtccattaggatgctgtatggattagctgaactagccgtacgtacccaatcaggtttatctgcaactagatgagcaggtcggatttcaataccgcccggattatagataacatccatcggacgatctttattaattacaaatccgttgggtacataatagttcggatcgaatacgagttctttcacatcttgagggatgggtagatccgtattatcattagttacagtatttgcattttgttgtagttcaggtagaatcattacatcacctccaccagggattgtatcataactgctatttggagatacttcaacagttgcaccccaagagtctttaggttgcatgactggtttattttccaggaaaggagaagaaccaggtacgtcatatgcagcatttgcaattgatgaaccagtgtcatgattagttgttggtgtatatgcccctggaatgttcagctgtggattagccatggtagccggttgaccataggtctgttggatacctgcattaattggaggtagttgtgaactcatgccaggacgacccattgctgcacccatcccagggaaacctccaggctgtacaccaggttgttgatatccaccctgcatcatggtgttgccacccatacgcatcttttggatatctgattcaatctgtccgattacaccaagtgcctgttggatattcggcattagatgttgaactagactttgtaactgcgggaaggtttgagcacatttaccaacaaaaccagaccatactagagatgcagcttgctgcattgcctgctgtgggttgttcaccatttgacgatgaataaatagaaattctagaaagtcaataactttctgagcccactggtgataatagttattctggaaaccattactagatagcagattatacgcaaatgcatgaagctgagtggtggtagccgcattttgagcattcagccggaacagtccaattacaccattgaaatatggttgtagttgaggatgttgttgatgtggtgataactgtagcggtaagctaaacagataattcccattaggtaggttaggatcgaaagtactggtatctacactctcaaaatcgacaggtagattgtactgtgcatagttcatgtgaataatacctattaagtagttaaagatttaatttattttgcacggaacattaattgagcattatcaattatttcccgtacttcttcacgacgttcaactagtccagttggacccactttggtatacatattaagcctacctcgaccatccgggttgttcttaggttggtttttatattgacctacctcagcaatagatgcgtgaataatcctagatgagtcattgattagagacttattatgtgccttagctgttttagctcgatcctgtgtaactaggatagatgtccctttaatcaacatactggagtttggattactcattgtatcgagttcaccatgatccactgttaatcgtttaatagctgtttgtagtttaaaggaacgttttaaaccttcatttaactcttgcacagtccattcacgatcacgcctagactggaacatataaccaaacatacttacagcatagttaaactccgacatcaagtaatgtagcactgttaaccttttaccatacatactagtttcatcaatatcggtagcataaagatgatgagccaaactagtcatgatctcgtaaagaagttcccaaatagtacttacattgacaccaactgttttaagttcttcaatagtcatttcgtctagtgaattacagaaactgtgtaggtgtgaatcaatgttttcctctactttaccttggtgctcaaaatcaccaaacaccatgtgacctaggataacacgccataagttggtactatctacatactcaggtcgagtaaaccgcattggaaacgcatcgaccacataccagaaaccagcgataagtcgtgtggcaaaaatagattcttgatgacgaggcataacaagaaccatttcaccggtgggatgtttgccttttaacgttgcactggaataaatattccacttttcacgtggatattcttcttcaggaaaatcagacagtagcccacacttaatatctacattagcccattgtttgaaagtttgagtcactccaaactgacagaagaaataatgagctaaacatgactcaatgtgtggtcgattatccagatctcgtttagtacgcttagccatttcattgtgaatctgtgaccagatcacatacatgattttacgctgaccattgcacatgtaatggtggtcagtttgtttaaaggttagcttagtacgacgaaacgggatgaagatactatcattaagtacagagaacccaacatcagttaatactggtgaaccaatatatttcgcaccattgatagttaccatattgcctctcttaaaagctggtaacagcattgggcgaggataaagcatttcccctttataactaaacattaggtcaatcatgtacatatcagttggagcaatattggcaatacgcttagcattatattcccgagtaatctcttcaaaatgcttaagcggcgtacatgcacgattgccttcatatttgaagccatcgggaaatagaactgaactgatatcaaataaagaatcaatataacgcctagtcatattaacaccagtatttggatcacgagtcatggtgtgttcgactgtgataccatttgctagtgttggattcatgcaaggcgtattttcacgaatcttttcaattagaaatggatccggcattataaactcctaaacttttggcaaaattaaatccatcagtgaacctacaattttaatggatgatactagatcagaggcaatggagtttagatcaccccattttagaccatgaatcaatacaacatcttttggtttgaattctttatcaaacgtaccagctgctttttcctgggcttccctttccttaatatcagctgctgttaagagcgcagtcttaagacgttcaataactttcttatctttaattccaaccattgcagcagcttcttcatgtgttctaaagaaaccattttcatggaactgttcaggaggtattacatatctcttttcgccattatgactgatacacccatgcttaccacggatattaacaataagaccaggatctaatgatggattatagattgactcaatggccataattctgccagccattacataaaacaatttatctggtttattgatgtcagtattatacgttaaagaatatgtttcattccatacttgattagaaagtgcttcttcttctggactaagtccgctgtaaccaggaggactaatatttctatttggataaaattcaaaatactgactatactcagttttaaatacttggatacctaaactctgaatccaaccgccatgatactgatctactagttttgataagtcaattgaataccaaatagtaatctcagatagctgattattaaactgatcgaatgtctgtcgactaaatgactgaatatattctaacatttcctcaggtgtaaaacctggaatagatttagccataacttcatagttaaaactatcatcaccactccatcggtaaatgaccttaactactagtcgattagacattacatacttacgggatgtcccaatattgatagcgtgaccagatgaatcgactacagtaatacgatgaaatgattcattccgatactcaacaaaacgtgagacagggagattccaattagcgtatggatcacccttagtgtatgcagttcccgatttcttatcatacgggtgatcgatagtgggcttaactgatacttgagtaagccccgcaatttttaatgttaccattgaaatctaccttaatcacaacggcctccaaatctacaatgttggggagcctctttttagtttgatgtacggaccttcccttgaaggattcactcttttccttattacttgatttctgccatttatgcgggtcactcgaacaatataacttttcggtggcccgcttaaactgtttttcttgagggatctcctcaatgtttttcttggcataatctgtaataaagtcctctagccctttgggcataaaggcatcctgaacaggatggaattcttcaaagaaagtattaatgtatttatcatcatctacggtagacatcttattatctaccatggtatttttttctataagagatacccttagggcatcttgccatctttcaatgacttctggaaataattgaacgttcatttggattaacctatttttaaattagaagatcatgatcattactgtaatatagatcttaaactttttttaatgtaatacaacataaagccctccccgaagggagggcctatgtctgttactcttctaacttccgggcattaccgtcttccaaataacggatagtcccattttctagataacggtaaccctttccagctcacggcttaagatcagcaagcttaccgttgaactgagtttcgcccatgactttctggaagccagtgatcttgaactctagtgcgaacggaatgttgttgacgtgtaggttgaacggaatggccgcgatttcgcgagtaacctggtgaccaccacgagtgatcggtaggtcagcgataacagtagatacgtagaagaactgaccccaggagaggatgtcgttttcttgttgtactgcgcgggtcggaattacaactagcttaccatcgaatagctggttgttggtggaaacgatatcgtacttgagataagcacctagagtacggtcgtcacctttagtcattagatagttagcaatctctttgtcggagcagaagagatacatcggagtttcatcctggttaccggagataacacggaaggcagcttcaatgttggaatcacggtgagccgggaatagctcagctttaacacagtttaggatcgcagcgcaaacgtcgtcccaacgatctttagacttgatggtgtcgatgactttctcaagatctagttctttgtaacgataggtcggacgcattacagcggatagtgcgccttcgatgataccaaacttcggacggttgtaaccattgtgtacaacttcacgtagttgagcaaggtagttaagcatgcgcttaacagcgttgttgctgttacggatgttggtgttaacagttagagctttaacaacctcacccggaccttcatcggtcatggtgtccatcggtagagttacaggagcgtgcatcgggatcggatgacggaactgtagtgcacgggtctgtagtaggtgaccacgctgacgacggttagtgttggtgaagcgagtgtctagttcgaaaccgataacagctaggtcagttagctgatctagaatagctttaacagccgggtcagcattatccattacctgaccatcttcgtttagaactttatcgacgtaagtgtcggtagcaccaaacttagaatcgcctttggataggctgatagtaccaccaaaaccaacgcttagacgtaggcttagtttagcggtcttaagatcattgataacaccgtcagctgaaccatcgatgaaagtggtatcgccactaacaactagatcatcgctatcgaaacggataacagcgttccgggtatcaccaactagatcgggctggaacacagcgcgaggtagacggtcaaccttgaacttaacaactttaccgccgagtagaacgaataggttctttagacgaccagccggatcaatggtgtcagaaacttcaagcatgccacgctggatgagtaggttagcattggagttacccattagatcaagacgtacgttcgcttttagcggagcagtagtgatagttaggttctgctcgttcttgatggtgtacggaggaacaagagccgggtctacgaagaagtcagcattggaaccagccggatctagggcaggaattagcgcaatgctttcatcgtcgaggatggaaggatcacgataggcttctaccatgttcacttcttcattatccatcttaacgccggatacttcgtggtaaacgtctttcattacagcgatgtaaggaagaacctgaacaacaccaccttcaatcgggttgataacggtggtcggataaatacgctcagcgaattcatcttgacggctagcagctaggttataaccaatagttacaacacggaaatcacgctgtgacttctcgttatagttctctaggccaacaccattttcgaatacttgaatgccaccagcagggccattgaactgatgctgtacaaccttaacatgatcttcattagaagctttagctttggtaataccacgtagtgcacggatatatttagtttcatcagcacaggcaatagcagccatggtagcagcggtgatctggttctcacggacacgttcttcacgagcacgtacttgaggatcactggaacttactcgttcgaaaccataatcgttaacgagcatttgcattttgttataaattgcagcagcatcttgaacgtcggtagcttgtacggtaccgaagttttcatgtgaaatggtgctaacaagggaacgaccttgactaacaacgctgtcatttagaccaatttcactttctaggcggccaatgaaatcttccattgagaagacttcgtatttcttttcgcctttgtgtttaaacagttctcttagggcatgtacgctcattttttattcctacgtaggatgagtttttggtttaaaaatttgggtctactaagcatcttttccggaatcaacctagcagctctccaaataataggtaaaaatttgtgttgacgccacggattcacgtgggcgggtgttcaacatttcatttatcatactatcaaagaaagtatggttaagttgaattgagacacgtctaggatcgctacttgcaatgtgcgcactctgctgcaccgcaacccacagattctcatctacaggatataggtaataatcgtacactaaattacggttacctgcatccctaagttcattagtcgctaggcggctctctaaacgattgtgtaaatccttcatcttaaattgttcaggaccgtctatttcacctaactcagcaactttgattatcgggcttactgctaacttaatatctagtttttctggtaatagaaaggggaaagcagttaaagcctgatgtatctccgcaagatcatttacggaggtttcggaaactatatagttggtgtctaacaatttgttaaattgtacacctgctgttttatatgattcaaaaacagcttttggcataaccagaacttgggtcattgtgaaagtacctatattgtaactttaggcttttgggaactgtctacatagcaatatagcaaatacattcactaaaattactagctatctaaatgatacactgtacatctcttaatttcacaattggaaatctataaaaatgtcaagtccaaaacaattactcgtttcatgtatcactctattatgtttagaaaatcgagaagattctccagtggaaccatccaatgaattggttactgagattcttgatactctaaatgataagggtggtacattagatgtagatcatggtcgacaaacatttttagatcttcgtaatctactagtggatctaaataagaaacagaaagcatatttcccagctacccaacaggtattacaatcactacaagtatgttgtcgtgaagaaagttatctatacgatgctgttaaaaatgcagtagaagaagaatttccaaatggcatggcattagccatgcgtgtaacttcatatcgtcgtgatctaaatagctacttagctgatgaaaaggtaaaagctattgtaaaagaatgttcatcaaaaattcttttcaatagaggctctgctgatattccggcaatcattaatgaaatggcaaccagagctgacccatatattcgcgcgcgtgctgaagagaaacacccagctgaaatgggtgcacttgattttggtaatttagattctattgaaggcttctttgaggaagctaaaactattctttccccaaatggtgctttccgtactggatggaaaggttttaacaggatgcttggtgatctgggtgcattaaaacgtggtgaatttattatcggtggtggcctacaacatcaatataaatctggcgtttctatgagtctattttgccatgtgtgtctatttaataaaccatacatgcgtgatatcaataagaaaccattagtaatgtttattactcttgagaatgagattccggataaccttattttcatttatgagtatatttacgaaaatgaaacaggtatcaaggtagatcgtagttctattagtaaagctgaagcagctgaatatgtatcagctcgtctccgtgaaaatggtttcgaaccagtaatgtatcgttttgacccaactgaatttacgattgctggtttagttaactacctagatacatatcaagcacgtggttatgaactacaatatctctgtgtagattatctaaacatgttgcctaaaactggattagtgaccagtgtagcaggtgatgacgttcgtctcctatttaggcgaatgcgtaactatactgcaccacgtggtattacattctttagtccgcatcagttaagttctcaggcattagaactaatcagagataatatcccaccagaagactttgttaaacaagttgctaacaaaggttactatgacggttgtcgccgacttggacaagaacctgatctggaattcttcttccacattgttaaagtaagtggtaagtattatctaaccgtacaacgtggtaaacaccgtaacgttgtaagtgatagtaagcatcactattttgttatgccgtttgatccagaccgtattggtggtattagatgggatatcgataaagaagaaaacaattacatggactttgtaccaagtcttagcaatatgcaagccactggtggagatgactggggatattaacaacataaagctctcccttcggggagagcactataattttaataggtaatctaaatgagtgcaattgataatttagtaaatactttaagaaagaatattagtgaatgtagaaagtttaatcgacccctatttgcacgtgtatatgccgcatcacaaaattacgataaaatccgttatgctgtagcagaagaagcccattattttaaatatggtaaatatgcagaaggtaataacctaaatatcgatgaacttatcagtgacctatatctgtactacactatctatgtcgatgtgatccgtaaaccattacccgatcctaatgggaattttatcagcatcgtaaaccaggatcactatacacacatctattgggatttagatcggtgtgaatctattccagatgatgtaaaggaattaatgtaatatatttaattctgattaatccattcgtctaataatcaataaagcattttagccctcttaggagggcttttatgtcgtatggctaatatgctagtggataacgaataaaatcgattatagagcaaattagaaggtattaaaggcataaagaaagtctatctctagacttattatttttaattaaaaaaaatataatctatactgtgtctccttttagggagacagtatgtattagctaacgctattagaataatgctaatattgtttattattagaataaggatataccttcggtatagtttattatgaaataaaagcccctacggggcgatccgattcctcagttccacattaggtaagattcatgagtaatatttgattaccagtattactcaatgatactggtaataatatactagattattaacaatatgtattgatcattctgattaagtcaaattagttaataaacaaatcaattatcaacgagtgataacgggtattgattactagctaaagagattaattaggatatctacatgaggagtcgctaccccatgtattctggagtttctctttagcgggagacttaactccacttgggagccgctttagcgggcggctctcacttaaacaaaaaaaagaattcagataagtccctctcctttaggagaggggttgtttatcataggcttctcctttcggttacatagaacttcttctgatccatgtcagtgtatgttactatgaaattgtcgaaggggttgatggatacggctaaacctgcgttgttgacgtatcctattgtagggccagcccaataaccaatgaagttacctctacgatctcgacattggataacattatcggcttgcgttttcgcaaccgacatgctatgggttgatccatcgggtctcttgaaaaagaaacctacttcctgcattctgtgcaggtcagggctaacattgttagcggtaactggaattaacatgattgttcctcttgttaatccaagcccacttgggcgaaaatgttgagtattttttactcaacggcatatagccctactgctgtaacagtagggctaattcttttattcttaaaagtttaactgaataaatgccctctcccgaaggagagggcttatgtcgttaatttatttaaccagcgatgtttccctaacacgagagatgcataaataattactgtaatcgctggggtcgtactcatcataccctagacaacttgtatgaatatattcagtactgatattaatcatatcaagagtaataccatcaccccatttcttagttgccatctcgataatatcggcgatagtattggctacataacaatcacccaagatataaaaggtatcttcggtatcatccggacgaaaatgacgaataccattctgtgtatattcacccatgttaattatcctcttttccttcttgagtatgatgagtgggctctacccagtaaaaatcaataaacagatcaactggtttacagccaaccatctcgctgtcatcggcccatttactttcatctacgataatttcttcattagtcatttgtatttctccttatttactatagtaaatattgtttagttacatagtccaattagtggcttcatcaaccatatcagctgcttctttatcagaagcgttccagagtttatcagcccattctttatccagttcattttggatgttttcaagacgcatgtaattatgccatgcctgacccagccgaagattcttgttatttttgtaataaataccaaactcaccgcgaactgatgctggaattgaaatagtcatttcatagtctccttagtaactatttgacgtgcttctttataagaaatattcggattatcgttgatgtatttaagaactttctgatgtataatgttctctcgctcagttagttcttttactactcttttaaaataacctggtgatcgtttcatagtcatggttcttcgattaacaggttatttgcctcgaaaaagaatggggctgaccagctataatctggtgcatctaccagcctgacactgttctttattttgataatcttacgatcatcccgccagttttgtggtccatgtttaggaacagtgtagtattcaccatcgggtagattagcggctttctcccatccgagttctttaacgctaaactttttatcaatagtcattttctttatttcctcgctgtcatgaaaccactcggtgaccgtatcaggctgcgtcctcatgatttatgctgcacgtgggattactgatatcttaagagtcagatcagctgcgtccagtaggtttaccagggcatccagagagaacttgtcaatcttgcctttgagtagatcattcaatcttggctgcgtaacatgtaggcgagcagcagcatctttttgtggaagatcccagcccttgatagtacgggtgagagcccgcatgagttgggaacggatacgcaggttttcggtttcttctgtcgagtcaactagtttatcccaaacaccggtagtacgttcgtttgtcatctgtttgttacctctttaggtaaatgttcggataataaactacattatatttaaagaaatcacttaccttgaattttatgttcggtgcagtgattagataacaataatcaccgtcaaccataacgcgtcgatcatggctatacaccctagggccatgtaacggagaagttacataaatcccattgggaagattctgtaaatcttcttttttcagaaacttaccattaggatttatagttgatggataacacccctcattaagtttatacataaactatctctctttataaaaccacctattgtaaggtggttttatatcgtgtataatgttctttaatcttactgaccgatataggtgctggtatacaggtcaatggttggtttgtgaatagtcagattgtattttttagctagctcatcaatatccttggagcagtcaataaacttaccagtctcacgatatcgcattacccatgaaccccgaaatggtgtatcatctagtggattataaccatattcacgacataccacaattgcttcatttcgcggggtggctccagtagtgacaaagtaattttcataaactggaatcatcgatacatctttattgctcataataacctctctaaaattacctgaagggatatgcatgatatttatttttgtttttgactgatcatggaggcattggtgaagtaatataacgcatgtttccaatcttgagggtcatatgtgcacttatgagcaaccacataatcaccatcaatttttttgaacaagtttaccatgatcacctcatccatatcagtcccgttatgcacagtttgataattcagtctcaccaacatgtcatctacattggttttcaactggagaccatctttgaagaaatcacgaacaccatccatgatttgttcattgcgagacaggatgttttcagagatctgttcgaacataccccttgcaccgatcaaacgtaattgatcgtaattgggttcacccatgcagatggcctcatcatcacgattacacatcttctccagcagaacgatagggttataatcccaagcaaccccaccagttacaacagaggtcaaatagccatagagactgagttcactgtcacgctcatttgcaggaatcatgcggttcataattaacgatcctcgtattggtgttgcagcatagctcagcaagtctcttgagctttctcaaaactagccatcgagcgggtgcgcgcacgctgtagaatagacaagccgtattttttgaacttcttcttgtggatgaaaccaaggcgttcgtagatgaagtctttacggtcggcgcgaggtttaccatcagctacgataccacggtcgaaaagagcccagaacagagcgctttcatcatgcaggtagttggccatttcctgaggccactgaactgcgcatagagcaacgatttgttcaagtaaaccactatctgagatggcatagtactcacgaccctgaacatagttcattttgtcgaagttgcacatagccagtctgccagtaccctggttgattttcttttgaatgtgttcgttcatggtttgacctattttcagatttggattaattatagctagacgaaggtattgcgttcgaattggatggaattacgttcaacaatatcgttgaggtatttatcattgtcgataaattccccagtgagcatgttacgcagaacccagttcccccgaagtggtataccgctgttagggttgatcccgtattcacgcatcaaaatccgacgattgtggtcaacacctggctccatgtaagattcactgataaaacattccaccatgttgataacttctttagattcgctcattgacttattccttcttttgcaggtattatgtaatacgataatggattatggctttaaccatcagatccttttcacgcagttggtttgaatggatttgcactacgactacgtttttgatatgaaattagtgcaccccatacattatcggctgatacatattcaggcatagctttttcatcattgtaactgacacggtatgccttagccacacctgtgctatctacaatgtgaactttttcaatgacaaatgcttttccagaaggcccagggatatgtaatcctcttttaaaaagttcttcaagaatgcgttctaatgcaattttagcattagggtaatcattatcaagtgacttaataccacctttaattttattatctaggtcactgagtgcctttttaaaaacactaacatcatgatcaaaacattcgagagtgtgatcgaagttttgcatgagcgctattagtagaccattaggaaatactacttttgacatatatcacctattagtaaacagttgggaacgtttgtaggaaccaatcattaatacgtgtattaacactagccccgtgttcaggcgctactttaaaaccagcgacgatgtcctgtaactcttcagtgagtttgttgtgtactttaccttcacaatcgataaagtcttctgcggttggcataacctcagcgcgaataacagaggcacgcttagaaagcattgtaagaatttcattagacactgaagcagcattacgcaacttattgatttttacatcaataacagttttatgatagattttaccaactgcacacattgtaactgaaccaacaaaaataccaagacagagtgatactttatcaatattcattttgtatacctatttacgtttattgaagtgattaaaaaataatacgatgtagaaaataaaagggagtccgaagactcccattatcagttacacatctgacacatcatcgaacagatcaagttgtttccgattacgtcgttcttcttcttcgatacgacgattctcttcttcaatctctttctgccgtttgacaagccgcctgtgcagactcatttgccatgcagtatcataacggcatcgcactgactcaatatatttaagccctacttcattaatgctctcaagtagatccagtgacacaagtgtctccttggaagcattaatactagctttaagataatgaatcattgcagttgcagggtgaaaaggtagcttatctacatcgatcgttttctgatatgctttcaatctatgtatgataattcgtccataatagaattcatagagtttttctctagaatcccaagcaagcttaccgagtacggctccacttaccatccctaatgtaagagatagtttagagttcattgttaattgcatccttaatccagttacggatttttgatttaattcgatgtttatcactgacggtattaaacatatccaatccatcattaatgacgtacataagctctacttcaataaagtccgtcattacttccacggtggtattatctgaattagatttgatataatcggaatagtcctttactttttcacggatattcttttctaatttaatctcattataaacagtcacaccgacttcgaacacatagatggtaccagccagcatgagaccagtttttacaacactaccgataatggaaagcataataatatcctattagttaatgaatgtagatttattttgattatattaaaacttgatatttagaacacgtttagctattacaataccaacatatactcctagtgctatctccgcatatttggtgatgacgtttttaatcttcttgtgtttaggtgcctcaggaacatccgcgataagtttttgaagtttaactttatcaatattcatttgtattttcctttttacgattaattgaaggtttaacaaactcattcaaatataattttattattgtaattatatttgaatggggcctcactgaggccctatccatttttacatcttacgaactgtatcgaatacttgattcgtatagtcatcgccataaatgatcgacagcttatcacgaattacatccagtcgatgtttttcaatattgctctcagcaacagcactgtcagttgtctcagtcattgcagtattgacgaacatcatgaactcatctgattcgccatactcttttgaaatacttttaaactgatccctgaaacccatgagcttgtcaaagttggctttagtttccttagccttcttgtagataacatacccagttccagctagtgatgcagtggccagaagaaaagatacaccttttgcaatcgtattgaatttcataataaaagcccctttttacattaagtggatgataatgtttacagtattgtcacaaatgtaatatactgtttaaatatgtttgaatatacgacataaagccttcccctgagggaaggccaatgttaaaccgatgaatccatccacggtggataaacaaccacaatctggttaggcatgtgattagaccagtcttcaatgatagttctaacatcagagaaatctaatccaccattagcacaccctagaggtggtatgataattttccaatctggatgaatacagtcttcttcattttccgcagaatccgatacgttctccatcatccactctagcccacgttcaatgaaactaatttgagatgggttctgccagttatccttagtagggaacatcatgaaacgtttaccatcggatgctttgtaaataaccggattaccaatagtaataattctctttttgcaatcgtgtttgtatctttcaaaaagttcaggatacttttctttaaacgatttggctaaaccagcgcccatgacgccaacaacattaacagtgattagataaagatcaccaggtacattgaatatatctttacctataataaattcagccatgataatggctccttctacaagagtactaatgagaagatcaaaacatagaccttctcattagattgggtgcatttccaggcttattggatttctggattagcgttgtagaagccaatataagccttattaaatttcaagtaataattatactctgaaggctcaccagttatttccctaaataccttagcagttataacttcgaacttagaacgccgtagcattgggaataatttcttactgcgcgatagctcacataatctaatcgagatagcttgatctttaaataaacctgatttggtaaaaaaagcgccttcatgaagccattgaattacttcattaaagtctgcgcgccatttcctatgctcatttaaagttttaccatttataagattccataaagctctaactttagatccaatagtaaaaatacctattaccattactgctagacatatagcaattataaatgacatatgtcctcctaaataccattgaagattaaagttcctattagtgagagaatgaataatacgaccacatgatgaagttttatccatgtttcaggtactaccggttgtttaggtttatttaaagggatgttttccatgtatatgctccacattagttcatatgtgtaatatactgtttaagatctttcaaatacacctttccaattagtaggtcttggataggacctaggtagtgattcagaatgtataatgaatccctcgatatccccttcttttgttttaacagcaactatatctttgataataccttttatttgtaataagctattcataatctcacgatagagttgatcaaatctatttgcaatgatattaggatttattggataaccacaaattgatttatagaaactacacattacatcattgtatctatctggaacacatgtccaaaagaaattatgtcgttctttaatataaagaatgatcaagtagttaagatcatcttcatcttttgcggtataattaaagtattgttttaattcagaaaagaattgttgtgaccacctcacatcaactcgtataaatagttgttccataatacacctaaataaaccctccacttaagtggagggctctatttcattttggtcagatctatttaaaaatatagctaatgtaacaacacatacatatcgatgcggattaggattattatcaccagctgcaaattgttcatctacacctaataatacaccgtagtaggttttaacaacattgttgtcaactgtttgaaacttaacaggcatacctggtgttaagatatcagcatcgccatggttccattgtattttaagaaactggccttgacgctttgctaactctgtataatgtttaaatggatttgatgtggacctttgtttagtccattggatattttggaatccagtttttaatccatcgcctctaacctcatacaagttactagctgcatctacaagcattttattatctttactaatagtaaagtcatctaatagcttatttgcatctgcgaatctataaccacttccattatcaaccatctcataaagagctttatctagcgaactagcatcacctgttgccagaatggttgtataagtatcaccattcacatacgttttctcaactccgtaaaggcgatcatttggaacgttaattatatttaatgtcttagcccctttttgatatttcttagtatcataaagagaataaacatataaataagatccctgaatatatctaccaagaccagtggcataaacaccaccttccctgttctgaagtatattcggtaaatcttttaatggtgtaccatcaggaataggtattactggacgaacttctgtattccacccaggttccatattgatgtcaattactcggttatcgtcagcttcggtcaactgggatattgattgttttaagaatgctcttaaaacatctgctgttgttacatttgtgaagtttttaccaatggttatcatcagtgattgatatacactttcttcaacaagctgaaatctataaggcttataacttatttggttcatagcctctttactagtcagttgtgattgtttattagttagtgtaatatcgtcttcaggtgataatacaacgaagcacctatagcgttttacagaggctttacgagacgtatctaaaagagatgagtttggtaataatggaataaatttaacatcgcacctaagttcatctcgacgaggtagtatatcgaattgaaaatcaccagtaccaataagtaactctgttaagataaggtcaccataagaaccatcagcatagtttctaaatgtatcgaaataatctactcgtaatggcactacccaatcgaaatcacctactagaattttagcttcgattttataagcactgtaattattagtagagttaataatagtatcaacttcacgcattaatgaagatgcatcaactgccatatcaatcctccatcaatacgtatttttcaatttcatcaactagtgacttatatggtttaatattttgtttttggtcttgaacacgcttgtctaggaatttcctagtggccatggagttacgacgcatgttcattgtaatgattgaatcaaaaacactactacgtctttcaacttgtggctctaatttcatggctgtgaaatatacttccattaaaagatcttctaaaccacgcaaatcttcaataggtggaaatgtatttggatcagcacccattaatgtcagatcataccaatcttgaaaatgtcgttggatatcatgataaatctgagcacaatcggaatgtttataaaaaccaatagggtgtccttcagctagtattaaagctaaaccagcggctgtctgacgaacagtttctaactggttagtacgtagcctatctactcttttatcgccagttgtgttaaatggattcttacgaagatactcagcgctatatccagcgatcataggaacctgcaccatgtattgcaggttccatatgcgccatgcagctgagttacgagtaaccagcttataatccatggtattacctcaatgagtacttaataagggataataagacgatatggtaataatatcgttctaggttatcccaactacgtgagcattttgcaacttctcttaactggtcagcatttactgcctcaccattaatcatcgcccaaacacataactctaatttagacataagtttcttatcaccacgatagaaagcttctgtaaaaacatagtagttatcgcgaactattggatatatatcagcaggtatttgccatggtttaactctatcctcatattgtggatcgattcgtttaaaccatggtaagttcctttcagcctgggtcctatatggacctggcgcttcacgcatgggtctgccttcacggaatggttgtccatctggccgacacatggtttcaccatcataacgagattcaacatcaataggggcatctattgggaataccatcctagctatacctgtaaaaccaatagcctggaatactggtttccaacgtgaaatcttagtagtaactaaatgtgctttttctgttgcataacacattctagctacatcttgtctaacaatagcatcccatactgtaggttgtgacatcactggttcagagaacacatttagtagctttattttgtacatacgtggatcagctgaggcatctaccatttgtaggaaagccttaactgcgaaatggtcgtatgtctttgtaagttggtcaggtactaagaatgtttgatgttgaggcgaataaaactcagtgatatagttcctaattatttccttatataacttagtcagattagtattatcttcttgttcttgctcagtaacaaatggaccacatccattcatcaaagaggttgaagagtaataataactcatctgtgatttagttattaaatcatcatattcctgctgagttacataatggatcatcttccatgttacagcataggttgaatcacgcaaaatggtctgtcgtctaacagacgtgatggtgaataatcctgatcgtccatcaccaacatccgctataaacatatcgtttttttgcggaactaagaatggatatgtaaagcctgtaccatccactttaaatttagtggtgttttcagcttggttatactgaagagcttgtgttacttttagatccattcctttaatagcaatatactgctgtttatctggacgacgatgaatatccaatgcagttggttcttgatcttcgcgtagtatttgtgaaaagtaatctacacgccagtttgagccagttatccatgccatcaaatctgaacgtggtacatacttggtatcaacagcaataccacggaaaacatctggacattctttagggttaactggtttaacttcaggatttactggaagttcttcatcttcaattgttaataatgccattattcttttctctcagtaataatgtttccatatagaactgtcaatggtcccattaagtaagttggatcccaatctggtccaatacgtgtattcatttcttctctggcatcgacaatatctttccagttaattacaccttcagttgtcggattaaggcactgtgtatgacaggtagtaccttcccctggacattcctcagatggtaacctatccctacctttacctaatagcttaacttcttcaaatggtttgcgtccaataccgacaccaaataaattaaatatagtccaacatacacgtggataacgttgtaaacaacgccatctatcatcaaatactaacaatagatttttatgtattgatatctgtacatgataaactttacatggatctagcttccatttcgttttaagcatcaatccatctaaataacattcagctctggtatagttatcattttcatataacctaacttggaagataccattttggtctattgcctttgtacctaccccttcaaaatattctaagaagaatgggctaaatgaatatctacctaattggtcaaatgacattagtgtaccggattcaatttcatcagggcacagtgttaatagaccactaaagaaagtcaactgattgattggaatattatcagtatcccatgtatcaatatctggatgctgaatataaggtatcttcttatctctaattaataggaacttatgataaagagatcctctaaactggctaactttacgatctacttgctgatagttctcatagatgtatttaggtctaattacagatggaactaaacactgatgcactgttaaaggatattcaatccacacatgtgttggtctagcatatgttagaaaatagctaaatctaacattataggaaccatcgctttcactgtcatattcaggagtaggtggtgtactggtataatcataccaaccaataacatcgacctgtctttcgtatataaccagtgatttatttttttgactaagatcagctaattctgtagttgggaacgtaaaatatttattcaaatattctgggaatgtttcttccattggccaatgtgaattttgagcagtattatagatagctgctaatattccttgaacgggcattggtacatcaacatgataggttaatgtgtgtactaattcctgaccattgttagaaaaccataaacgctgttcatctaaccatcgttgcgctaatgtaatatttttagatttatattcaatgtcaaatctaacgtccacaaatctacgaacgggtgtgatacgtacaccacgtgtttcatctacgaaccatgggaaattctgatgattcttaacatcagttgataatgtatatcgttcatcagctacttcatcataagtgataataatgtggtcttctggatcgaatttaaccacattggcactatcacagcaattaccaaacataccgccattcattggcactgtttgaacattacctggaaattggacaagagtgtcttcgggtaaacccatcatcttggccaattgcccgatgatatcagctgctacccgacgggttacagattcgtatacatcaggtagtactagtgttgtattaggcatgggtttaactccatgtgtttaagatcataagatcatggtctaacagcataaaagggagccatgaaggctccccgttatgtttgttacttaatggcacgattcacagcagtgttaattgcattggtaagagctacaatgtaatcaactagaacggtgtggttttcagccgattggccaacaacttcccatactgcactagctagttgccggactttctttttaccggctttactatccatgctagccactttagagatatcacggttagcttggtcaagacgacgtacaccgcggttaccgctaacttttagagaggcattaccaagaccaattagaactttagaaagtttcattagttcagtaacgtccttacggctaactttagcagtaccagtaccagtagcaccccattcaccagttggaagtgcaatagcagctaatcgttcaatatctttactagtgcgaccagttacatcacgtccagacttctcgaaggtaaaactaccatctagttttccactaatgaatgcgctttcaggatatttcttaacaggtacttctaatttagttgcttcttctagagccttatcaatagcttcttcactatcagcttcaatagccgttgctagatgaccaactaaacgttcgatgtattcaccatcgattttaaagcatttgttaataatatcactaatacgacgaacctctccagcaacaccacgtactagattatcatcaccttttagaataccattaattttgatttctttattttcaaaattatcggtgtccttaagcttaactagaagttggtcagctttagtattagctgcggcgagttctttttggttagctttaacatggatggatgcatttgcaccttcagcaatattgtcgataatatttcgaacaaacttaccaatagtgctattaaatgattctagtgaagtaaccatcgccttatagtaatcttctagattaccataaccataatcttccattgctggaataccaggtgaatagacatcaaaggcattgtgtagacgttctaagcagctattagcatgtacaaggaactgaggactatattgcttatgctctagtccataacgcagaatctcgatcatagcttcatttgatgcctgctcttcaagtaattgaccaatggtcttcttactgtcctcaacttcatcttcaagatcatcagcttcagcaactgcctcatcagcagcttcatctgcttcttcaacatcatcttcagttacttctacatcgacatctggaatatcaatttcaccttcagctagtttctcttcgatgtcatcttcagagacatcatcatcagcttcagcgacaattgtttcactatcatcttcaactgcaccttcttcaattgttggttcagcaatagtagatgctgtttcagtttcagcaactgtttcttcagtttcagcttcattaattaatacatcagtagaatcactatcatcattagttaattcttcttcagcttcatcccgaacttcttccaattcgcttaagccgtcttcagctacttctgctgtttcggcagcttcttctacaattggatcagttacagctacttcttcatcaactgctacgatttcatccggttcagcttcagcagggatactttcagattccgtctctactacttcagctacttcactatcagttgtatccggcgtgtcttccacggtttcaacaacttctgtttcagcatcagctacagctggttcagtaacatcgacttcttcagtttcagtaatctctgcatcaggttcatcattggaactttcatcagcagttgtctgttcagcaccggcttcttccggtgtcacatcatcatcgataccaggaactgcttcgcttacaacttcaccagcatctaatacttcatccggtagtgtatccatagtggatgacacgggttcatcaccagctggaagttcttcagacagtggcgcaggaggcggagtttcgtcaccaagtggggtttcttcagtgggagttaattccactgctgtttcaccaggtgcttctgcaacaggtactagttcagtatcatcagccgcatcttgtgcagcttcaataatttcagtggttgaatctaaaacctctttaccaccttcagaaattgtaccgatttcttcagcgatttcagcttcagcaactttaactgcttcttcgccttcttcgacactagtggtagctagcggttcaggaatactttcctcaacaacagtttcttctggtacaacttcttcaacaattactgctgacttatcagcagcatgtgctgtttcttcatgttcttcagcagagataatatcagtatctgttttaacagtttcattctcaatagttgcagatgcatcattatctttctttaaatcttgaactagttcatgatcatctttaacagatgtctcgactttggatacatcctgttccacagccgtaccatcttggttctcaaggctggctacatatttgtgaatatttaccatcatgttaatataccttctgtacagagtttatgagttatgctattcgtcttagtcataactccaagcgacgaacgttaacattcaaaatattgcgctggaatcttactttagattttcatcgcatacattgagtatggcagtcaaattacgacatgttaatttaaataggtcgtgataaggaatagccaaccaatcaacatatgtttctaccaatgaaacaagttcttgtatttctctatcaggtcgcccttcattacgagcacgtgttagttcatctctaaacctgattaatgcgcctttaagagtccttaaccgttcatttcgacgagtacgcattgacgcagcatttgcacgattgatcttatcaactaccttaacaactcgatcaataatactttcagtaacttgatggttgaaatgttcaaattctatttcgactggtagtggtctaggggtttcttcagatggaactaaccgtgaagaaatatccctacactgatcataagcacttgcattcttatcgggattatagttaattacaatttgatgattacctagcaaatgcaatgatacaaatcgattaccttgatcgcgataaacagatggtgtggttattttagttggagcactatttaatagtagttctgctaatgcatctggactagcatttggattcatatacgaaggtatgatattagctggccttagaatcacattgtctaatccattaatatatccatcaactactgtctccaatacgcgtaagtgagataataaattagcactattggtaataggtttatatctaacacttaagttctgaatacgagttgtaattaggaatgtaggattcttatttttacgagttctagcacgactattaactcgtaagttttctgctcgaattgcaacatattcagcagtagctgctaatactactccactatccatcagtttctcaatagtggtaacaaatagttttataactcgatcaataacatgtttaatagtatcactaatatcttcagtagatacaacatcctctaattctttgataaccccttggatctgattataatcttccatgccgcctaatagatccatcactcgcctagctaacgcttcatcgcctgataataaatctgcaagtcttttaggttcatcaagatcaataatcatttcatctggggtatctttataaatatcaattaattccattgctaactcctaacataagacgggactcttccgagccccgtcgatatgtcgtcacttatcattattctgcttggaatttagtgttaattacactattataaagtccagttgcagtatttgcgtaacgcatcgcttcacgaataatggagtcatgtttaggtgcactatcagtaataatagacgctaccttacgtgatacttcttcgatctgttctttagaaacatcgtcgattttatcactctctagtttccgtgaaagttgatcaacatcatcttcaagttgcttaatggctttaacaatattccgaccgccagtgataacaccagctgcatcatcaaccagattacgtagagctaccgcttctttcttagcttgactcttatcaaagttctttaaagtcacttcggtgccaggttctgcggctgtctcatcatccgttagatatacttgagtagcagtcgtagttacaagcttattacccggtaaagtgttagatgtactggcgtagtgtttgagaggcccatcttgaagtttgtccatcttctcaactagttcactagcatcattacgctctggatcccaagctttaagcacagtgccaatattcgttaggtaggtggcatagtcttttgcataaacagatgccatccatttaacgatcggaccatatccaacattagctgaaggctgaatgaatttaccattagcaaatatgggtccaccatttttaacaggaaccgttaattcactgggtatattttcaaacttagcattttggatagctaaaatgagttcatcaacttttacactcacacgcggtacactattcttaagactattccatacgtgactaataatttcacgtagtttagcaatagctttcttgatataagcaagcgccttacggcttaactctttaatatcctcagttgaaatcttaactggatataaatgacttttaccaccagttgtatagttttctaatgagctagttaaagtattatcaccaagtacatgacgatgtggtaagagtgcagaatgaataaatgcagctgtactttgactgataccattaataccagcttgtcgaacaagagctttaattgactctagtgcatatgcggtatttagaccttgattgatatcttgcactgctgtagtaactacttgtgcattaccaatgtccatgaaatcagtaggtttatccatatccactgcaacagcaatctgcggtaccacgccattatgcgctagtggaatagaactatctttggcagcctgatcagcgatttgctgagttactgtttcaccaccttgtggatcttctccttcagcacctgctggaataactgtttcaacagcaacattaggttgttcaggaataggaggtacttctgttactacatctgtttcaactacggtaaccggtaccgcaggttgttcaactagagtagcagctggagtctcaacaataacgccgttattaggagtattaacaatagtggtacctgcatccactggtgcagttggtgttacaccaacattattgtcagctacatcttgaatagtattttcaggtacagcatcttcagaagtgcaatcgccactagtcatggctgctactttatcaactgctgtttcaggaataggtacctcagtatagtcttctagactatctagatactcattgagtttaaatgtcatgttatttcctcaaggaatttctttgcgcgcgtttaacaataaaccatagaattaggtacttagataaaaatgaacacttagatatatttattggccatatctttctaattccatattacaaacagcatttcgttgctttgcaatacgtaataggtaactaattagtgttgcgtattctggtgacatatcggtaataaagccattaactaaagatataatctcatttgcatcatcacgagcacctttccaaatagctttagacctacgtagctccatgtcctcaatgccctgtgcaaccttcttcagttgttcaaggacatctttttcagctttaaatagatcacctaaacgacgaatagcttctttattaacttctaatgttttacgcacttcaacaggcggccttggctcgatcgtgattgtatctggaccatcaccatgtttatcttcaccaagtcgtggagcatatttatctttctggaatataagtttactattaccaggtagagaagtatcttttactttatctaactgattagcttcaccaataaattcaaaagcctctttaaacttatctagttcattatcttctaagtcgtagtctttaattaatttaactactttatcaatgtttgatctagctatatttggccattctttagctagaaattgactaacttttgtttcattagttaaatcgtctaaaacaaattcatcaccaatgaataacattttaggattgtcaattttaattgacatatcaaaatcaggtgttaccctttcatttgatacagttggcttattgattaaacttttcgctttttcaattaactcatcagttttatcttcaactgatttgattccagttagtacacgctgtgccgctactttagcttgttcaataacatggactattaaagcaagtatctttttacctatactttcaatacgttcttttatttcttcttgagaaatatttacaaaacgcatagcgctgctaggggttgcattaaaatcttcaatactaatcttttcaaagccgataagcttatcaattgattctaatgtaacgtgcataaaagcagctgattgtttagtaatacctctatcaccagcggtatttaataaatctataaaacattctaaactagtacgcgcatgcagtaattgatttagctgatatgtcatgttttgagatggaggtgtatcatacgcaaagatatttaaatgatcatcatcactatctaaatctttaccatccactggtgtaggtctattatcaggactttctcgggtatcatggggtgatgctggatattcttctgatgcgacgtatgttttaccaaatgaatcaacttcagtaactaaaccacgatctgatttccaatggatattaggtttatgtgcttcttcaacatctaacccattattagttgcttttacatcatttggtaattcatcaattaatttggcagcttcttctggttctttagatatttgcttgtcgtctgtagcagcgtgctttagtttggctttcgcgactttttcttttacttcgacaacaccataaccttctaaactatcaagtaacttatttaagttcatttacaattcctcaagaatacttaattacatagcataagaggaaccccgaagggttcctcattatgtttgttacttctcatcattctcaggtgctttagaagtttctttgccgtacgcagctaattcatgtttaacaataaatgtatactgcgcagcgatgcatttagcaatatagttaactagtgcactattatcaataccaccaatattcagtgcatcacgcgctgtttcttttgacatgcctgcttcgtcaggattccaatcagctagggccttttcaagattctcagcaatcttgtaatcaatcttattaaagtcctgtagtttaataacaagacctttaagaatattaagatgtgctaagattttactcggtgcacggacatcaacttcaacttcatgtagatccgtttccccatcaccctcaacaacttcccacttattcacacctgacttagaagaagtaacttctaacttaacattaccaggagctttctcaacggctttattaatatcttcagccatcttagcttgtaaatcactggtgacttgatcaatatcaatagacttgtcacctttgagataacgtactccaagttcgccatatttcctaagagcagatacatactgagttgagaatacagtcatgaagtctgcaatagtcttcggattatttgcaataaagccactactagataccatatactcagaaggagtgaacttaatctcttctttctttagatcaccggctttgagtgatttaatagcatcaatagttttagtaatacgcatatcgagtgcaatcagcttaggattaaaatctttaatcttctgctttatcattgcaacaattttcttgataatctctaaagctttcttacctgcttcttttagtttctctttgagatcctcaagagagataacagctgctttctgaatagcgctgcgtggagaagcatcgtaattctcaagcgcggcagtgagtccagatttttcaatacctaggatacgatcgattgattccatgccaacatgcatgaaggcagctgcttgtcgagagataccatcttcaccagcttgaagtaaaagaccttggaacttttcaagtgcttctttagcatcttcaattagccctaattcatcttcagcttgaacaatagttacttcagtatctaatgcagttggttgaatagcatcatctgcatcaagaacttcttctacgggattattttcaatctgatctacttctgctaaaacggatgatacatcagcagaagttttattttcaacgactaattcaacatcaccatgaatcgtagtgccttgatcttcaattgattcaagtgatagtttgtctagcattttaagtagagacatgttaattaccttacctgggagggattatttacttgttcttgcgtaggtctttgaattggacgctggtaagcttttaattctaactcggtcacgaatactagtcgacccattactctgactaaaccagcaagagcattactaaaatctgttacaacgcgacttacattattgatcattaatgtaattgaattaatgatatttgagatagcagggatgccatcaggtgcatcaggatcttgaacttttgcttgacgatttcgcatattagattgttgtgcccgaatcctaccagcttgttgacgattagtctcagctaactgcattaacctaccaaattcaaaatctagtttagttgcataatcttttctagcatctatacgtttagccatttcgcttaataatactaaccgtcttccaattgaactcgtatcattaaccttaaaggtattgttaccttcaggtgcatccttcatagtaggaatagtataaaacttaaaggcaaaatcacggacagtgtttactaaaaaatcccaatccctgatctcttcagtctgtgtttcagttggccctgcaccaaataaagttttattaccttgaactggcatactacgataaactgtagaacttactctaaatctatcatctttcttaataggcactgcacccttcatccagttcttaacattaaacttactaaagtcttgtgcagctctatcggtccatttttcatcaaatgataatttcctaaggatatctgccacagcttggatatataagagtagggatttatcatagaaagctatcaagttgttaacttgcatgagtatcggatcaactgtagtcggttcgaatttaccatcaatactaaatcgtttagtatttttaaattttaattcttgcttaaatggctcatgcttaatattttcagctctttctaaaagcatgtttattcgttcaagagtacgctgattaccttgtgtaataacacgtgcatactcttttaattcatctcgatgctttgcttgggattttttcatttcatcccaggtatttcgtgctgtcttagatagatcttctaatgatacattctcagtttttagaatgtgttcactaacaacatctttgttatctgcatatttttgaaataagccatcggtataggttttaactaaaatgtctttttcggtgcattctaatctactttgaatatcttcaattgatggcaataattcttttagatatccatcgcatgtagcgatcatatcgacggggctgtccccgtcgattgattcaagtaagaccgaatgactaagtgaattattagtcatagatagtcctcagtccttatctattacttctacagatccaaatagtagatgtagggtatacattagatcattcataccgtttttgtgtttaacccaattctggatcattgaaacggtatctagatctaattttaactcattaaagagagtagcaatttcggcgcgcggttcaatgagttgtgcaccagcatctggttcagtagctagtaacattggccattgagtaattgaaatacgtcgatgacccgtagcaatgtatcgaacagtatctaataggaattgataattataactatcgatattactattattgtcctgtagaataaaccaattatagtttccgctaaaaagacgaatagcacaagctagaactttcttatggaattcccaatatgcagtttgtgcaggaaagttggtaaagataagatatagttcttcaacttgaggatcaccgggacgagcagtgaaccgtgaaatggcctgttgttgaccacctgagtaattacgaccaaatgggcgtacagcattagttgctggcatatcaatgccctccattagtgaccaagagatagtagatcacgatggttagcaaagaactcagatgcgcgatcttggatcatacctaggcgatagttataatcagagatacgaatttcatactctttaataagcttctgtaggcgtgcatccactttaccattactttgcatttcccgcatttcttgtaaacgtagttgaagtgcaaggaattcttgctcagcttctttaaaacgttcaacctgatactcagctaagaacttgccaaataacacgaacgggttctgacgaggtgagaagccatccatgttaagtggatcacgttgagctatagagagagcactcacagctacatcataagtaccttcattgacttcagcactagatgcacggcttaagcgttgtttcagttcattagtcttaagactcattgctggatacagagtaatgaattgtgccatattggtgtatagccattctttctcagcacgagatgattttaattctgtagccttacctaatttcattgcttcttgtgcaattagatttagtagtagtttacggccataacgaatatagaaactaagaccatcaacaaaacgtagcatatttgcacggtcaaaggttagattagagttagtaaactgaatagcaaataaacgccggatttcgctttcgatcatatcaaagctaccacgaatatttgaaagagtatccagtactagtttaatcggttcagtattaaaactaatcgctcgccgtagttcagtagataaccgcatacctaaatctgatttaagttgcatattaccaaatacttcacctacatcgtcaataattggtgcgagagttgcatcatattcttcacgtaatgaacggatttgatttaatagttcacgacgttcagtaactggtgcgagttcacgtacataatcaataattctcatcactcagtccttaaatattggtagacatggttttattcatcattttaaagatctcagtgatatccggacctttattcttttcagccattttaatttcatcaagtcggtgagatgtagatagatcaaccccacgatgataaatagttactcgctcataacggtcatcaataacaacaagcatcattagatagctattgtcaaagatcttttgccgagtggcgaaatcatcaatacgaccataaagagaattagaagcagctttaagagttgacgttgatacaatcgcgatgtttgatgcatctgctaatgaaactgtgccactacgaacagattgtttccagttgttacggcgacgatcggtgatttgtttataaacacctgacttatcattcattagaatgcgataatgttcatcgatcatatcttgacctagaacgaagtcacgccagaatttaatttgaccagtttttactagaaatagacgatgtagccaagtatctcgtccaccagcactaaagatgtgcgcaataatctgaggactaacagcggctggaattaaacggatcataacaggaattttagctttctgctttcctgatttaacatcaacgttaaccagcttaccaacggcaaggttttcaacttcataaatcttttgtgtatcaccactagaaatactttgtgcacttgtactttcgtcattcgcttccattgaagctacccaacgctcatgtgagtgttcagcgacgatatttggtaaatgcacaggcttctcaaaagactctaatgaaggaagaccatcagaatactcttcggcagagaatacactagtgcgagttacacctgtacggttaggattaatagtatcgaatacttttaaagtatcaatcttatccacacctagaagcatattaacagcttgtagataataaccagtaaaagacgatgaaacaaatttcataacgtctttcatgtaaggttgatcaactaaggtttggtctacgatgaccaatggttcaacacgagttggacgtgctagatcggttagagaagaaatctctacaccatttttagtggcttgtaggacagtctgcattagaccacgtacaccttgatcagcagcaacagtcatcagagcagaacttactgctccggcgattacaggtaatggcatttttctcttcctatatgggtttgcagagagttataaaaaatggcagcatcggaatttttagatcagatcatacaaaacattggtcagtcgccacgtgataaagccatctctgattctatcagggggcttaatatcattggccgtaactcgaccattgccccaaatacagagaaccatggttttacattctttaccaggccgatacttaatttgtcatacgataattgtaagatcgatagaaagctcacaatgctattaaatgataatccttatagcttatcaagatcaataagagctatcctagatccatggtcaaatagggatggaatgaatgcggtggatgttgatccacttaatccatttattccacttttatcaaacaacctagttagtttaacaggttgggaagatttccaattaaacctagcaacaactaacccaggtatatatcgggacgctatgtcatatgtagatgatgtcccgtatcaatttaacacatttgatttgcaagcaagcttccgaaatatggaaggtgaccctatcactaacttgttatatatgtgggagcgctattctgcattagtgaaagaaggtaggttatggccttatccagagatgatcttactaaaggaagtagattacaatactagggtatggcgaatagtcacagatgtaactcggacatatattaccaggatattctgttcaggagcatctattttcatgaatgctaatactggacgcactggtgactttattggtgatggtagtgaaacaccattccagaatgcgaatgatttactatctgtatcaatacgatgcatgggtatggatgtttatgattatattctgttctatgaattcaatgacttagttgaggactttaaccccaacatgtcagatgaacgacgatatacacagatgcaaaagattaaaatctatgaacgtgaatattttagtagatcaaaagtatatccatacatcaatacagataacagtgaattagagtggtggatatctaaagaagactataacgccatgttacctggtcttttacgcaatcccccaccacctcagaaagagggttaattaatggcaagtgaatttaaaaatcagttattaaacctgagacgaaatccagtactgatgcaatcattaatgttatctgaactagataaacaacttaatggtgagactggggaacgttatgatattcctgattcagcaaaccctttcgtttcattgatggagatgggtgttatcggagtatcggctgcatttactgaaatggaagctttaagtaggcgtctttatccacgcttagcgattaccagtgatgaactttatctacacatgtccgatgaagattatattggtagatttgctatcccagcacagaactattttaacttcattttagattatgatgaagttattaagtatgctgttccttatggggatcaaggtcaacgtaaattagttatcccgcgtttaactaaatttacaggggcgggtatatcatacaccatgcaataccctctagaactgcgtgtaatgcgccatggtggcgttgtagctgaatataataccgatagcttatctcctattgaaacgctctctacgaacattgcacagatgactatgatcaatgatggtcgtggacatcgattaatgaatctgatcatacctgttaaacaatttgatattactcgatatcaagaaacacttaatccatctaatctgtttgagaaagaatatgttttctccgatcagttttattatgcacgtgcatatattaaacggacagtagatgcacaggaatgggaagaagtaataactacacatactgatcaagtatacgatcctcttaatctaaccgtagttttaaaagttattaataataggttacaagttagtataccagctatttataatactactggactagctacaggtgtaattcgtattgatatctattctactcgtggtaagattgaaatcgattatggtagttatcaacctgaccaatttacgtatagtttaaatgatatcgacgatgatccaaagtatactgaaccacttaagaaacttgctcgaataagtgcacttagtacttattatgtatctggtggttctaattcaatggactttgatacgcttcgtaaccaggttattgataataccactggtccacaacagttaccaatcaccaatgtacaattaagtgctgacttggctagacgtggttatacccttgtaactaatatcgataacatcacaaagaaacaatatcttgctagtaggcgactaggtgctcctcgtacacttgacatcatttcaggtgcaggtgtagcaatgtctcagctacaagtatcgatgaatgaattagttaaatctaagcatgttaaagataatggtgatagaatcactatcctaccatcaatgctctataggtttagtaatggtcgtgtatcagtcgtaccagatgcacaattagattctattttaagtagttcagcagaatctattgcacgtcaaataaacgactcacgtacagtttattgtccattccatggtgtacttgatgcaacggaagataacttcgattatcgcccatactacttagataatccagttatcaatgagaagacttttgttggtgagaatgatacagctcagttacaagctagtattgatgtatttgaaattgatcgcgtcactgaaggctatcgtattaagattcgattagatgaaggcgaacaatttaagaaattagctgatgagcaaattgctgttcagattggatatcagcctaaaggtgaaacaaagtatgcatcaattaatggtaagttcttaggcattgaagaagaaaagcgtgtctatgagtttatcattgaaactaattatgatattgattcaagtggtgcgatttataccactaacatgtcaatgtatgatcagttccagaaagtattctctactcctttaaatactgattttgatgtatcaatcattgtagtaaatacaatcactccaggttatataccaaatgaattagactcattggttcaaaggcatctactgccatctgagttcatggttattaatagggaacggttaattacaacgcttggttatgacatgactaagatatggcaccgtaatagaactgttcttagccaagaatcatatcagacctggccagcagatgtacctgcttactatcagaaagatgtatttgaaactgattcaactggacacattgttattacaataggaccagatggtaaaccagtttacaaagttaaacataagaaaggtgatccagttctagatgctaatggtaaacctgtaatgcagtatcgaaagggtgatactaagttagatgctaatggtaaacctattcttcttgaaccacgtaagattctacgtgaaatgatggtactaatggtagatggtctattctactttgcaactgaacaggaagctgtagcttatcgcaaagagataccaatggagttcgttaaatggatccagaatgatattgattatattgatcaacgtctattagagacatgtgaactctatctatatccgacaactacatttggcgatacaattgtttctgttagagagggtcagaaatcaactgtacaagttgatcagaacttctttacaatgttgtatctaaaaccatctgcatttgctaactctactatcagaccgtcattaattaagacagttaagacaattgttaatgacatgcttggtcgtaaaacaattgcattatctgaaatcattgcagctttagaagcagctattggtgaggatgtgttacagattgatgctggtggtttaggtggttctaataactattccattattacagtagatgacgatgcagttaggttgacattacgtaagaagcttactgttatggctaaccaggaactaaccattgaagatgacatgtctattactttcttaagacatgagcaaattcaataaggtcataagccctcccctaggggagggcattatgttgtattttacattgcataaccacgtttaaagtcatcgatgactttatcaaatcgacgctgccattcgcgaatagcatcattgaagccatggatcttataatcttcactaactacttgtgcacacttaccataatagttaagtacgcaactagctgctagatattgtgcttgagaatattcaaacatcgtatcagtaatacgacgcataccttcaagggaagtgttgattaattgaacagactcaccaatagcatcaatagtttcttgactataattacgtgatagttgctttaacttacgtagagtatcactgctattgcgatatgcttttaacaaatcatcaagtggtgcgacaaaacgatcttttaacagatgtgagtttttccagaaattcttatcagggaaatctggaatgcttgaacgatcaggatacactgtagatagttcattgcaccgggtagctagtttaccaatctcacggatattagcgataggcataagtgcacgataatcatcaccattgtaattaacatattcaatgatagtgccaactagcttttccattgtacctagttcagtacgtgcttcattattaatattaatgatttctttctggtagtatacactaccaaatgcagcagcatatacacgactagctaagattttaggatcatcaatgattgattgtgcaattgcatcaaacttttctagtaacgcatcctttcgattacctaatcgatttttaactagtaactcttgaaagagagtacgtgcttgatcaactgcccggacaatctttccataacgagttgctacaacaacatcgcgcttcttaaaatcactaatccaacgtatcagcttagcaaatagttccattagtttctcaaaccaagtcttaagagtattaatgatggtagccatcactgcctcttgagaaatagtcacattaagagtactacgggttggtgtaaacatagaagcatattgctcaagtgaagctactgctttcttaggagcttcaaacccttcagtgctcatgcgcttaactaatgctcgaataccatcaacatctggttttgatataccttcaagtttagtgatggcataaatatcagatagctgatgaatcgcttctacggctacacacatcttagctaaaacttcaggagctgaggcacttgaaacagtttcttcttcaccttcaaccatttctggttggttctcatcaaagaaaagtttttcctcttcgacatctacttctttaacatgagacatgggtttaacctcactcatcaacgctaccgattaattgatttaatgcattacccatgtctgcttggatacggttataatctgggccattaacaacggcagagacaatattgacatcatcaacagttagataatcattagctgtatcagatgttagtacagctttgacaagacatggatcagtaataccggtgataagactttggcgaatgcgaagaatattgttaaaataggttacggctagttttgtatcaactgcaatattctcattaactttacttaagattttcttaaatttagcaacagctttatcctgttgttcatcgaaatcaagtagagtctcaaatggaatctgtaatgccaccgcattagctaggagcattgcgcgggttttacgatcagaaccacctaagttaggcagttgctttagaatacgggaaagttcaaaacctaattgttgcatgatttttctctctatttagttaagcggtaggctcttacaaataagtcattatttaatagactttctaaagtatcttctaattcagtagcccgtttatctttacgacgctggggactaaggaaatctaaaattttatcaaaaatggtccactcattggctaaatcgtttatcaatgaatcaattactttaatgtcatcatcaattcctggttttagtgatgagtcctttacccatttaagttgtgctactagatcttgtttaattttcattaaacgttgtcgttgattgtcatagcgtgaactaattggatcatatccaacttgtaaattaccggcaatgatacctagtgtaacaggtaaaccaatgatcataaatagacctttgaatacctcagcagtaatatgactagaaacagatttatattcacggtcattataataccgacctgatttagttaatgccgttgccagtggccttccataacctaatcgagtggcgaataaatcagctaattgttcatcgcgtttacgtgattgaacatcaccagttaaatgtggacgttgtgctttcttaaatgatgatagaatgactttacgaatatttccttcagtcctatcattagcaaacttctcataatcagctggatcaacgttcttctttaaccatgtttcatccaataattgaatcttatacttattagctttcctaccctgtaagataagtatgccttcagtaagtgcatagttaagatagacgtagtcgcccattgtagctagtgtttcccaacaatgcccaatttcatgtaatgtaatagcggtagcttctgctatactaacacggttaatagccgataatagaccaatagataaaccgatcttgtatttaaaagttgaaacagcttcacctgtaacttttaaatttgttaaatcaatattaatgaatgtattgacaccttgctcagttgctaaagtaactcgattaatattgtcaaatttactaccagtatgtccaactgtaaaggatgtgaatgcaccacccattataccctgatcatctaggtgtgtaaattctatattcatattgaggatcttagaaacatcatcactcagtgacctaaaatcattaatatctattctctgttgattatctaatttatcacgaatcttggttagatgttcttctatcaatggacctaggtcacgcttaacattcacatctaacacttcattagagatttctatcgtatgtagcattttatatctctaccagtattaatttataatcataaagataaggctgcgttgtatagaattcaatcttatgcactacgtattataaaagaggcgcacacaaaatgtttgagttattgttgtcttctggactaacaaatacgcctatatattccgatccttatccaggtcctaaaacactgatagctgggacaagggaattaggtttgtatggtgaaacaacatcttcagaattatttggttatgatgatgcagctaaattagttaatatgacatttggaacagtaatcaatgatggacaaccatggttaaagttctctaataaaaatgttacttgttacataccaaagaaaccagctcgtaaatcaatacaaaaatcacggcttaataatgccggacttcgtaatggtgactatgaagttagatttatgggaaacatttataaatttggtttattaacaatggttggtgccacatcagaatggcaaaggttactttataatgttcacgtatctaatttaaatggtgctaactggccttataaatttacagataatgacttaggtattaaccaagcagtcgccggtggtattagtactgatggtactactaactggggaagagacccaggtagtgatccagttaatgaccagctctatcgtggctactatgcaattgatataactaactcgtcaagtagtgaaactggcgctgcaacccaaggttggcgtccagtggtttatgctagtggtacatatccattcgttaaagataatgttattaaacttactgattttgaaactgataatgaaatggcagccggtgcccaaataggtaacttagtctattattacggtggtaagaataatgctaatactgctctacgtacactagatttagtcacgggtaagttaacaacattacaaccaactggtacgcctatagcagttaaacaatgctcggctgttgcatttaatggtaaagtatatttctatggtggtgaaagtgccacagatggtgtacttactaaagatatgcagtgttatgatcctgcaactaatacatgggaaataaaatcaccaggtacaatagcttgccggtatgcacgtggaactagtcttaatgggttaatctacatattaggtgcagctgatacaactgcaacaaataatcgtggatttacattaatgtacaatccaactacagatacatataccagtggtgcagcatttaatgatactggggtatatacccaagattattcagtgagtgtttataataatagcgtatgtgttattggtggtatggttggtgccggtgttaatactggaatcatatcgtacaatcaaaccaacaataattggtctaaaccaataactacaggtatacctcttggtgcagctattaatatacgcccatctggtgaactttatgtaatcgctggtgaaaatcaaaataatgcaccaattaagtattatgaaccacgattagcacgatggataaatttaggtaatttagaaactggtttagtggatgcaggttttgccaatacgtttaataacgatggtaagatttatgttctaaacggtaatcagaatttaaaataccaaattagttaacgaaataaaccctcccgtaatgggagggttttatgatgtgtcgaagtttatattagcagtaatgatcaattgataatatttaattaggaataccttccatttttaatatccttcattgagtagttctgctaaagcacgtgcctgtgaaatatcagtagaagcaaaaacatcagaaagatagttatcatgttcttttgcattctgacgtaattcatccattagatgtttattagatacagcccatactttccacagatttttataatcatcatatttaggattatatccgtctagtggtggttttcctttaccagctttccagtggttggagtatttgcgatatcctttacaatctaactgccaagcttcctcaattgttctgccatcaggaagccttgcgtaaagagccgagaatcttttgtcaccaacagatgaacattcatatcctcctcggcgcttccactgatatattactttgggttcttataggtattaataaacttctctagtagggtatccattttaggagcgcccatgatcttctgtgtgatttcaatagcattaaccctaccgcctgttaagtttacgccaacttcgcggcgatggtgttcactaattccttccatcatcgagaattccattacacatgtttcacgtgcaatatttagaatctgactaacgttaggatatgtcgacacgatgtcaaggtcggcgatatggcagaagattaaggttttataatttggtaaatctttaacgcactgtaatccatttggacctgccatgtaagatggcaatgtaacaatccagtcgttatgaccaataacatactgatctaactcatgtaccatctgatcagaactcgaaccaataacacatggatctggtctatttagataccagaaatgcatgtcatcacatagtcgttttgggttagagctaaagttcttataatcggatgctttagagaatagacttatagaacgaccaaggtcatttacttgttcatcaagttgttctagtcgaatggagtcgatgatgttataaagaccatatttgattttatgtttagtctgcatctcacggtgccagtcgataccaccaagatgtgcagtttctttaaaggttaacttaccaaattccattacatatctaatagaatcaccataggtaaagttattatttaatataaaatcatccaccggtacccattcattactacctacatttttaatatatttagtaataactccgcctggcctgtcaactagttgtttattaaaaccttcaataaaatcttctaagtccttatcatttttaatggtcgtagatttatcgatgtttagttcttttctaagaatagactctaatcgatagttaggatcacgtcctttagctaatcgagttactcgataagttgacatagaatcgatgcattgaaaactagagggtgctgtaatccaatgccattgatcctccggtcctttagatttggtgaccccagatgcagtggtggtcataggttcgtcaatcttaaaatggaaatacctataattcttaggtaccgatggatcagaaaaaacatcagctggattaacaccataatgttctaatgtttttaagattctaccaatgtcgaagctaatattccagaatgcgaagaaatctggtttccaggtatgtagtcgtttaaaacattcaataataatatctactggtgtttcaacaaccattacttcaatatctagaccacgttctttaattagatgcgatagcacctcttctttttgtgcttgttctaatgtctctttcactggatcttcaatatcactaacccatcgttttaaataggctaagaaagctttgttcttatgtgtgactgacatacagataatctgaccatcgttctcagcttcataaacgttggtttcgatgtcaccaccagcaacagtgtttagagagattagaccaggataacgttcttgataatcatgcttcagataacaggttgaactaacatcactgccatataggtaaggactacgcgctagttgacgaagagatctagccgaatagtcacctaggattttactaatcttacgtttcatgtcaatttgagttgacatatatttaactaagttacgctcatattcgtaatctttcttttctttatggttacgcattccttttgaggtaatccaaaaaggacgctggtagttttcccacatccttaaattatttgcagttgtaccatcttcaaaatgaattcgttctttaacgaaatgtgcatctgtaaacttaccaaattgatcagtacaataagtaatatgtttggcttcaatgcccttaatctttttcttatttgtaacctgttgttcattagacattgctataacctcagcacatattgatatttatctacgtactatattagtacctagtaaaagtaataatcagcataaagcctcccctaggggaggcaatatgtttacataccagctttctgccggaagaagtgtagaacgagttgccgtttaccttcagggatgaaacgtgcaagatagttgatatctacttgataaagcgcatctgatacatcactagtaaataggcagaatagagtaagaagattaatgtgtgcttcttgacggttattctgagtaggtagagtagcaacaaagcgaagtgcgttagattcactaaatagggtattacgatttttcttaacgaaatcaaagataatatccatgcctgatttaaagccttcaatatcttcgattgtcattacgtagttgaatacatcatctagtttcttttgtgcatctccaccacgttcgatagtgatatagtcaccaggtttagcaccagtggcaaactgctctagacgagattcgataaatacttggttcattttggtcatacctttacgaagtacaggttcattagatgttgattcactattcaagattttaacttccccggttggtttaatatcatctttaccagagaatactttccattgttcaacaatagtttcaatatcttgactagtggtaggtaagaataaacgatcgcgtaactcaatagcaattttaaaatcttttatcaaattactatttttaataagtccttcagcccagtcttcaagctctgctgtcgtccaatcggtaggtggagcattatcacgaataacactattaacccaactaccacgtagtgtttttggtggagtaataccttgtttaacaaaatcaaccacttcttgggtagaccaatctagtggaatatcactagtgtgaatacgcagttgcttgactaattcttcaagcttgatactgtcttcagtattgcgaatatcttgtttcagagtatcttcattaactaccggtacaattacttcctcagtagtctcattctctttagcccgtttagttaaaatatcatcagcaatatcggcaatatcattaactacaccagttagacgatggttagcagcatcgattagttcatcatctgaccattcatcataaggacgatatttacgggttgggtcaaatacaaagctaccgagttcagttttacctttagcaatgccatcattggtaaaccattcaatgacattttcatctgtccatgtttcaggaatatcgaagtcagtacgcagtgcatttacattaacttcagctaattctgaggtatcgttatctgtattaactgaagaattaatatcatctgctgtagcatatacttcctcaggagatactaattcaatatttgttaatcctcgaccaatttcagaagttggcttatcttcagttgcttctgataaaacttcgtctttgacaatgggtttttcaggtaaacgattgagttgaggaaactttccaaatcgttgattctttttagacattactagttcctttcgggttataatctaaataatggagaagctgagtaacttctccatctattttaactgatgcgatcgcgataagaccatttaacagtcttaagaacagcactgtgcattttagacatgaagatggataggaatcgaccaccaacacctgctgccgctgccggtatgccattagggttctctgacatttgtttacccatacagacagcgcatacgttcttacctctacctattacaccattagctggatcaccaccggccttacatgtcattggaccacgtagttcaatctcagtgccaactagttcatcaatattagtttcttcaataaggatagatttcccattcttaacataagacaagccaatgaaatctttcttattaaattgatgaacattggttggaatacctatccatgtattgcagtcttccataataatcctgactgtaccaaccattcgataaatcgttttagttgactcaccgccaagggctgtttgtgcaccacggttatatgaaccataacgtaatgagttattcattactggcatatggtcagtgtcaatgccttcttccaatgatttaccgatatattcaactgatgtaccatcttggaatggcgcttccccaccaaacataccaaatactttcttacgcacgccaccaaataatttactatgtttagtgtcatagaactcataagaaggatcgtcttttagatagtcctcatctagcttgattaatgcattacccatttctgcaataacagccggatcatctaaccgatctttatatttctcttctagttctttacgtaacttatctctgtctggtgcagaggtcattgatttctcagtaatggatgttaccaaggtactggcatatgctggcaatgctaaacaatgatctgcaaacatccgatattgccatacatataacttaccatcagttgcacgcggtggattatcatcatcaattggatcatcgatcatgcggttaagaatttctttctcaactttaccaatatcgaaataaccagattggaatgggaacagatcaccaaaaggtaaacataatactaaatggttaacaaaaacgttaccataagttgttcttaatgcacctggtcctttatagttttcaatttcaccaggttgtaaaatgaattcatctcgaaatgctaatggttgtttaccttcaatataatcgtcgatataaacaacttcatcattagaatcgccttctttatagaagaacattttaccatctttgaaatatggcttgtatagatattcaccaccatcatttgggttataaacgatattaaataaaacgttaacccatgctcgtttcttatctaatccagcattgatacccattagaaaataatcacgtaatttcattagtatcacctatgctatttaaaatctttttagcttcattttccataatagatcgttcaatattgttagatgtgaaatcatctataatacccattaccgttctactaatttcattctgttcagtatttgaaattaataccaatccgacaatttctttagcaacttcaataggcgtcatagcatctaatgggccaaatgaaatttgtaataggtcatcaatattccttttaccaacacgtaatcctgcattaactagttccatagctaacttaaatgatgcgcgcgtatgaatacgaataaggcgattaattaaattaatccgttcaacattacttacattgccatatgcttgaccacgggtagtaagtactgactgaataaatgatgtaatattactaataagtgttggcgatacactttcaattaagtcaatgatatttaagaaatctacacttgtatcaataagttctaccagatgcgctaatgtctcttcgggtgaatattcagctaacagaatatcattcacttcatctggaataatgtaatcttctaaactaaggagtgtattaacaacagcttgccgctcagcctgagttgcttcatcactaattttaataagatgctcatttagaatttcatcttgtgcaatgcgaatgatatcatcaatgcgagaaagaagcattgcattatctgagatacctgattgaatctgacatactgtatttagttcatctagagctgcaacataattaatcttttcaaaagatgctacgcagtctaggataacttctttacgctcttcatgtataagaggcgtaagataactatcaatgaaatctttcatgacgatatcctttttatacggaattattaacatagggttggacagatagttattctttaatatagtgtaaaattaccaaatgtgttaaatatatgttgaactaatcatttttttcatttgtcaatttatattggcaaatattaaattaagcctctatcggagtataacaagatgtcaaataaagctaaagaaccaactctaactaaagaacaggaaaagacgctacgtctatttgaacgtgcagttggagcatcagctgccgcagctgatcatattcttaaccgcgatggttgggatgttgtcaatgtactagcaggttctgtaggtaagcgtattctacaaactgaagtattcattaatccagttattaataagatcaatgaaattattccgacgttatctgatcctactggattccaaaagaacctacaaacagttattgctgaccttaatcgactaactaaaattatcagtgtcctatatgcacaacatcaaggtaaggttggtccggcaaataatgaagatgagctaaaactcatcggtgagcttgttactaaatatactggtattgaaggtgctattgaacgcggtattgatggtgtaatcctagcgatgatcggcactcttcgagaagctggttgggacgaaaaactaattcaacaataatggagttttaaatggctactgctgacttcgataatgagtacgatgatactccagaagagaatctactagatcaaattgatgagatcaatgcgcaacacgatcctgactctagtattgaaaataatgacgaggtggaaactccacctttcgttcctgatcaaaaagaaattaaactacgtattccacgtaatgctaaaactggaaatattcgggatgcttctgaaccggctattaaagacagtgctagcattcttactttgctacgtgagaacccccagactgtttatgatttcctggatcacaataaagaactatttaaagcatttgctgataataaagtagatgacactagtgatggtgtaaagtggacagctgctattctggagggcttagctcactctattgttgaagattcgccaattggtgcaactgcccgagaaggctctgaatggtctagtgaaattccttatggtgaaaagatcattcgacctggacgacctgtatttaataccagtggtcgtaaaatgaccgatgatgaaactctagttttcctaacacgtaaagctaacatcggtacgccatatgatactttcctacctcattcaggtatttgggtaaaactacgtgcacctactggtactgaagtagctgccctacaagcacgtctagcacaattaaagatccggctaggcgctgaatcaaaaggtatgctgttctcaaacatggcagctgtgttacttaacatggttagtagtttagcacttgcatgtgttattcaatccaactataagttcaacaccccaactgatctagagcatgttatctcagtagctgatgagccgttcttgcatcacgcactagcggcgactatgtatccagatggatttaattatagttatccatgcattgcagatgccaatacatgtaaccatattgaaacagcgaaacttaatatgtcaacgcttgttcaatatgatctactggcattctcagaagaacaaaagaaatatattgcacgtaagtttaatgcatgtactgaatctgatcttaagacttataaagaaggattccgtattgaaactcaagtaactgaaatgtttggtgacgttggtgttgttcttgagatgtgtacaattgctgatcgccgagagtctggtgatagttggattaactcaattatcgatatgactcaaggtagttttaatgaaccagtcgatggtccgcaacgttctcagtatattgcacgtttacaaaagatctctattgcccgtcagttctcacattttgttaaagaaattaaagtacgtgaagatgacgatggtgaaagttctgaagacaatattcgtactgcaaccactaatcgtgaaactattgaaaagttcttaactaatattctatccacaccggaatataatgaccgctttattaatgcggtgagtaacttcattgattcacaactaattggaatgattgcaattacaagttggaattgtccagtatgtgagtcacctgctgctactaaatttaaagaacgtttcccacacttaatccctattgacatgctgtcaactttttttactttggcggcctcgaagtcaaaccggatggtgtagttaatgatctgagatatagtcgtcttgaggccactttcacggaagatagtggccacatcctacatccaaactttggttatgataagttaactgaagatgatacacacttagatagactattatcgacagtaggggcagtaagaccgtctacagcagcacgtttaacaagagaagcatatctacttgattacgatatcggttcaccagaaaacggacccatgtggttaaataaagtaaatcctaaagaggattttatcgaaggtgggttgagaaggagactgactagagatttcttcaagtataaagtaggtagcttatctaatatgtcattaactgaattctttgaattagcttattctgaggtagaatacataattgaattatgtaggaatattactcataatgaggctgttaataacaataaccagttaaatgaattaaacaagccgttaactaaataaaaaaaaataaagacaggcccctctccacatggagaggggtttatgtcgtcttacttacgtgcaaagctagctacaagacctttgatagctagaacgaccatccaggccgttaacccttttattgggtggatatcaacccgttcttcgatatccagattaccctcattattgattacctcaattcgtacttgcatggtctactccttgtcaggatgggatatgatattcaaaagtcttttgatataaagatggcatattaccccaccaataaaaggcggggtaatatttattaaaccatcagatatcctaatggaaataaagcaaagaagccatataaaacaacaagcagtgtcttttggcgaacataccgggatttaatactatctttatctaagtcaaacttgacataaagataaatctgataacttttatatcccatactagccacaagggctattactataagttgacacaaaaagaccatagtgggatgctcttattattagagaacaatgatcaattgttcttacatagcatgtctatttaatatgcatgattatcatattaaataaccacaaccctaacataagggtaaacatactgcaaatcaagccacttacaatcattgctttttgtttgattgttttagcagcagcaagaaatataattgaagttattaatccactaaatgcaattaatagtggtactaaaaataacaatacccgagccatatagacacctcatcaaaatagataagttgtacatgtcagtgaatagttagtccagcaactaacaatagtacttacccatatggtaactaatacaatgcttacggagagaaaaagcatagcgtactggcatgcacttttattaaagatatctttaaactcaagatatgttttaataataaatatcagcatgcatgttagaagaatatcaactaagatcaaagtactgactagaagccatgttgcaccaaagatctgatcaactgtatacattatttccactcccatagtttataagctataactacaattgtaatcataatcaattttttcttcattgtaaataccctatagttttatcacatttgtgatatactgtttaaaatgctttaaatacaaaaaataaaaaaaagcataatccctcccaactaagggagggatcatttatgccatttactataaacgcatcatgcgcatacttttagttttacccatgaaatgattttctttatttctagcgtatctgcaatgatgaggtatgttattacaaaccatgaatgttaaccttggtattacatcaggccagttcttcaatggtcttagtcgtccaagaatttggatgctgtcctttttagagtcagttgcttgtaatagaataacttcccttaaattcctaatatcaacaccagtaccagatgatttaatagttgatacagtgatatcattagtcattaatctatcatacggactacccgaaacatgtctattaatctgaagatctggatattgtttcttaagataagctgtcagtacatcgataaagtttacagtcgcgcataatagcaaacatttctgaccttcaatacgatcctttatataaacgccatctacaatacgtttaaccatctttaaatagaagtctagtcgcctaggattcttcatcattactgtttcataacgagcatggttatatgtatttttaaatggagttaaatagtccttaggtttaatagttggttcactatacaacaagccaataacattgatgtatgagtcatatgcaggtaacctacactttgtagtagcaggtagcatgacatcaatcattttagtaacaaactgattaccagtgtatggagtagctgataaatagatttgtttattgacattggtatatagatcagtacgaaatactaatcctggatcttcttgaatctcatcattgatctgccagcctgctccaataacctcatggaatctaggtggtggtacattaaatccaactacatcgattttttcacctaatcgttcaaaagtatcgatatatgcacggtatgttgtagaactaatgagaataatttcaacaccttctaaatcattctctagtccgcgattaattagattctgtaactcagcagatccagatacttttaaatattttatacctagctgatcttcataaccaacaaatgtttcttttaatgctttctcccaaataccgaaatatttaggtggaatcataacaacaccacgttctttcattactgcaactgaagctaaactagttaaggttttacctttaccagtctgtaagtcaacacgggctgaatgtaaatgtggtcttagaatatcttcgcggatggtttcctgataatcccttagaacataatgttcaaataaagtatagtctactttaacagctgctggtacaggaatatctacaatttcaattctagtagatggtatattcttatcggctagataattaataagttcttgaagacattcacgatggatgaatacagatttaccatcttctgtttcaccataatattttttctttatttccattatggtgcgttgaccaggtatcttcttaggttcttttaaaaccagtttattaagatatccagtcatctttaagtatgtttcccgatcgtaaccggataaacgaacaccatgggtgtatcgttctgctgtaagaatcggtttcataaaaaaatcaacgatcggtaaggggagcagtgctccccaaacctcacgtcctccacgtctatcgcagtttaccacctttaactagtaagtcatatggatggtcattcctcatcttgttaaggaaactgcctgggttatttagtggctcatgctgcttttcgaaagccatcgcaccacctaaactacgacattgcattagcctattatatttttcaaattggccattaataccgggtttaggtaagcgatagtctcgatattgagctgaacggatcatcatagcgtatatcaagatctcacaatgggaaatattaaggctaatcttttcattagccattgttgcaaatacaggtagtgcttcaattggtgacttgtagtttttaagatacgttttagacgtatatccaactttctcagtgcttagtttacctgcctcggctgagtcactaccggaatgtaagaaactttggaatcgtttcattacttcatacatgtttacgtgcttatttggtagcgttaagaatggtaggttaaaatcaaaaccacgaagactaatgacgatattgtctcgctgatctagttcccaacggaccatcttaatatgctttagcatttcaatagatagactagccctacggttatacagcgacacagtcagaacatcaccacattcaccattcacctcatcatcatagactagggccaggctggttagttcagtagctgaagtagctggatatgcagtaaggtcatcaatcattaaaatgtcagcaaggttttctgcctctgaccgtgcgattactaaacgataatccttctgagtaagttctttctttagatatagtgtctctgggatttcacctgttcttaaataattactttcaattttgccaagtttatattgttctacagcagaagacgcatcggtgtgtttagtagacaatactgctgaagtaattttgtcacccatcgatacggcagcaacctgaccgatattagttccttttggaatattgatacctagtcggccataacaagtcatacagataccttgactatctggatgattacatccaaatacagacctgaatttctgtttagttccaattaggtgtgtttcatttccacggatccagtctagtttaccatcttctttttgataatattttcctttgaatgcttttaaagttaacttagttacaggatactcagctaagattgtggtcttacaatcaccaggatgtagcctttggacatattgtgcaataagctgagatttccggttaaagtattcagttactcgcagtagttctttgttatatagtagtgctttagtacctgaacgagattcaatcatattctcatacagattccaaataccatcaatataaccagttgttaccggatatttaaagatatctgagttaatgtcagttggaaagccccgccaagcaaatgcttgtagaagctgttcagttttctgagtaccagaacgaagaccttcaatgatgctgttaccaatgaattgggtaggatcattaaatacttctttgactttaccataactaattttttcgataccataagtagttggttcgatattatggttagcctcacgtaccttgggatgattatatacttcagcaatatcaaacatcgacaaggttgctagatattcagacagtttcacagtggtctgattatacagccagttcttaccttcaatagccagtttagatagtacttcaggatctactgtttcacctgaccaatcatagatgttccaaatagccttatttaaatgcttaaccatggccttagatgttactcggccaccttcaacatttagataatctttagggttatcagttaagatgcgattgaaatcgatatggtgatcagatggaattgggcaatctttataatgtttaagaggataccaacacagaacggataatttggtaatacggtcaactgacacaaccgttttaccatcatcaaattcgattagatgccattctgaagggagtgaccataaatcatcataacttagatttagaagatcacgcgctttataacgattaagattcattatttacctcttgtattattaaacccctgatcaatgatcaggggcatattctaatgcaataccactacattcaagcaggtgatcaaacatagctactgggcgagatccaccaaatggaatcttttcacgatcaactgcaactggtacagatgaaggtttttctgctgttagccaagactcgataaccgcagcatgcgccaatgggttattagtttggtctaagatttcagcagtcggacctggaccaactgtacagttatatgaccgagtttcagattcaccgaatgatcgaatagctgtttctcgaccaggagtactagccctatcagcgttgtttaacttagaaggtagaccaaatggttgtgtttttacagatgctgctgctgaccagtcttcaccaatcttttctagtagcatcatgtaaagtggacccattaagacattgtctttagttgttacccacttaccagcttgatctcgataagatacctttccatagtgtggtcgatacttatcactattaattaacttattaactgctgccattagatccactggatcatcgactggtgcgtagatatatggaaacccatccattagtactgttttaacatgttctgctggatttgggtgttccatcattttactatgcattgttggagcaatgatctcatagaaacctaatagttctttaaatgcataatcaacccattgggtgttactcattacactatttagctgttgctgggttggtttagcatgtcgatctagtccagcttcaacgcgtaggcgttgagctagatctcgtgcagctgcgccaaaaccatgttcataaattcgaccataatttgaacgacgcatagttgaaccaccaaagataattagatctgccctattaccattttcgtcaataggcatatcttcatcttccattaccttacagatgacgcccttcgttatgttcaggtaagttcgctacgcttaccccgcctctcgtattgcaggcagctgcatgtcaccatgcagaccagactatatcttaaccttcaccctaggtggtcaggtccctcccatttccactcgcttgagtgtactccgcgtaaccggatagtcgttgaacgttcaatccatttctggaaagcttcgctgctgattgtctcattgagatgtcccagcaattagagaggatttacttgactctttcgagatcaagcaggcaatttgaaaatatccatccatccagattttcaccggattttatccgatgcttaataactgaacggtctacattgaagtgttttgcgcaactagttagcgagttaaacccaatgcactctttattcttgagtgcttgaacaaattgtcgctgactaccagctgttgatctgtgtactcgataccgctcctctgtatacgagtctctcaccacaaattcataagctgggtatttttcagttgcgtactttgcaagaccaggaatcgatctcccatagggactatcgtaaagttggtaagctttcaagaaagctgcgttggaatagatttcctcggcatagccatctgggttgataactgtcaccatataacgtgatggttttactagttcggttcgatgctcataaaaccaaggatccgtttcattagcatatttaaattcgaacttaccagctatcaacttaccgaacatcttaggcttcaacattgcaaatggtgtgtcttttggaagacccatatgtacacatgcttgtgcaattgaattaaatgccattacttgtttggtgaagaagcaccgtgtatagcaagcaattggatcacgtcttaatccattgttaaccgcatggtagttgttacccgaataatctgtccattcaagattctcaagatcgttattaagtggatctccatctttatggttaaccactgtcaacgtatcaggtgaatcattatttatccaagctaatgcaatcgctcgatggacaggtaacgttttagtcagtgatccacgaaaggtactgactgcacgataaccatctaacataaatgtggataaaatcaaatctctttctatagacttaatcacaccgcatttggttaccgcatatccttcataacctggtattactttaaactcttcattcatcgcatctcccaagagatggatggatattaattaccaccatgaaaatcagtcatcttaaaagcaccagctggcatcttctgagctttataggttacttcaactcgccattcatccagtggatctagtcgatagaatcgagatagtttacggacattatcaggttgaggtaggaacatctgtgcagttacaataagacgttcaaattcctcagtgatatgtagatcatctttacgacgtgctaatagaccacgataaatctttaatagttctcgataataactgctaagatgagtatgatatttaactaattgtgcatccatccctgttggagtgggtgatggatttacacgctcatctcgccagatatcaatatcaataaccttcgcaccaggtgtgccaataacagctctatcgaaagttctatctagtgtacgaagtgccctaggagtcatctcggcaggagctagatcatcatcatggtcacggatggcgaagattacgccatctggtcggataacatcaccaatgtctgggaatggtttatagaccttatcatcgccatacatgtttaagaagaaagctttcctaccagcattagctacagccgtgctataactagttggcatcatccttttaaggaaattcttattagctacgaatccatcttcaatggtaccagcggcagataggaatacaacattagcattaacacccatccctaaagtaccgtctttcttaactgcaccagactgtgcaatcactgtgtctttagagaacatttcatttggggcaatggtttcccacacttctcgattctttacaagttcataaccaaagtcttggtgatgactcatgtactcgggaacatgtaagacaccaatggttttatatttgtcaaaatagttttcgtagataatagttgttaccgggttagatctaatactgtctttaccaatacccgttggatattttctaagaacatgtagtacacgacaatcctcaggaaaacgaacatcatgtgtatacttggcatactctaattcagcacccgttaggaaataacgcgattcatttccatttacttctggtgcctggccaatatgtgttacaaacatagcaccccgtgcagatgaggtagtgccataccaaggatctaaaccagtatgccctaatagggttagatcaatttcacgtttacctagttcagccattttgtttatcaccattaattagacaagatgcagtactactatatttcttatttgcgctgtttttagatatagccttttgtaagacttcaatgtctggtatcaccaatctcatacctcctgtttactaattacaaatcaatgatatagatcttaaataaaatttattggaatttattatggcattcacactgttagctaatcagccagattcaggtgaatctgtttattatgaaccagggttcagattaattattgagactcatttgaatatcttacgtaatgtcagatccacacgtattcagattccacctgaactgtattaccagttcgaaggaaacttttatggatacatggcagaacgccgtgtcaatcctgatatgtggtggattcaaatgcgtgttaatggtttagttagcccttatgattttggtaaagttctaagggatccttcagctaatgattacaccagttatttaatcataccgaataacgacatgattcaacacctcgttagcttatatcaaactaaaaagttttaaagcaagccaggggacccttaggccccctggtttatgccgtgttacagtagacgacccatcatttggtttccacctagattcatcatcgcagtgttaccattgccagctagagaggggtttagtgcttgtgcaaatccaccacccatcggcatttgattgcccatgagttgcatcatctgcggatgcatattagccatcattggttgctgtggctgcatcatcccaggcattgcaaagttattgttcatcataacaggttgttgcatcattccgggttgagcaaattggtttttctgcccagcgtttagaagatcttggatagatgctttattgctagtttgaacttgctgtaagggacgttgaggtgcctgagtcattgctactgcttgactcatggatggattaacattcacagttgtgcctactggtacacgagtagaagtagtttgttctttagcagtattacccactttaactacattatcctttttctggacagggatttgggcaactgggtttacagtttcagaagcttcttcttctacttcattgctgactccttcattaccatcaagagatgggatctcacgttgcatctttgcaaaatcagcaatcaccttctcatcaacttttgaataaggttgaatagcatcatcgaagatcagacgatacttatcaataacactatttagctgagtagtgattttgttaaatgcctggataagacatacaaaataaggtgctactcgctcaacagttcctgctgaatattcggttggcgaatcaccaaatggtacaaccagtttaaatagttcaattagaactggccgctgtttcttaggtacatttactccaagaatatcatccttagaataaagatcctctacgatagggaaccgaataacgcagatacggttaacagttttcccatcatatttaccatttgcttttagatacacgcttacaaaacgtgaacgtttttcagcagctttgacaaccttattaaaccactcaatggtatctggcttagcaccggatagtttctttaggaagtctgaacattctggtggaatgtctttatgcagagtagagtcggcagctacttctaaaatacgtgaagtaagatacttcacagtaaacattaggttagccttaacttgacgctgcatatgctgtagtacttgagaagtacctagccgagagatcttttcagatagcgggtggaaggcgatgtaatcatcgccaagccctttacgaagccaatctttagtaggtactactagtcgcttaccatctacctttgcaggtgctggtcgaccaagtggatcgagaatactgatcatatcctcttcacctactttgtatcggaaagcaggtaatacttgatcactatagaacttggaaagagaaatcgtaggcattgttatcaccaaatttaggattgatttgagcaggttgagccacagggtgctgatacggttgcatgttaatcggctgaccactactgtttagaatgttttgttgagtcttagtggggataacattcttaacaagataggtaaggtcattggagatcatcgctggtgcagaagcatcccgagtaataaccggactgaacagactatcaatgaaagtcggtgcaataaatcgttctaccgattcatgatttagactgatatcaataacagtatcaccagctaagtcagagtgcatggagattttaaacggaatctggttaccataagagatactgttaatcgcatcggtaataagacgacgttcaaagtcattgatctgcggagtcatatcaattccatccatgatactcctggtaccatttggatgcatttcgaatagatagttattcgctccatgtccatttgtaattgcaaaggaagttacccggaaatagttatccatcatgattgctggaactacttgtgcaagtagagatgctgcaacagtgtgatgatctgcaccaccccaatgcatggaatgctctgctcggttaacgaagcgttgagaattaccattatccataccagctttaactacaccatcaaccagtaattcagggaatacgtgttgtaggtcagctaatgtaacaaagccccgctccatgtagttgcagcgttcttttagaatacgcatgaacatattggaatggatatcttgatttcgaagtacagctgatgcatcacctagcatcacttcatcagagacacctccaaagatattatcgttatcattattagccatctcagcttctttaacagaatgctgccatgcattaagagtactagatagataacgagtaggagaagtatcacggcgatttgaatattggaaagtgcctgcttcaccaacactggagcgttggtcaatgatccggtcaaatacgccttgatgtagtccagttgattcaatgcgtttagctacttgcatcgtttgctgaatttggaaaacatcttctggtcgttggagatatgatgaagttccagtatacatgctaaacccgttctgagggatagtaatatcactcatgatatcgacgggtgcaaggatctggttagaacctaggatatgtgcttgtttgattaccccaaactcagttggtcgttgacgctctacaataacagtttcactattaaaatagatacgcatgttaggatctagactattgctaagcggactaatagagcaatggtcagagcaaccaaatagaatccggcaagtacgggtattaccaaagaaacggttattctcccatactttcatcatgaacctaaaccggcgttcaccccaaccattgacgatagggacttcgccttgagtttgagcacgtggtgcgatcacatcagctgcaatttgctgtacagctgcaacacctagattacgaccatcattagttgcttcttttaaacgttcaatagagttctcagtgacctctacagtaaatggtcgaacatgttcaggttgataagtaccagtttgtactagaatgaatgattcaatctgtacttcagtattaccgcccattgctgaattattaaaacctaacatagaactacctcaattattactgattaagtttacccagatgaattaccagttcggtgatcaccgacttaattgtggccggtacaacaaggactttattctgagttacctgttctgcttctttgaataaacgatcgggtccatgatagatccagttactagatctaatggatgcatgtgcagattgcacagcaatgcccgcaatatttacaggtgctactggaacaccattaatagctcgctgttgtcgttgatgtggataaagctcatccattacgtccttatatttaatttgaatacgtgtactattacgtggttgaatggacattgcatgatcaccactataatacaattctacttgcataaatacagcaacttgttggaaaccccaatgccacattagtgactgagctgctgccaacaaatggttaactgcattcttattaatgtggctgaatgctcttgcaggaaaagctttgtgcattacccattgcgcaagtaatatctggtgtggatagatatctttagtagctgtaactgcaacgcaatctagacattcctgaattaactctactgggacagtgtcatcgattttgtgaaccagtttaactacatcaagagcatctaagttataagctacaatatcaccaggagtaactcgttgtttagttttatgcgattcgataaatgatgttttatcatcatcatcaataccacctttatctggccgtttatcattaacccggtcagcagttgatcgttcagcagggtttagatttgacttaacatatctaaacatatttgaaacgatggaatgtgaggtggcatcgtttaatggtaggatggttaatcgcctaaccataactttagcctgtaagatatccggcacttcagctgaactcatacctctataaaggttggctaaggtgggtgcttcatcttctacacaaaacttaacatatgcacttagcttatcataagctgtttctactggagttccatcaattgatatttcatcaacaggccaatggttaacctcacaatccgagatgagactaattacttcacactctttatgcatttcctgagaagtgccctgatcaataaactcgccccaaataggtactaaaggacgaagagctagcgatacagatgcaaggttaatatagtcatgtttcagatatgtttgatctggtcgattatatcgtgaatcatcagtgataacttcttcaatatctactggaatataaagtttaccaatagttagtagccatcgccgaaaactattcatcggcatggctttatacatctctttgatgtaataggatagactcattgcaatcctcatcggatccatagccatatccatgatcttacgaatttctacataacaattccagatatgttgttgtgcctcagcacttaggccactccaataatcattgatttcttggaatactcgttgttgatcttgtacacggattttactataagccgtagttgtccaagttaaacgtttaccattgtgttctgtagccacttcagtaaaaccagtaccttgaactcctgtaacgatgatttgcattttaacctcttttaccaatgtagatacatgttagtaatatagatctcaaattttttttagtataacggcatttagtactgagggcatatcggtgcctacttcgagagtaagcaccgaaatatgttttagaaggaaggcatatcctcatcaaaagctgagtcattataactattattagccggcttagcataactattattgccgccgttgttatagttattgcgctgaccaccgttattgtaaccgacgctattaccattaccctgattgaaattagcagggttagatacacctttagcatctggatcgaattcagttactagaagatgcattactagtttatatgcggggtctaggaaaccgtatgcataagcatcggacatttccttaggtgatagttgactaccatctgctttgcggatatcatggaattgggatgggccaaagaagaatttgatctttggacgatcaggttgagtgcttagcactgcgatgtaaattcgaccatcttgtgcacggccaacatgtagcttagaaagctcaataaaattatcacgcttcttaccagctacgaagttattgcggtaaacaaagacacgttcagtatcttcagttttaccttcaattaagtccattgcaaacttaatgaaacatgcaaaggttgctaggtcagtattgaactcaattttaccatggtctttatcaccaggtacattagtacgaacagtaacccgtggttggtttttaaacagaccaaaacgcagcgtcggtcgtttttgagaaccctcacatggtttggcatgtagccaagtattcattacattaaaagggttaactacgggtgcattagactgctgttgtgacatgatgtgataactccaaattaaaactagattctttttaactagatgggaaatgatttctacgtaatattatcgcaacaagtatttcttctatttgaatttcttgtatgcttcttttaactctttagaaccataagcagtaatgtcatgatgaactttatctggtgttgttaatcctgtccattttctagattgtgccaattgttttaactgtgcacgaatagctttgtcttgtggttcaagtaattgtttatcgccaaatatctgtatagcaaatgatgtaaaaggaaatggagtatcttcttttaaaccatttagtttagtataccacatgttgtatgtctttattttgcccgtatgggattccaataaaagaagtctattaaaatggggtttccataataattcatgtgggaaatgggttaatagtaaaacagtaccttcaacctttggaggtttattagatatttccattgtagttaaatctgtatcttttaacttctggtatagttcaattgacacaaatcgttcataaacatcataagctaattgttgcggtgttcgtgatactttaaatgtagctttagggaataaccacttcactgcatctcgaccagtaatgtaatattttacagttgcttttatccccgattgccgtaaagcaaccgggattgtttgtgcttcttgaaataaaacatcgactgctgcaaccaagttaatattagtttgttgttcagacttcatagcctgccacatatttcttgcaagagtacggacattaatccatatttctttaatagacttaacatcagttggttgtctaggcttttgtggatgtgttcctataagcccttcgagagcaaaagaagttccaatgctaatcggaatattagcacctacatctctctcgataatatccattattattgccttttatttgaactctgtcaataatcccaatacccgctggatctgagcagcgtccgctgtaaatttttcaatatctggaataattaaatcagaaatactttctggagttatatccaaaaattctgataaatcaaaattctttaggctatctgacacagtatttttctttgtagtaactttttcaattaagatactccatgaaaaattaggatattcattttgaaatgtatcgagatcaccagtagctacatcacctggattacatcttaacctaattgcagagttagttggtagtgtcttgatatgttctttaacagtgtaattaagttgcttagtatccattccatggacattcaaagtatcatatctacgcgcacccttattctcaaggaatgtagcagtccattcgccattttctttcaccacaacatcaaataatccttttggaatttcatcgttgtgacttaatcggtcaaatccaccggcagctaaaatgcgttcatagatagacatctcatgaacatgtccaccattgatcatatatttagttaatgctaaatattcatctggatcatgtgttggctcttcaacaatgctaggtagctggtgtttaaatgcaccatgtaaaatagtgaagtcaacttgagatatacctttcttatgcattaaatcttttacttgatttaaagtctctgatgtggatggattccatttatcagggacataaaggaaatatgcatctagtttctcaatatactcgatatcgagaatctttgaataatgcaaatcaactttaatattagcattattcttttgttctacgaaaaactgcatttgcccacgatcgtgtgatggagtcccttcaacaatacggatcattacattatacatttcacatttgtagagaagtattgtaataaatctatcaattgcgtatgcagctggatcaccattgtttaattggcgatcaaataaatcccctgtaataatcaacatatcaatatcttttaaaattgtatcagggacagttttccaaaagttattgatgattaattcagtaggagtttggcgatgccccatatggacatcgcctactgttaaatatcgaaatatgccaggtttctttgttttatcagtcttcatattcgtcaccgtaaacacattcatcattctcaggtgtatctacttgcacacctccagatttagatgaagatgcattcggtaactcatataacggagtaccatcagtattttttaatacccgaccatatgctgctaagatttggattaacacttgtagaagttgtttttccaatggttcattataaacacaccgctctaagaattgagctgcttctttagcaaacccaccgcgtggattgcgattatgttctttattataataatccattacattagaaatactagcaacattctcaccagatgagattgcaacacttggacgaggataaagtgctggaactgtaaaaagtacaactgcttctttggtattaacacttgctacacgtaatggatttgatagctcatgaacatatttacgatattcatctaatgcaccaggtgcccacggacattcaagtaacggtaatatattctttacaaaaacgtcctcatggacaataggtatctctttctgatgaatgctaaccatggcttgcattgcatccatgatcatgttatcgctatctgtaactctagtgttcggttccggagttgccatcttctttacccataacttgttcaatctgttgtttagtcagagtagtgatgatattgaaacgagcttcttctttgttttccattagttgaggattactatttaggtaatcaatcaacgcatcgcagttttcagtagtgaacttattaggtgttccaacagtagcaaacatataacctttatcaccgcctttacgaacaatgaccgagtccatatgttctttctgattaactccatctacttcaactagtgagaatactggtttagtatcaccattgatagctcgcattgcgtcatcaacttcacgccgaatactttcacccatattgcaaagaatatctgcaagaactcgactaacgcgaatattaaatgttgcagtttcttcagctttaacttttaccaattgttggaaagactcatctataactttagcatgtttcgttagattcctaactgttacttctagcatatgaattcgttttaatagcatggagttcatagcttcgctttcattttgttcaacttcactagtcatttattcaccattattaagtcttgcaatttcaagaatattagaatattgataacgtacgagcttaccgatctgaacaggtttaccttgaactaatatagtagcagtaaatgtgatggacattttaccatcacctgtatttgattcatcttttactattacattagaatcaattagttcattaccaaatacggtattaaacttatcgcttaagatacgtcgtagttctatctctaattgtggataatcattggcatataccttcaacagataaggtaatgaagtacttctttccctattaataatatcttgggatggattagatagaatgaagtatgaaatcgttttatctgctacttgttcaggtgtatcaatccaaccactaacagatactgttggaatcgtttttggcatattgaactccaaaactaaagaaaaaaattaagttaagatgggagccaaatggctccctttatattacttgatacatacagttaaatacttacattaactagtatactaatatttacatgcaattagttcaatgtgatacacaataacagcatcttcttttttcttgagtgtacttgttaaaacgatatcgtgttcagtaacacatgcatgtacactaatgggtctggtagtaatttcactacttgtccctgaaaaatgggttgtagctacatatagctgggtatcatcaattaacccattcggatctctaccaacatgtacaaatggtggtctgttagccaccttaggatagtcgtctttaataacaagatggccatcttcagatgggtaagcatagtcatatccagtcacatagatacgtagagtaccatttttaaatgcttctttaagataagaatattcttcaagattaaaacgagttgaatcaactacagcagtagttaatttaagaatagggtgcagtggcattgatgggttattgtgcttaattaatagcatcggtattttccttaacgtaataagcaatatgtggatggttccacaatggactctcatcacaaaaactataactatgtatttcctcgccagtatctaatttaacagagaccacttcaccttcaataactgtaaaaataaatttagtatcaggtgaaacataatcaccagttacatagtcattatcaggaagatacaatagtcgtgtttgattatcgtgtttaagttctattccatctgtactattaaaatacatatatcccgtaccatctggacttttttgaaacatctttagtttatttggtacgagtagatcaattgacatagatctctcctaaacgatagaagagagcccctgtacgggactctcatttatttaacctagaagattacctacgactgaagttggatcttcttcacctgcgtctagatgcccatcaatagcattccacatacggatgatgtcaactttttcatgcaaactaagtttacgatcactcttgatatcttcgtgatagtttttataaccgaattctttcttatcggtatacataactccatccatcacgcgacgataatcaaactgtcgctcacctactgcatcaccttggatgttattataagaaccactatatccatcaacttcattattaagatacatagttcttagacgttcatgcgccataacccaacgttgcataatcggaccagctgtttgtagttcagctaatgtctcaagatacacaatgttgttcgactgccataaattatctttctttgtggttagattccgcagtgcttgaacagcagctgattcactaatcatactgtacatattttgtgcagtattgaaaaagctagcagcagcagttgacatagttgaacgcagtgcctgactacgctcacccaaccattgggttgtttgctgtgtaagatggccacctgcacagatgtccaagaggtctacaccatgtgcatctacaatcattattcacctcagatactgtactcatatacccagcacagattaaatagacgttgcataataggttacctcttaaagcttagagatcatttcgacatatgcatcgacaaaccttctgtttaccactacatcaccattcccacgagtgatatatctcccagttaatatagctaccgatctggcttcacgttcatctcgttcggcttgtgataaacgttccgggttacgtcgaataatttcacgaatattagacattgggtattccccttatcactattgcaccttagtgatataaatctgaaattgaattcagtgtaacttcacggcatagttgtccaagaggtctacaccatgggcgtctataatcattatacacttcagttattggccgtatatgaccagcatagattaaacggatgttgcataggtaaattaaatgtgtctagttcctgaccgcaccaatttacagcttttgtaacaccttcaacagttacagttaattcaacatagatgtcatgttcaggtgcagttaccacaatagcgattggatcatcatgtttaatacggaatccaaacttaggatgatggaatcccgtatactcacctttagtattttctagaatacattcaaatagattagtttctttattaagtttaaatgtaactagtttatctgaatctttaagtaaaccattatccccaaatacattgaaccgataatgcttatggcagataccaagtgtttttggtacatcatgggaattatcgatttgcttagtacattcgttgcatttactatccatctttatttacctttaatagatttgtttatcaaaagaacaattgattggaatagtgataacttcattagtaattacatgtttgcctgtctttttaaagaattgggcaaattttgaagtagctggaattacaaaggtatcatcccgatcattatttgacatattgtacagagtaaatttaccgtctaaatcaaacctaatttgccattcaatatcacgtactttgaaatctataccaaatcttaagtgatcatcaatcaattcagaaccaccgtattcataagctccggtgaaattccaattaatttctgcgaattggaaagttacaggatgttcgccatattcatcttgtatatagtaaccatcatgagctttccaatagataactaaatcatgcatgctaccagcctcaaagaaataataggggagttagactcccctattaatttattttgcttttagccactcttctaatggcggtaaatacttctcatgtgcccagttaataattgtttctacaacaggaccctgtaattcaaggttacctgagatttcatgtggttcatcaatagatagaacccatgtatgtggcgcgatgcgttcagttgctttggttaaatacacatcgggcattaatgttaaattaagttgcactatcttcatacagcatcgtcagcgacatgtctaaaaatcatctgggtcattttcatatttaaaaatgaacccattaattggtcgacggtctttctttttgagtttgctagttactactttctttgataatccaagatcgagatatgcctgcttggctgatttgtatttcaaaatctcgccagtttccacatttttcacaagtgtggtcttattttttagcctgactatactcaatggattcatcccaggttggccattctgaaccaacccgacgtacaatgtacctatccataatgactggataaattgcatgtccgctaactttcaaagaaatcgtacctacactaacccctatcgcctcacttgctttcttttgcgagtcatatttcctgatttcacccgtaacgatatcctttatctcaataccgtcgtgctcaagaacaattccgtccgtgttaattccgcgatttttcaacattctcatgatcgcggtattctttgctgatccaatataaccggttttgattgcatttccatgcaacacattttcactctgggttacccattctaggttatcgggtactgtattgtcacgatcaccatctatgtggttgaccactttctcattgatggtgttatcgtattcaataaatgtcagtgcagctacacggtgtaaattcgttcctacataggtgccatcatctcgacgcaatccaagatctctgtatccagttgtcgccaaacttgttaatttagctgaaccttcaaaaagacttatgaccttgagttcatcattgattgcatagcaggtaaaactagggatgaaataatatcctgggaaggtgggaacctccaatccttcttccgggaatttccaaatcaagtttctaggatgaatattgtcttcatctccatcagaaaacaatatttcgcagcggctaacaaactctaatggcgcatgccagcctttaaaacacactgctatcaacttagtaacatgaatgggtagtctatgccatggtaattcaagaacgtaatgtcggtttattggatctatcaatttatccaaaatcgatcatagactaacccatccagagtcagtctataacgcccgaatgtaccgggaatcacaatttctctcgatttgggtatacgactgtaaataaacacatatcctccattggaagacatgtcgctgctgtaccgtccacttaatatctcccgacattaagtaactgctctagctttcactagatggtgagactatatcttcttcccagagggaagccttctatttcggaccacttggccctactctactcccttggctgctttcgcagtggtttcgatagtcgttgaacgttcttcctatctcgcctcacggcaatacgtagaagcttcgctgctgattgtccaatcctaacacttttcaaaccgttacattttagctttcgctatctgctttggtagttaggctctaaggaggttccagcaattaagaaggttaggagaccaattaaaatctccgtcgaaatctgcgtttggagccttaaggcataaaactgacatgctgatagaattatcattaatgtcatcttttactttagtaataaagaactgctgcgtagatccacgttgaagcgttggcaatatcttcagttagttcgttaggctaacccgcaccattacgtgcagctctagctctcgctagacgttgagactatatcttcacctttggctttacccagtaaggtgcttcccacttcgagtccacttggaccctacgtgccaatgcactagtcgttgaacgttccacatattacagttaagtaacttagcggcttagctgctgattgactctattcagttattcttaagcattcatagaacctttcggaactattgtagctaactgacctaacgagttgttccagcaattcaagaagttttgtcgagtatcatttctgatacaaggaaacccatattaagttaagtcgctacactaattgcttaggtggtatgtagcttctctctacgcgctttgtatctattgtaatcatcaatggatttgttaaccatttcttgggttaggttagaaacgtattcgaatagccgttccttatcatcgaccctacagataacaacaccgttgaataatcttagatctggtttctttaaaatgtcctgcactgaccctttaattaacccggttctaagttgtaactgcgttaggtttacatatcgtccaaaggtgttggtcttgaagtctatgcaataaacttcaattgcattcttacgcttctgtgggtgataatccccacttacttcgaatacatatttacctctgaatggtttaactaaatgacccaatacgacatgtaaccctttattgtgaccaagctctaggaactcggctacttctttcatcgagatgaagttatttacttcaccagtcagaatgtttgtacatttaacagcgagtgcatgtttattggcaccggttataaatgcatgcttaacattaccgctacgagtttcccactctaggttaaggtaatgattattatgcttaatggtatctttgtggttaacgtccaactcattaaagttttcaggtaacccatgaaacgccatgcacacaaaacgatgaacataacgaatctttctaataccgtcatcattgtggatgttaacggtaaggtaagtacctttagttgtcttattctcgtgttgtgagattaattcgcctttaaggttcctaacttgaccatgatcactgacttcgtaattattgaaaccaggtattttacgccatcttatttcttcattcataattcctcattagagattcctggttaccacacccagaatctgtagcgctttaacttaatagattaatttcggtgaaaagtacaacccatccctttataaggggctgcttctgcaattaactctttaaatagatctgcgatgatttggttatattgaagtacattctcatatacaaatgagaatgcttcacgagttgtcatgttaaacttagcttttaacttgttagttagatgatactttaataattgacaacctactccccaagggatatgtaattcatcataatcatgcgggtcactaatagaagtgattactgcacgtgccgtagcgttgagacgagcaccaaacatgtgacgccgagcaagaccaggcttttgagcaattcgtgattttgcgtagatctcgtagaactggccatatagtcttagtcctcgcatagtcctattctgagctttaattggactaagtggtacagatgatgcatcaatactagcgaaggttaaggtagcatcaattgctgcttcaattggtttatctaagtaagtaccagatgtggttgattctgctacgaaacagagtttagaaggaactggtaaatatttagggaataacttatctttattctgagcaacgaattgagcgaattcggatttattattagagataatatttgcatctagtaggaattggaagatctcattgaaattatcaatgaagtgatttaatcctctttcaaatccacgatgcagtagcctatctacttttctgcgtgtttctttagaaccaatagattccacatcgtatcgataagaagtatcagttagatatgctaagaaatcgaattctttagttactagatatccggttagcataatgattaaacgtgggttaattagactacgtacatgttttggtgtacgaacccacattgatggttcgataggacggctagaagtattgacaactggagtattacaaatatcacagattactccgagtttatgtgcgtcttcgattgctcgacaatcacagcttacactactttcaattgcttctgaatcttggaaatgagaatagaaatgcctatcaaattcttctttctcatctgagttactcgtattgtaatcattggcataaattcgtttacccgtaaattgatcatgaacttcattatgatcaacaactttggcataaagacccataccaaactcctatttatcgattaacaaaaaaaggagatataagcggcccccgaaggagccgctatatcagtttttacaatggaccaccaacggagcctggcccgatcctagcgtcatctacaaagcttaacctccgctcttctctgtagcataccggcactagtatcatttaccatccattgtagtttttgatcacacgtcaccttttgagtaactcctttcggttaagtgatctatcatcctcgtgtagtgataggtcgacctagactaagtccactagtcgattacttcacggaacctactcctaaccgttatcaccgaagtgaaccagggtcgcagtattagaatcgggatgttacttatttaacatccctatctaccgaggtatttcctattagtaccaggtacccggtgcattataggaaggagcgccgtaagtttgacccatgctgccagccataccaacttgtgcactaccagaaacagccatgttacccataccggtgtaaccagcgaagcgctgttgaccgaagttggtaattaggttttccatggttacagttacaccagcggctgctgctgcggcatccattgcggtgatgaatttcgggttaaaggttagacgacgagcacgaccagtataggtaacgttacctaggtacatcttgtcgaagcctttactgttattcatacgacgcacaatgtggtcattacctacctgagtagcataccaggtcttccactcttggtcattaccttcagacatgttcatggcacctagaacgtcaagatcacgacggtcgcttagttcgccatgctcatcagtgtagtgaccgaggtctacttcatgatggttgtcaaagataatcggaccagcttcagctaggttatagaactgacggaaatcagtgccgtataggttagttagagcttggaagatcaggctaactgcacgagcttggtttacgccaccagctgcatctaggatgacttgctcaatagctgagttgtcgcccattggatcgatatcgatctggaatgcagggttctggttaaccatcttgttcattagcattacgaagttgctgtcgtctgccatgaatgcttcggtgcgagtttcaatcgctttacctagctctgagtaataaccaagtgcaccaatatcacgcatcttgctagtagcgatcttcggcattagggtacgagcccatgcctgggatgcagttgcacgatacgcattaccgagtgcgaacagccacatttctagagtccatgcttggatccaggatgccttacgaacgtcagtgataacgatgtaaggagtgaactgcggaggtagagctgcaccaggtagagttacgccaaacataccttgttgctggccagtggtcggagtccaatgtagatctacgaatagactaacttggtttagctggctatcggtatcatagaactcgttctcaggtacgttggttttcttaccacggctagtggagatgaccatgtcagaacggatcggattaccacagctatctttaaccggaataccattgtagtctaggttgcaggtaagctgttcgttttctgctttgatgtgggtcgcaatagagaacggagtctcattgttacgacgtgcaatagcatcttcacagatgttaacagattcaactagtaggttcttaacagctagttcatctttgaagtcgaagtcagcatacactgcacggggaccggcagatagtacttctagaccagggatgttgtaacggttccgtaggaactcgccgatcttgctccagtattgagcagtgaatacatcacgcggtagtaccttctcttcaatgatgtcgtcggttagaccattgttgattttgtgggtacggggacggatgcgagtaccaggtaggttatcgagtactagagtacgaacgaatgccttcatggaaccattgatatctttagctagtttaacaatgagtagaccagccataccaacttgttgcgcatcacgatcgaaacgatggatatcgaagtcatcaggtaggtcctgatggcggattgcttcttcttttactttagtgaatacttgtagggcatctgctgaacgagcatcagagccatctagtcgaccagagcgacgcattagatggttaatgccagtagtagacccaggcgcgccagtaggacgttgagcttgacgctgtgcagtgggttgcggagcaggagcagtagcttgagtttgaacggtgccgatttcgttttcgttaacagccattttaaatacctttacgattatggtttcttgatcaagaagaacctaagtacttagtatactagattcaatttagtaatataaatctcaaatttttttcattacaacatagacgctataatctgctatcagcagatcgtaacgaacactatgttcactacatattattacaatctgagtattatttatttttcattttacaatttccatatcttcttttttgagtttatgggtataaagtttgaatccagaaactaatttacgtcagtcctgtattaaataataactatcagtatttttataaaatgcagttatcatttactttgcatatatttacgaactgttccaaaaagagaatggtacagtttgtatagtttactaactggatcaactttattattatcagttgtgtcaaatttagcaacaaatggtgaatgtgctgaagcagatgtttcatttactttaactacactaccaaatcgatgcgcgactaatagcttaactaattcctcatggagtttagtagcagttgctaatggattggggtcattaggatctatcttaactctacgctctacattgaaaaagttaactacaatttctttgctagtcatgtatacagtaagatctttgttattacctaaatatagtggcgggtcttcaacattatttttagccattgtatattcctatttgtaattactactgttgttaccaaactatgatatagatctcaattaatttttaatcggataataaccatgtataatttatttaagaatgctccgtcacgtaaattggggcaggtggttgatcctaacatccattatatccgacgaatctacgctgagcaaattagggacgttaaaagttattatagacgggcaccgaagtatgttgaatctaaaaatatattagcacaaatgattcgacattttaacgtagagttactaagtgatgatgctacttttataaagaacgtggacgatcgttcacgtgctattattcgttcatttggtattacatcatctttaaataaaggtaaggttcatgtaggtggtgttacacttggccctcagactgaagaagttttagtatccacatcagagagctttgatctaaaagatctaaataaaacatggtataaactttcccctgttacgtatctgtatcatacacgtactgatactaatttacctatcatgaacaataccacgcagggtagaggctatggtgtaactctagtaaatataccaatgcttcttgtgatgtaccgttactggtatcgatggcaagttgagaagaatcctgatgaagttgaagatacatataggtttataggatcatttgtattgccaaatatggttgactcttatttagatatttctttctttaacaggttagcaaggaatgctttagatattaaaaatccaacattccctataccgcatccattttacatcactgatatgaatccacgtattgataaactatgtacaactatcaatagagaatccatattaaagggtgtagacatggagggtttatcatggataacaccagctatcgtacaatctaatttgttcgatatgatgcgactcccacgagaacctattaataggaataatgaatgggcttatgtattggctcgcacacccttcattaagtatcttgtaggacagcttttaaagaacactggttatgatcaatcttctgttaacgctgtattaattgatcttatagaagcatctaatgatcaagcatttaagcaacaagcaaatagcgagtttgtaaaagctcaacaggcacaagttgattggatgatagatgcacttaaaagaaaagaaatgtgacataaaccccctcctaaattggaggggggttatatgccgttttattagaaattacctttcttcattttagaaagtaattttctacgttcagctcggttaattcctgggatagctggcaatagcattttattactaaacttacctggtcgacggtcatgatttagtaattgatcaactacagcttggtcactgcttttaactccattatccatttcatctaatggatccataatagttttagcagttagccttagatgcgtaaccagttcatcgaatgaactatcagtattaataagttgtttatcaacaccttctttaagagcttgtttaatagttacgtcttttactagaatattatcacattcccaaagagttgtatgatgggtatttagcattaattcaagtgagacattattgtaatcattgtcagcacttgagtgccaattgaattcatcgatatagtcatttagactatttaactttggtggttcgttattagaggtaattaaaccaattggttgaacatcatctagtgaacttttatcactagtaattgcagttgtttcagtagtaacatcagcttcttttaattcattagaataagttacatataccaattcctcagtaccatcatccaaaagaacataggctgttgctttggtggaatcatcaggggctaatccatggatcctaatacgattatcatttactaatttactataatcattccaagtgattacacgaacttcattagtcttttccattatcatctacctcttttaatttatctttaatatattttcggataaaagctcgtttctcttcacgagttaatcccgatggtactgttggtaatgtgatagtgccgctattaattgccttcttcatccgatctaagtcaaaattaaattcggtatgatttgtcattatattgaaccatattaagttagtaattggcaatcagactatataaatcttaattattttttagtatataagcctcccactaggggaggctatatttcttaatagaagtcggagatgagtcgatcgttatttttatcaataaggaaaatacctagggactctaaggttagatagaatacacccatagtatttccaatgatagttctaacgtcagcaacacgcgtaataacttctggaatacgaccagtttctactactgtactcgggatatggaaatcaccaatactggttttattttcttcagtaacccatgcttgaatacgagcagctaatttcttatcttcgataccatcaatccattctttgatcgcagttttattattaagagtaactgagatctttacatgtgaataaggtggatcaccagcgtcaccaaatgatggagcaaatacagtcttccacactaatccctttttatgggttgagttatcttcagatttataagactcaggtcgtttagtttgaccacttgtcagatactcagctttaccacttctaacagactcaataatttctctttcgatatcaccaacttcttttagaattgaagccaagtcgattttctcttcagtctttacagttttaatgatatcttccatgagtgttttagcacgactattaatcttcttaggtactttactatcccttagtcctacacccttgatctccattcgtgactcattaaacattaccccttcttgggcatcctgtgatgcaaagtaatgtttagaacgagtagttaaggccagtactgcgaaataatattcgttcttcattgcaaatagacgaagcttatctttagatacacccatattagcggattgaatcgccaagatatgcataactacttcagacactagaaacactagtgcgaatactagtcgcttagcttcattgctaaaagttactttaccaaagaattcctcaacccaccattgtaatgtaaacatagtggagtcagtatctgaaataacagcagctcgtctatacacagttggaaaagcatgaatgcttgatggtacacatttagtcaagaagaaagcttcaatcaatagacgatattcattaagagtttcagcgatatttcgaccagtggcataaacttggtttaatgtatctggatctgactcttttagtttagctttagatcgacctttaacagtatcaaagcaaataaagctagccaatagatccatatcaccatcataagttgaatattcttcttcagtgatgatttgttcttttgttccaacctggcttaatttaattagaaagctcttgattaattctttattgtatttatataagtgatatagatcacctacgtacataactgctgctcgttcgactggtgtcatcccagtagctagttttaaaatctgcgccgtgtagtacttattttgccaatagtgtttagttgaataaagaaccatatcaactacttcttctggcgttgggcaatgtagattaaaattagttactgctttttgaattaactccatatcagctacattaatagtgtttactaaattagcttttgtgatttctggagtataataatgcctattacccataatgaatttttcattatttgagttagcataagaggtaccagttctacaggtagatgttaaactagagtgtgtggacttataataaagaatagtggcagcagatacagtaccgcctgaatatgagttattgttaattttgaagttttcttgctcgcctttacgtacttgtgcaagttctgttttaatttgtgaattctctttatcgccggcctgtaggaaagcagctgcttcacgttcagcctgcatctgttcacctttaacacgcttacggtttttcacaccttcggcaatatagatggagtgcgtagactgtctaacagactctggtaaatatgcggtcattgatggagataataatagattctgtttcttaacacggttaagaaaagccataaatgaaaccgtctttaattccctatcaccaaacttatttttatctagaatagttgctaatggattacgaagtgcatattcaccattttgacgtaattgttctttaacaaattctttacattcttctaaactaatatttaattcatcttttgtcattaattgaagatatttggcattatcatcaagacatgcattaatgatatcaatatcacgatggtaatcattgacatcttttaaaaacggatttggttgggcaaatgcggtcatttcacatatctctcagtatacttattttttaattatagtgaatgatttctctctttttaactaaaaaagaaaaggaaagaatgggtaccctatacgggtaccctaaattgagaggtagcacatcaacttacattcacattagatgatgtaagtaagtaaaaataaaacaacataaaaggagccataatggctcctttatagttattcatatgtcactgaagttggtggtgcattattttgtcgcactgccaatagaatgcgatcatacattttattatcgacatcatcccatactaatgtcagacgtttaccatctacacgttctaatgtattcgcaacaatccaagggataccaataaacatcacactttcattattggccattcgtacacgaatgtaattgtattgtgttggatcaactggagctgaccctgctggtaaacttggatatacttgctgcccagcagcagctacatcaaaacccattgcagatgctacagacgcagtaacaataccttcgactgtaacgttcttaaaattagtacctaggatagcatatggatagacctcgaacgagatccgatcacctgcttgaatgtctcgaatattaacggccatggtaataccctaaaatagttggttacatagggtattactcatctagtaatactactacaccaaacagacctttcgtatccattggtactgtaatgagtacatgtccatctggatacttttctttaaagctattgataaagtcggtgcaatattcaataacatatcctttagtagaataattctctaactcaatatcttcatcaggatcatcaaatgagtcatgtccatacatcagcatatggatgtatatgtcattattaagcgtatccatataacttaacttacgtgattcttcaaataaatcaagtggtgttggacaatctggatatatcattcgctttgtatattcatgaagcaaatgttgcgaatatacttctgactctttagatttaaatacgataaatactcgtttttccatatcggttcctagtaggaagcctatgtgaaccgataggctttcctatttgcgtcaattgttaatatgtgtcacttaatccacatcattgtaacagtccataccaaagtcttcaccttctagaatataaccctgattatgttgatcaactgctattgattggattctttctacaccatatccattctgatagagatatgttatttcagattgtagtttactagccaatgttttacacacagtcgcaaaccacatattaagaatactcaatgcatatttatcttgcataatcacaggtgctactgatggaaagtattcttgtaaataatagtcaacccctatgattggttgagtaggctgttgtgctagaaattcaatatatgcattaatcgcctgataccataactgttctatagactggtgttcagtatatgggtaaggggtattgtaagatttattgacaactacatcagccattttattaacaatgggccagatatcactgatgttaataactacgaaactcgtcagtccttgttgacctggagttatgttattagcatcatttattcgctgcatttcttgttgtctataaagaagtggatgcatcatgtttgagacctcataactaatttagttaccatcttatatttatctacttctatacatttaagactagtaataagattacctgcttgaataacttgtttttggattatctctaggaaatcagttccaaataaatccaataccctttcgataatctcagcagatcttaagtgccaattgatggtattaggatttccctgatgatcaaataccatcatactcgtcggtctatctggttctatataggtatcgcttaagtaatcttctaaccattgctctaaaaaagtaggccaatctaatctctgccaatggttaaagtattctacatatgctgctagaagtctattaatacaccacagtacaaaatcagtcggctcatctacacctagctcttccgtaaaagaacgcggtttcaaaattagcaacaattgcatattgactccactctttaccagtgactatagttaatagaacaactttattatctattactctaatgaacttatagtctattaaattcttcggtgttctatgtagtaattggattccagttgtataaaacaaattaatgaactcatcccaatctggaccgtttcctaattgtattggtatatccacaaaaggaataaccgtattatcctgttgtaatttagacatcatcttaacgacccattgagttaataagacgatagctgtagcttcatccttatttgttaggtaagtaaatttctttatcaatgtgattaattgtgggaataccacttcgattggcaatacatataccagacgttgtacttcctccgatgtacaatccatctcgtgcttctgtttcataccacagttccttagtatttgttggaatgaggtgcatgatctgctcagcgccctcatcgagaagttctattagtttatgcatgaaatgaatgtctttagcatattcatagaacatttcttctttaacgaccatttgcataagcttctgttctgccaatgcaacaagcaaatgcattgcttcgatataactaatatctaaaaagtctaatacaaatcttagatagttatcatctttaataagtttacttttagtcgctcttagtaaaaaacgaggttgtggtgtgagtaatggtgacgtatagatcttctggtttctcagtatcataaataaccctatttaactggatgttaccagctgatggtagaactacccggttagaacaattatacagataagttgttaagtcaatatcacaaatatctctataacccagcatctgattaattagttctatgatatcattagatgtgctacctgatgccctctcagacgctgctgccaatacaattgttaatgcatattctgcaccaatactattttttatagatttccaaatatcagaatgttgatcttgtacaaaagatcttacttccattctgatacacattgatgtgtctttatcattagatatgttcattataaaaaccttataatcggtataaagccccccataaggagggctttatttagtatagattattttctaaaatgtatcgctcagcttgcgctcgctgatcatcaggtaaataatcaccacgttgatattcaaatactaatttctcaataggataagttgcattcttattcttgtatacagaaattacatagctatgatactctagttcatacttaacatcatgctcaattctggttgaaaaatatgccatgttaatagaactaactagagggctaatatatttctcttcaaatagtattaaattatcaagtcctaaatttgcaaagaaatcatggttaaccttaggtattagataagatactttaatattactatattgtttaacaattacaccaataagtaatgcagttaactgttcttgaatatattctactgcgatgttatatgcatggttagtagtgatgtggtctttatttaaagtatagctactggcactagtagtagatagctgagttttacgcctagattcacagatgctataacctagtgcttgtaacttaattttgtcaaagccatggaagaatgtacggagaaattcactaaataaatagtttaatgggttcagtaggttaagtgacactactgcatgatcatcgccattatcaatcccatggacacgatcatattctgcgatacgataatctttgccactgattaaagttataactgaaccagctttaactacatcccattggatccatgtaccactatcgatatatttagctacttgtttatagatatctagatagatagtttctagataaggtagtttcattagattttctacccaagcaactttattactatctacgtcagttacagcacaattaaaaatagctgctgccatcttaagattggtgtactggtctttggctgttttatatgaaactaaactctctactatattttcaaccattagatgtaaaaactgttgagccacatctttactcaatttcaccccaatcgcttcatcaattgaagctgaagctgtaagctgacctagtaaatcgtatattgctttttcttggtggcgtgtatcaagtacaatgagcttattcgacattatatttctccaattaattttttggaatagcgatccaaactgtgttctttaaccgatagaatattacaaacttacctgcatttactctaggtataatttttaatatatcccaaagatcagatgcggcttcatgattatcatgaaaccattggatttcttgaggggtattgtttattgggctatatccagtagtatacatgaattcaaaagagtcaatagagtatttaaagaagtcatcaattaagctgtcctctactgatttaaatatatgctctaatgtaccatagtcatctggatgtattccaaagctttggcacctaattgctaaacgcgcatttattagctcttttggtgatcttggtactaacttggctattaccctcgttacatctattacatacaggtcagctacttggggagtagtcacagtacaatctctcattaaatgttcaggaacatgatatagatctaaaaatatttttagtcaaatctgttcgtggtaagccgatgtatattataccttagttgggtattatctccatcgaaaaaacgcgtacagcgcattataggacgtttttatgaatccaattactaaggctttacgtgatatttcttttaagatcccaaaacagatattaaatactgttttcctatctagcgaaatgtcaggctgtggtgcagctatctcactagaaaccaggatacgcgaagctgttattgaaccacgtgttatgttagatattgatttagtcggtggttcaaaagtattcatcccactagatttcccagtgcaagcagaatatgttgacccttatacagtggtttattatattccagacgaatacactcagcaacgcccaattatccaatgttacagtatccattttggagtattaggattccacactgctggctatgctatgcactataacgaatcaagtatgggggcattaacacgacgtgtactagattcagctagacagttaccagttgcccaaacagcatatatcaacttaattaacccacacactgtcatggtcaggtatatcaatattcctaactactcatcattccttgcttgtcgcgtaggtaatgatgaggagctaaataccatacgacctacagccatacctgcattttcaaaactcattgagtatgcggttaagtcatacatctacaatgagttatttgtatctatgggtgaggcacagttatcaggtggtgctgagttaggtgtattccgtgataaggtttatgaatatgctgatgctgaagaactatatcaggaacaattaatgcgttggatgaaaatatccaggcagttcaatgatcctgaaggtaagcgacaccatattcggacaatcacagccgctcaataaaaaaataaaaaaaaagacataatgccctcccattgcgggagggcttatgccattaagataatatctaaataacactatatttaaaaacatactggtataacccatcatcaattaatactgttgagaatctttttgatgaggtcactaggtgcaataccaatgcctgaacaataccgtctaaagttattacacggttggcatgctttcttttcaacgatatttaattcaaagcaaatattaccacgtgaatctagaatggatataaatgctttgttacctgttacgcgatatgtcttaccgaatacaacagttgttttatatgcaaggctattcatgattattcctttaacatagattattatcatgtttgtaatatagcctttaaatgtatttaaatatttattaaaccccatagcgatgagctatatatgtttttaatacctcatacgccttatcagttgccatggagctattgacaaaatcagaatgatcaatcttaataatcttaccaaatgaatcataatcgatagttgtaaccactattcgatcactatcacgaatcaatagtttatttttatttaaaacaaaaatattccatttctcgccatcggctaaaataacatcctcatctttaagattaagacgaacaaactgttttacataaatacttaactgagcaactgttgacataatgatttctcgatatctgttaatgaattaatcatatcttggacattaatggtaataacatttttataagttaaataagttggatatgaacccataaatgtaatagtcccacagatatgatttttatatctaatatcaatacacccgtcatatctccagataaaatcaaatgatcctttagtgtcgtgttcaagtgtaagaatagaaccactaactaatttaggatattgttcaaattcagacattacataatctgccagttccttaacctcaggataatcaatcaataatagcatatacgtaaatctcaatcagttaatataacaccccatccagggtggactctttcgaaaaatggcaatgtattatttcgtatactgtctgcatctatatttggaatgtgaatggtacaacagtgggggttactgtcaatcttgaaatagaaattatcttttaaatcttcaaccttggatgtttgcaatggatataaaataccattcccccaaacataccaacgtctatacagcttatcgtttaaccgcttctcaataaccgaatgcgatttgaaacgaggaactcgcaaacgcatcccgtttacttcagcccatttgtctacccgatcatagctaataattccatccttaaccattacaaagataaatccctcaactatgttggggagacgaactacgtgtttcagaaccatagtaaacggagataacgtcagatcaagttcagctgccatttgctcgtcgagctttttagcagtgttctttgccatcggttatctcctaatatacagattattaattatcgctagttatttaatatctgcaaaattctgatttactttacccataaaaataccatcagctctatcgtcataataaagcttccctgctttagcattacataaaactccataaatgtgaccattgtaaccatcaaaattaaataaagatggattatgcggtacatgaatgaatcccattttatcgcacagaaacttagctacagcagccgatcggctaatacctgcctcacagtgtacgaataggtgttgatccttaccaagagcttcacagaacgaaataatacgttgtgcatgacgatgatcaaatagatcataagaagaatcaacataatcctcaatgtcatcaacattgatacgtaaataattaagatgttttgctgaataaagtgggactctacctttctccagtagacagatcatatttctaggggaataaaatgattcagccacatgcaaaggaatataagtaactgtatttactggcttcatattacacctcgttacaaaaaaaataaaaggagccccgaagggctccagtataagttaatcgaatacaagaccactactagttgcttggtcatccacatctagagtagactgacgcttacgcatattagctttggctcgattcatcatttcacgacgttcttctaatcgtttacgaatatcttcaacagataggctagtgatcacaaaatgcatttgatcgaaatcatatttctcgggatcggcataaccagtagtacgagttaaaacagtgttaatggatacttcgcgatcagggtcagtgtatagtgaggcaatagaaattggatccagaatagcctgggcttcttgacgatcaaaacacacgtgtaattggacagtctgcacaggtacatcatggtgcttatggaagtgtgcccagttagtgatatccattagatcaagactttggtgttcttgattaaatagagttactagtgcatctagtacttcaagaatgttttggttcaccattgactgcggtacaccttcaacattctcatgatagttaataatcatcggaactttactaacagaggaaaccccttcgaacgtcttaaggctaccactactatttcgaagactaatatcactgtcgtaagatccaatgaccacacttacaactacttcaccttgttgttgtagatgactgacaagggaaggaccaatagttgaaccagaagcaccacccattgaatacactacaatgttagcatcccctgctgggaaatgatgggcaatggcaggaatgtgtgcagagattagttctgcggctgccttacgatctttacccataccgatagcacgtttacgcgcggtctggtcagctagcttagtatccgcttcaataatgatcgtattatcgtcagtattatgtttgtgtttattctgtacactggtatcaatgtaacaaacatcctcatgataaccatgaaatagttcaccaatacggaaaccagcaccgccacaaaagtaaattcgagtttttactttagacatcattacacctcattgtatttaatataaattcatataccaacttgtaaatggtatcagtgcttaaaagtaacgatctcttcatgagttcgttcttgatgaacaattaattcattaaccactttaccaatatctgatttaaattcaattgcaagcttatctcgacacatataggtttgccaagtgccaccagacttaacacaatcaataatcatgttaagtacattcttaacttcaatcttactgactttataacggtaaatacttagaagttcagtaagccatttcgtttttgggattttggcatttttacgttctttagaaatatcaaaaggaattaatgcaatgatctcaccatctttgttggtgaattcgaataccataccttttgtattagctaaaggacgaatattgtaattacctttagcactgcatacttcttcagataacttaactaacctatctagttgaacatcagatgcatgaatgttatcttctttaaatgctttctttagttcatcatgagttagtggagtacgtactagagtgtaatctttctgttcagtcatttttcattttttccaatttttctattttcaaattaaacggtattggctttttatagccaatcccttattactaaaagtattagattctcgaactaaggatgggttataccccttctctaataataaggaatattatatgggacccccccaaagggtcccccccacataatatactatttatataattttctttttagaagaaaagagataaataagagaaatacagtctattaaagtaatgaatttctcaaaaattaaatagtacaccgcgcgtcctttgcgtcggattggcctgccagacgatggtccggatgtgcggtaatagcgggtttttcaaaaatacttgcatcgcagttgaattgagcggttgattataacgtgtgatcttaatagtaaatagaacttcttcaacatctgaatgacatccttcgaaactaaaatatacttcagtccgatcaataaactgatacatttctacagctggttcagctggatctttaaaggccaacttattagcgaaataatcagtatgggctagaattaattcttttacattatttgcattcttcttatcaacaaggaattcaaactcttcaaggttatctgttttgaaaataccttgataagatgacgactcgattagttcatcactgatatcatcaacatgaacgcccggcataaattcaatgactggtagaataagcttgttacctcctacgccatcagcgatatgaattccaatcacattaccatcactaatgtattcgtcatcaccgcaaataacggcgccggccgctagatataaattatcaacatatttcagattatcggcaataatgcgggatagcacatattctcgcaccatggcatcatctggacttgattgcggtttaaacgtatagtgggtgttatgactactcatggtcgcacatgtaacaaaaactgaaatatctactggattaaaaatccaatgaatagagatatcctctaatttatgtggatgatgtaaaccatctagcttagatagggcttggagttgttcttcccaggtaatgttaaattgagtcattttttctaacctcttcatttattaaaaataatacacttattttactttagcagttgatacttcacatacattaactaattgttcaaataacggttcgttatctggatcattaactaattttgatgtattaataataataccagaatacagcatatcggttacgtctcgatcacttgttttgctggttacaccttcccacttccatccatagtaaattaaatcaaatgatgaaccaatgttaaagattaattgaataaatttgcatgtaccattttcttttaaccaatcaggtctatatggttcatttttataaaattcatgcatgagcactttaaaatcagttttaatgttttcatgtataatgcaatcaatagaatcaagagcttcatcaagagctgatttagactcaataatgatttctgatgtattggtagattttagtgtaatcatacctagttcatctgagtgtgctcttccgatttgaaatacattgagcttaccaattggtaaggtggcttttaatggtaggttagtatagtgggatacatcacttttataactgtcttcatatgactcaattaaattaagccatgctctttcaatacgtgtattctcaaaatgctgttcttcttctagtaatctagaaattagatgattaatgtattgaacattatgaccagcgcctgtaattgaattatattttgtattaccggtaattccccatttattattttctttatttatccaaccgtagattacactgtttctaggatatttatttttaaaattatcgtatatttcttttagatgtggattaggggtaaaactaaaagtagttgattcagtcattatagatacctatttgaatattgtttattattgcaaattagtaatatagatcttaaactttttttaactcagcataaagcctcccctaggggaggcaatatgttcatttatctatttcagcgtttggatcataccaaggtaataaacttagtaatgccggttgttgtttcttcatatcctctaagattgttgcttcacttgcaccttctaacatagtggtgaaagtaatcatgttcttagagttatatatcgggcgtagaccattaccaaagaatttcacctgttgaaccattattttgaaatcagggttatcgactacatccgggatatagatagcaggtggtgcactgaaataacgtttaattaactcaatagcccaatacattggtaaatcaccaaactgtgatttcactgtagctaagtttaattggaatgctttaggttcttcaggtggtggttccaccggatcaactggatcagtgggttcttcagggtcagtaggttcagtaggctcttcaggagcctctggatcgccttctgttggcttttcttcagatgtgtcaccacttggatcacctgtattactttcatcttcagaaggctcctctggcgtttctatgggtgcttccggagtttcctgattctccgacagatcggactcttctgattccccatttccaacttcttcaacagggcttgggtcttctgatttctcatctgtagatgtgtcacttggggttgtagtttctgaatctgtcgtaatgttttcatttgcatttgattcagtagaaacaatttcagtaggagtggtttcaagttcattgtcactatcctctacattagttacttcattagaaggttcactaattgctgataatgccacaggtgcactagctgcacgagcttttcttttagctatggttgtaccttagatagaatagtatttatggtaagtgactaattcaggatcagttaaattgatactttgaatagccatattcaggattacataggagtccattgttctacgggtatatccggttaattccatcttgttatatttctgtacatgatctggaacccaatcaccaaagataacacccagtttatgaaaacgatacaccaatctggatagtgcacgttgggtttcagtcgggaatatatcgggaacattttcgggaacagtacatttatcactaaatggagtaataataggaccacgatgaatggtgtagctaagcttaaagataacagcaccaagttcgtcattaatacgcctaagtatacgataaccataatcggtacgctcaagtttatatacattactaggatcagcatctgctaaaccttctagcatgtcgtctagtgcacgtttgataccacggttatagatgagttcacgttctatgtaatctctctcaaaagcggcctgagggctttctttctcaaattccttagttactgaccaagaaattgtttcaccagttaattcatcagttaaaacatacagatatgtcatagagtcaacgtatgaatactggatagagtatcgtgataaatcacatggcttagcatttaatcgttcttcttttaaatagaaaaacatatcttgtaaatgattataagtttggcagccaccaccaagatgatcaatatcaatagacgtatctggcttgactggagctttgcagcaactcattacacacctctacaattatatttgagttattgtactacagatgataaaagagaaaatacatcataagccctctccttatggagagggcattatatttacatagtgttaaaacacgcattaaatttagataatgagcagccagtataaattaatgattgctctagttgtatgatgacatcgccattactatcaaaatcagcagcaataaaagtagattcagttatcttaaaagtagatggcagcatttctaaataattaaatattgcttgattatcgatgtcatgaggatttaaatccatatgttacctatacatggatagttatggaccaaatattaacaggactgcataagacaattgtgattaaatctctatgagttctttgataatgattggaacacataactttgattaactttaattttttagtttctttattttgaatttctttgataagcgattcaataagctcattagtaataagtgaatgtccatcaataaatggttttatacttactagcgaatctttgttaaatagaattgcatcatcatattcgcatgtagctgcggtcttgtatatggatgcaactttattaactttgtcattagtgactatagaaaaattaaattcactcttagttttacttaacgatgtttcaaataatttatatttatcaataatagttttattatcaataaatgatttcatcccaatatttaaatctatgtccagtgtgtaagaatcatgcattaaaccaattgatagttgagtctcattaccactattgttaaacttaatattattaactgaacatatttgattattaataaatgataataatagtttagaaatagttttaataacattaacttcataatcattattagtacaagcaagtgcagttgtcatgtatcgactaacttgactaacatctagtttctgatagttactaccactatctacccatgggtcaatatttaaaaaaatccttagactagctagaatatcagaagatgtttcagaataaatgaaaaacacattattattaagatcatcttttagccaaccactagttctaagattttctagatcattttcattagataccaattgacttaattgctgaattaaactagggttagctaggtttaataaactaatcattttataaaccattttattatcctctaatttatgtaattacatggaataaataacataagtacttttatgacttatgatttgattctccaggaggttttcccaatggcaactattaaagaagtccttgatagaaattttaaggatgttcaatttgatcgagatttatgtaaaagaattattgactttaccattagttttatgaataggaatgccgatcattctgctttctttggcggtgtattactaggtgtgcaacaagtcagattcttcgatacggatcgcgagatctggtatgatgatgttttacgaatcgacgaagcattgttagttcaagattttaagtctgttgaatttattgatcccaaccatcgtgtgatgtcagatgtattcaatcaccttcctgcctatatttgttctaggttattgaaaacaactaatgttcctttgaatattaggcatgaagcaatggttagttgtttcatggtattgcattttaaatatctaacatctttacttgtaccacgctttaaatatcctgcacgtaaagaagtagccgaagctgcattcgccgcgcttaattatcgatttgacattaagacaattgggtcatgggagaaactatttaggcaacgggccgaaggtattattgcacctgattctatttatgcacctttcttaactggtaaaacacaagaactggattattggtctggccgtgtggtatctgatactcaaacacgtctacgtgaattaatcaacaagtactatgatgtttatatcagaacactgcaatcaggtggtaaattagttatttcatcagacatggctgtcaattccgatggtgaacagattctacgtgataagtctaccgggtatcgttcatatcttacttacatccatcaagttgcgcaacaagaacaaaatttcattagacctgagctagttggtattattgaaaagataatgcccacaatgccaccagaaatgttcatggcgacacttagacacctttcccgtaacatcggccaacctagggcacaaaagcttgagaaactcgtggatgagtgcttactgtatgctttcgattatatgcagtcattacgtacaatggttgctagaaataatgatctacaaacattgcttgtaaaaatacgagcaaagataatggcatctaaaacagaaaatgctcaagttattttcatgcgtgaagaaggtgagaagttagttagggatgcgactaattctagggtacctgcatatatcgcggcaactaggactgggttgatgttgtatttaattctacgtgctatgactaagaattactatacaaaaacaaaataaacataatgccctcccgtaatgggagggcttatgctgttaagtaacatcagctagattgatcattacataaatttttcagagcatcgtaaatagccacataagtaaaaatagttaaactatctttaatttccttacgtggggtgccactgaatccaccccatgatacatttgtattactaacacatacagtgctaatagctggctcatgatagccaccatctactttacgctttgcataaaccttagccgtaatttctccacgtaactttttgaagaaaactagagcacccggaacgactatacgtttattaccaatcttcgtaataaattctttacgattagtaaagtgctcttttaataaatcattaataattttagttaaactatcaatttcattcttcatcgacacgttgttagttccttacaaataaacttgataacgtgatcacttacaaatttcaatggaccagaacaattagatttctcaatagcggtttcagtgtatgaaattatttgatttccacttaaggataatgaatcaaataattcataagagttattatttttattcttaaaggatactgcatattgactattttcactattgatgcaaaataggttaatagctgggatagatacagagttatctgaagtatggctattttccgtaatattccaattactgtatacagtgaaaatatttgcagctagtaaaaggttggcattaaccgtttctaaactaacatactccacagaagtacctttatgccaatatagttcaattggattaacccaagtatacccaatggttttatagaaggcatgcattacatattctcgccaacgtgtgggtttcttattatcagttaaaacacacgtaatattgcctgacggataaatgtggtggatgctacatgcattaatttcatctctaacattagttgtttcagtaatattagaatgatcctgtttgaatagccattttaaatgactattagttgtgtcatcaccttccccatttgcaatgtcattttctaaccacttttcaaatgtagcttgtctatcaggtgttggcattccccaataggtagttaaaatgaaacgataatagtatcgaataatatcatcatcgttaagaatatttttatccagtttccagtgatgttgatactcgtatacttcgcttggaatattatttacttgataccatgtattaattaatacttgaattgttaattgccgaatactctcacttgttagagtgtaatattccctgctatgcggctcttcaattgtcacttcttgatcagtataaccaatgtatttaggtttaccatcgatgagtgcaaaattaacattccatgatgtatcattactaaaagtgatattaataaaaccttgttcaaagctaggcttcactacgaaactgacatcatccttctgatatgtcatttgcgttagaataccaaaattaattttagatgtaaattctttatcgaagttatgtttataaagtaatcctagtaaacaatcaattttattaatagtgtggttttctaataataaatcagtatttgtaagttcattaattttcattttaacctctctaaaatttacaatctagttttacttattgaataagcaaacatgtaatatatatcttaattattttttagcatagtttttaacaacataaagcctccccgaagggaggcgatatgctttagcttttttggttagtaccgacagtctgctcattcttttcagtttgagcatttcgccgaagttgactaaccagaccattgccagccgcaactacatcgggagaaaagaatgcattgatatcaaagttctgatcttggttgcgagtcttcccaggtgggaccatcggatatacttttgccattagcttaatcctacaccgtcgtaagttacccgattaccaacagcacgttcaatctggtcttgaataccattacgtgcacgtagtacgtcagcagataaaccaccccagtctaatttctggttattggggttcataccgcgaatgtttagtttacggaacatttgacgagcgtattcttgtacaccttcagaaacatcagtcagtgcagagaactcaacgtttagatcaaggttctgaccaatctgtgatgcatctttacggttttcccaaggaccagtagttaatgggaacatgttggtgcaaagataagcgttaacgcaatcctggaaggtaggatcaggttctacgaatagaacagtcataccgtagaaggtagcgtcgtatttctcaaccggtacaatgccatctgatacaatacgcggtactttggtattctcatctgcaataccatagttgatccaccattgtaagaaacgttggatagcgcggttttgtaattcccagcaaccaaagtttgggttagaccgggcacgggttacgttagtagccgtttggataacttcaccagaaccaccccagggtgcttcagcgttatctacagtaagcgtacgttgtaaaccatcgatggtacgagtatgcgtttcaacgaaagccttaagacatgcaactaaccagttagtattactagcatacttaaagaatcgtggagcatctagtaggaacggcactaagttacgtgccacatatggcgtgttagtagccaggttagctaagtcaggccgaaatacgttagtaccagcctgagcaaggtttacagtgttacgggcaccaccagcaccataaccagtctcgggtgccatcggatcattatagcgagccatttaacttttcctcattctgaaagccacccactcattgctgagcaggtggggtttcaatacgaacagtttccagattgaagttcaacgtggtccgcgggttattagcctcaacagttacgttgcaagtccagctggtgccgttatttgcgtcaatcggagtgatctctgtacgcgggataatgttgacacgagtaccgaacatatcacgtactagatcgagaatatactcgtcacaacgctcaactaattgttcaggtgttagtgtagcattaccgctaaattgagcgtgtactttatggatcagtcggattaatacacagcaaatattaacagtaatcggtgatagaagtacagatgtatcatctagcattactgaacgtaggcacggataataggagctacgatggtcatatgactgactccaagtagcaccattcgcccaagcttgtgcccgtacacgatcatcaaagaatttaacatttagatctttaacaaaagtaacacggttattaggacttacatccatttccatacctggaactagattaccagttccagcacctgcatagcgtgcccatgacatagctacgtctaaaagctgcggtacatatttacgataggtaccatccattagtttgccagattgcattacaatcatagcgcgacaaacaccagttccgtatagagtggattctgggaaagcttttaggcgagtgataatctgttgaacacgacttagttcagtagcttcatcaggtagacgactatcagtttctacgaatgtagtgaagaaatattgtagatcacgccgcgcacttagtacgcgcattgcccgatattttgattccatcggaaggccagtgtcataaagaacaccgaactgatattctgcaatgttattatagcgatcatttaatttgccaaagttaatattttcaatatcaactaatttggcatattcttctagatcagttgtaccgtcagtaccaccactagcatagatgttaccatctttacctaacgtaatgccgccatctagtggaccgagtacttgaataccctggtaaggatcaccatcaacagctaagaaggttaggaagtcaatttcaccaggtgcagtagtatgcgcagcagcggctgggttaactcgcatctcagtgtcataaatcatctgacgaacaagatcaatgttctcatgatagacgtagaactgagagaacggtgaataaagtggacttaggccagagactacaccatcatctgagtaagaatcaactaatacatcaccaacataaaggtcagcgttatacatatcgctgtaaacacctttatcaaatgtaatgtttagataatcttgctggtcagcagttttgacaataactggactagtgcctacttcaggcttctcaattaactgaatacggaattgacgagttttaaacttcgccatagctgcttcatcgaactcttcgatatcagcagttgtagtactccatacacgcataccgttagaatcacctaatttaccaaagaaggaaaccggtgcttcaaataacggatatactagtgattgagatccatctttatctgatactaaagtacctggtagtacacgttgtgtacctacttcagaggtattatcttcaataagaataatacgtgcctttagaccatcaactttatcagcagtcgggactggtgcattaccaatgtcacgaacactgtttggatagttgaatccactaagacgacgaatcgtaagtgggatttcatcttccacaatttcaatagcaacgattagccgtgatgggttggctgcatcttcaggacgtagacgcttaacataaaaaccattacccctacctaataggttaagggctaatagtgattgtgtattgaaaaacttactacgtggatcaagcgatgcttgaccatagatggatgcaaaaccatcatcagaatcaccgacataagtggtttcagtcggccctgtctcagtgaagagacgtaatagcggacagtgttgtgcgaacgtgatgtccggacggatcaggggccggcggctacgatcccggataccattaaacacaaccctagggacagcgttgtaatatgccatcttttaattctcccaagttggagctttgaactcgatgttatgagtgttaactaacagtcaatcatagatattaatcatagttgaccatactagttattttttactatccatttaaggagtagcggtaatgtttttgctaccgtatgaaactacagtttgtaaaactttatacaatcccaccggcggtggaaaattatatcctaaacaatatgttgatcaaattgaaaatgcgatcaagaaagccaatgtgtatctacctattccacctgttgatgcacgtaatggtgaaacgctagaacatagtggacagattaccccagttgatgattttgaggatattaagaaatttactcaaattgtcaatatcggtgatcgtgataatcctaagctagtcgttgatgctcgtctatataaaaagattgaacaacgtactggtattcctaggattattcagcagaacgaatggcagttccaatatattcggatggcacttaatatcaaactattacgtgaaggcccggacttcctccatcgcttaggtgatatcccagttaaagttttctataattggatctcaggtatcctaacacaaaaatacaacctaccacctgaatcaacccaagctatttgggtaatctgtgctgtttattactttgctatgcaagatgatgatctaacagaaccaggtcaggaacgtgatcggttaataccaattatttcccgtcttacatatattccagctggttttattgcggatgttattgatacattaggtccacttcataatgccggtgatctagcttatgagatttcaactaatggtcgttcaatcaggatgggtaaactaaaattcagtgatctacaattattagtatcaccgagttggtttggtaccgcttcccgtgaaaacgtaggtgtggcactagaacacatgccaacttacatcacactgatctacatggcattagctgatcgctcataccgtaaaacagttttaagtcagaaagttgaaatgatttcacgttctgatgatgcaagtcgttttattaatctagtgaatgaagctgtaagtagccaattcgttaagtaaatataggggtgaatcaatgaacgcatatctattgcggcatgcgattgataacgtttggtgtaacccagcccaggacagacagtttgtttatgaactgaaacagcttaccccacgctacggcgtgagggtaaactgggtggttgattacacccggtataagctaccagtccaaagtacacgtgattattggcatctttatcaaattggtaaaatgattcctaaacacctgggcttgcctaaggtttacaataagtggatgagcctaaatgaattggctcaaaaccatttaaatttagcagacgtttatgtaaatagtggtattaattattcacgtaatgatacatacgttttaataaccagttcgcaaaatcttttaattgctgttaagatagatccattattccctgatctcgatgaaaatcaaccctatcttcatgtttataacaatgcttactttcaatcaaatagatcggatgtagctggacatagatggttagtttctgaatcgtatcgagttaaaacaatatctgaattaactcaatttcagattaagataatggataccatagcatctaaaggtggtgttcctaaatactttgtaaatggtagatatgttaatgagatatctcctgttacagcaacagtcggtgatgtttgtgatttcattctagatccatccattaaaaggatggtagattttgatctacgtacattacctgttttcatgtcagaaatagatagtgaaagaaaatatattttacactacactgataagactgtgcaaacaattgagttctttgatgatgttgaagcatatatctatcagccattaggtaataatcgttatactggtgttaattaccatcataacgagagccgttggatgcggatgcttacacataaagattattctataccaactgcacggattgatcagtttaaagcacttcatccagaagatcctcgacgtggtgctgatcctactcgttggccaagtcaaaactggaaagcattagataatctagtatttagaatctacatacatcattctggttatgatcgcccattagttgctgattcacatcgtattcaaattctgtatcgtttaaaatcagaagatatcataagggctatgactggtgcagattctggtaatcctttatggcgagctgaaaatctagagcaatcaccatattgctggttcatgtcagcaccatctagtttcgtatacccattaacattcaatctacctgaagaaacatcgcctagtaaggtagaagcgcagaatatggctggtgatgtttttggttattatgaagcagctaatattcaaggttataatccagcttgggtttataatgatgctggtctaaagaccgctgatttacgatacaactactggctagatgcaactgtatttgagtacgatgagaaaggtatcttattaggttataattatcatacagcaggtcgcaaatatttccctaaagatagtcgttgtgcatatgttgaatgcattaatggtaaaggaagtgtagatctacatgaagcatatgggaatgatcccgtgcctttacgtgatggtgacaactggcgagtttatgttagtcctgtttgggctggcgtaccaactggcgaatggcaagatataacagaccatccagatcgaaacaattggggtttttatgatgataccactgatgataaacgttgggtttggatagctaagtcaaatgagtggtatggcctagtaagaaccgatgagtacttctatctaaaagaattaaagtttaataaaactgatggtatcattaaatggagtatacgcaatactgaaactcataatggtgtaaaagtcgataaattgatggagataccatttggtcagtatgatgtgtttgtaaatggtcggcctatcatcgaaggtcttgattacacgcgtgaatggcctcaaactgtattatgtaatctggaatatttaaatgcagatccaaatgcagttaatacgattcttctacgtggaacaggtttcccaacaccagatttaaaaccatacgaacctggcgagattggtttcattgagtatggcgtattgtctaatgatggtatttataaagtacattcaaataaacaatcacgcataatcattgatggtcattatcgtgaccctgctgatcttgaattccaagaagatcaaggcactactgttatcactgatgaacgcaatggtgcaccattccaaatacaaacaccacaggctcgcttccgcgatgtttataatgatgattaccaagctaggattaaggatgatgcacgggataaacaagtcactgattttatgactgaatatttcccaatgaaacctcaacctaatccggacaagatcgattatagataccaggtgctttcagcgttttcatgtaagatcattcatgatatcgtaaaagaatatatcaaacccccatatcaaaatggacggtatagtgacgatgatattgttaagcagctaaaagattacgagtggttagcagcttatgacattatcaataaaggctacaacaaaaataaagttgtagtttatccacattggtatactgaacctgtagaactagatattttccaatgggaatatttaaatcgtattctatcgatatatctacgtgaagtaccgccactatccttgttcgttaagattaaaaggaatcaaccatgacaacgtcatatgaaagtagccagtaccaaccaccacagcataaaaaccatttctggtttagaggtgatattgtctcatatgctggtgagactggcaaagcaatccctgctaaaggagatttagtatttgacgcagcacaaggttggtttattgttcgtgaagttgatgaaacaactggggtatctatcttagatccatggtacatgccccaaaaaccaggcaatgaaaatgaacaaaacctactagttgctgtaggtccaggatatagctcagaatcttatcggttattcctagatcagtctgtaacaccatttaatatttgcccagaccggcgattacatttttatggatcaatggtacatggctataaagttttcctaggttcagatatatcagaaatacatggtaaagtgatttccctgttctatgataatgctggtaattatctagggccaactataccagttgaatcagtacccgatccattgactcaacagaatgttgttaaagcgttaatgaatggtaggactgctgagaaaatgcaaaatggtgaacgtgtaactctagtagcttatgatgatgtgggtggacctgtttcgattgctcaactcgttgtaatgaatactgaagttatagcgcaagaggatacctctaaaaaatatgtaggtggtatcactattgaatcaccattcatctcaccagctgatccaaaagttattgagttcccattaaacgtaccagttgaatcattaccgatgatgggtgctgttcattaccgtgatggtaagaagcatgtgatgaatattgatggtacggcaatggcaatttatggtttacgtaactatattgccactgaggaaggacaagagtttaaattaactttatcttaccaattagcacaagatgagttatcatacttatcgactccttcggctaaccgtcgtattcaggagacatatacagcgcgtaccacgcctgtacagggtgcttacagttgccgtatgtttgtttatccagcttgggttaatgaggcagtaggttacagattagaattctggttagccaatattgatcgtcaacaaatttggaatattaccccatatgttgaattaggtgcaaactcagcaccctttaacccacgtggttatggtactatccaaacactaacatatgcggttaacttaaaccaagttgatggacgattcctaccagttcgatttgcatctactttccaagtagcactattgagcgctggtaataatcggaatgctaactgggaaatctattcacgtcctgaccaaggcgaagcatatggtcgtgatcttaaagccgatatcgaatttatcaatggtaatctttgggatcttcggttagctaatggcgcacagtcacaagctgcctggcttaagaaaatgtactttgctgctgagccattaactggtccaatggaagctactcccccaacacctacgcatttccgggtgcgtacagtgcataacgagtatgagtatacggtaagtcaatggaacactgcattgcgcattaatgctcaagatatgaccgatggtgctttactacaaatcacctggattcgtcgtgagtatgataccgacctacagttagccattaccgcattaccttgtttacaacgttaaatataaagcccccctaggaaccacctaggggggctttataacgtcttttaacacattatccatatgagactatactttacaattgccgttcaatacggctttattatggcacattaaaataagtaccttaaagggcagtgtatggacgttatacttttcaatagtgattgggataaatactacagcgctaatgttgatcttactactaaaaataaatcttttataaagttagctttaacttataaaaagatgggtattaaaaattacaaatttatactagctatattggaccaaggtttaattggggtggatccatatgaccctaatcttagcgaagaaatgaagttccgtattaacatggaatgcaaatataatccttggtatttttttagggaagtggcaagaatcccccctaactcgggtaataatccaattccatttcaagctaaccgtggtaatattgctttattctggtgttatttcaatcacgtagattttggtttattacagcctcgtcagacaggtaagtccgtatcaactgacgtgctcaatacaggcatgatgtatatctggggtgagaacactaagattaaccttattactaaagataacaaactacgcaatgctaacatcgagcgtctaaaagtaatgcgtgatttgttaccagagtatattcactatactgatccattagatgcggataactccgaattgatgacatgtattagattaggtaataggtatctaacagctgttggtcgaaatgatgttaacgcagctgataaattaggtcgtggtcttactgtaccaaatatgcactttgacgaacttgcatatattaacttaattggtgtttcactacctgttgcacttgcgtcaggttcagcagctcgtgatgaagctcgccgtgagaaccagccttatggtaacatctatacaactacagctggtaacatcactacccgtgatggtgaatttgcataccacttcttaacaggtggctgcccatggtcagaggaattctttgatctaccagatcagaaaactctacatcgtgttgtagaaaaaggcactactggaaagaaacctctagtttatggtgcatttaaccaccgtcaattaggacgtaccgatgagtggttatataacacacttcgtgaatcaggttcattcggtgaaattgccgatagggacttcttcaatatctggacagttggtggtgaaggttcacccttatcatcagatgagaaagataaacttaaaaacaatatgcgtgagccaagctggacagaaatcacggatgatggttatacacttcgttggtatataccaaaagatgaagtagcctcacggatgatgaagggtaggttcgttatgggaactgacccatccgaacttcttggcgaagataatgatgccactggcacagttgtagttgacgtagaaacacatgaggttatgtgtgttggtagatacaatgaatcatcagtgccatcaatgggtaatttctttgcaacaatgctattgagatatcctaatattctttggataccagaacgtaaatcaataggtatatcgttaattgaccatgttatcttgattctacatactaaaggagtagatccattccggcgtatctttaacagaattgtcaatgaatcatcagaaagagaaaatgatttcagagacattcaaactccgctatcagcaagacaaccatcgttctatgataggtttaaacgttattttggctatgcaacgtcaggtactggcgagtattctcgtgataatctatttaaggtggcattaccatcagcaatgcattatggggtaaggaccatctatgataaaccacttagcacggagttattagcacttactatccgtaatggtagaattgaccatgctaaggggaaccatgatgacttagtggtatcattattattagcccattggttattaatacaaggtaagaatttatcttattatggtatcaatgttcccatcttaggtaaatcaaaattacgtgataaagaaccaagtcaacttgaaaaatatcatgaagagaaagaacagcaaggtcgtaaagaatttgaagagataattgagcagcttcgcggtgaaaagaacccgatgattgcagctaaattagaaatgcgtttgaaacaattgtctaaacgtgttaatattgatgatagcagtggtgtaggtattgatgccatgttaaatcaagctcgtgcagagcgtacacgtagagtgcgtattaacagatattctagaaatagttggtattaaacaaaaaaaataataatacgttaccctcttcgcaatgaagagggtatttgaagttaagtaactctagcgaacaaaagattactggagttagaattaatatgatagttagacgatccgtcaatccatttagcatcggaaatcttgtttacaagctgaccattgccaatgtaacctaggaaagttttattatcatatacagcaattttgattagctcatttcgtccgtagactagtggcttaccattgaatgctgttacttctaaaccagacatgtatccataaattggatcaggtctggaacttgtttcaaagactttcattcgaagtctcctctgcaagaaagcccattttgggcaaaaaatgtcaagcttaaacttgacgacatatagccctcctggtgcgacaggagggctaatcttttcagaacgtacggtgttgttataatactgctagcgaaaatacccatgataggtaagtagctaatccgcagttctcttggatgatacctactgacagtgtagttgcaaatgtgctgtttggaaccccactggtttagcggccagtgggaattccttttatgccgctttttctttctttattggatatttcttatatttccaaacccacgttcttacgttggtaggtatcttccttcttattatattcgtagttctcgatgagacgcttgttgctgaactcggacatcgaccgcatcttgtccatgatggcctcagatatttaccatgttcataaattcggcgtagttatagccagtattcatgtcgaggtagtcttgttcgaccatgtcgtcattcaggtacttgacgtaagcctcggcgtgagcagtggctaccgacttggtgaagaagtaacgagcgtgttgacggttctgttcgaaccgacgcagattagtagtggcctgaccgccgaaaccattgacctccattaccccgtaaacagtacgatcatccaaagtagtgatctgtgcaatcactacacgagaagcattttccgaatggtcgatgaacgtcatactgtaaatctcgatttctttgaagtcttccattagaatttcctgttaagaaatgaatagacaatccctacccgaagggaggggccttatatcgttacttgctgtgaagatttttctcgcgtacagcgtctgttaactgacgtggcgggttgagttgatctgacaggagcttccggaggttatccagaccgattactttcttcttggatattgagattattctctttaagtaatttgttgaggtggtatttaacctccacccattctaacctatccacgtcaatccacttccgataaccaggtgcagcaggtttgaggacctgggttttccagcgctgaaatcggaagttgccgacacggatatcggtgctctcaacaaagcgaggtgggagtatactgaggtcagtcagtatccctcgtagcttgtcagagttcatcagtaagggcgacttgagtttcgaacaccgaaatgatcgatcattcgttggaacaacttgccaaacgagaacttttcatactcgcagtcgatatggaggacatcaacggtgtccaccggtggattataactactgctcattggccatctccttacgtttgtttttggcccagttcttttcataatcggaacggatgaacttagcgccggcggcattgagccaataacgctcccctttgaaataacgttcccgtttagcacgggtcaagcgaagaggatcgaacatatcttgttcctgacacatgaatcgattacgcaagaagcagttatcattcaggattcgaaccgagtacagttgaccaagccggcagttagccaacttggctttctcggtacgtagccgagtttcgtatttctttgcatcttcgtgatgattgcgaggatgtttctttccaagtttcctagacattatgttttttcctattctgttgttttacgaaaaatcttatcatggaacgtcattgccaacacgacgcctatcgaaccacctagaccgctggatatgatagcaggaagacccactattacaaatagtccaatggtggtcaactcaagggtactgataccccatgaggtgaagaaagcagcttttttgtacccatgaaagatgtttctttgctgaaaggtttttacaaaggcatagatgaatgatgtagctgtacttaacagtagtaatatccagataggtagatcatgattaatgttaatcacttctcttgttcccacacggtgggctcacatttagtatgttggacattatgaatatcttccagttgttagatattgtgttccttcgtatcgatggccgccagcgccacgatttcgacatgataaggatgatccacattatggctgatacatgcctcgcatttgaagatacgccacattccatatgaaggtagttcacggtttttcaaataagcataatcgtgagcggccgcaagatatttttgttggatggaaaactcacaagtaatgtaacctttctcacgaatgaactcattggtcatctgatcgaagatctgtttaagttcatcagtaagggcgacttgagtttcaaacattgaaatattccttttgatatattaaatagttttgattatttcggagttattgaatatttaggttaccatctgctctatatagactcggctgatttcatttaagtaagcgagtgccaatagaataccagcccaaataacaatttttcgagtagtctgtttttctattacacctgggtgtgattcacgaatactacggtgacaaaatacataaaacagacatagactcattgtaacaaagataatggtaaaccatcccagatagatcattttcttcacctattttttataaatagagtttatagtttagttaggcggatgatttcttctaaagctgcatcaacttgataatacggccatgaatcaacacgaggttcgttatcaaagtatgtccaaagttgaataccttggagtttattgtagaatacattgattctgattccttcatggccaacaagaccttcaatgtaagctgcaccatgcacatacgtaacatgtagtgcgtactcgctatcttcaccaatgtattgtataggtctggagtagatgaaggaataaggattaaatggatcagcctgagtgatatgttcgaagaattctttcaaactagattttttcatattggacattatattttcctcatgatttattaagtatacctcctagaagatagacttaatactattcgatgttattttaagacacctgccttgtaacctttaacaacagttctagcttctaatgcactgatttcgccaatgtgtttacgcagtgctttaatagcgttgatggtaggttcattatccgcgatatgtcgccagtttcccttacccttaatgagttcaacatcctggacatatagaccatctttaactagatccattgtttctaccaacttttcgacttctttagttagatgcgtatgaagactggcgagggacatgtcagtcatttgatgcacatcatagagaaaatccctattatcagaagacgataaaatttctttggtgagtttatttacagtgtcaatgtttgctgcaattgaaactagcagtgcagcatatttctctgcattataattcattaatacgtattcctatttaaaattggatttagtgtaatgcggtaatactgcgaatatctaattcatgtaaatcatatttctttaggaactcattcaccgcttgctgaatggtgtacccactcggagattcccactgagtaccattaaaagcaataatacgataacctaccattttttattcctctaatcacaaaataaataccctcccgaaggagggtatttatatcgttaccaattgattacagcgacaaactcaaatacccgacacaattctttatcacgatgggcatgatgaaaagatttaccttcaataccgcaatacggataaaacaattttcggtgttccgtgtcgccgaaccagaaggtggtgttattggaatcaaccacaccatggatagccacatcacgaatgtactgaaatacatgaactgccttatcagtgatcactcgaagttctacaccgtgttccttcatcatagccaggatgtcttccttggtgtaatctgcttgttcagcattggtcatgatcttgtgagtcagagaacgcttttccttgtcaccgaaacagatacagaccaattgcaccaactgaccttctaccttgagaccactggtcggttttagtagaacgaactcatcatatttgtaatcattggtgacaatcagtgccgacttattgcgagtgacaatgcctaggttatacgacataattaatcttcctcattttagaatatgttgaaccttgtggatgtcttccaggctatgaccaagaccagtggctttgtaagaatgttcctgatcaacacgcttgtgatatgcaagcagtgcatctactggatgttcagcgaagaagtattcagtgttgttgcagtcccaagcgaactcccattcaccatcacgaatctctattttgttagcactgaggtaagtgatattgatggtatttacagtggcattaccaccaatgaggtagtacgatctttcattgctacgaacatcgatcctgccgccatcgatagtatcctgatagtagaaaccacggtcgaagaataacttcagcatcgaagtgaagtagctgttcaatacagcttgagcatctttctcttcgaccacccattttccatcaacgatgttattcaggtaattacgatcatgattgatcccgacattatccacgatgtcagcgtagttcttatggaacttagcaatctcgtacaaacgttccagagcagcaaaacggaaagggctggtgggatgcagagccagaatgatccgacctacgctccacaaaccggtcccgttgacctcgtaactttcttcgaggtaacctttgataccacagttaacttcaagttcatctgctgggaaaccggtgcggagccgcctacggatagccaatagtaccgattcggattcttccggatcgaacaggtctatgccgaaagtaatccagctaccacgtactttgtgctggtatgccaggcgtacagtatcaccgaatggagaaatgaaccagcgttcgtcttccgatacgaccaaatggcaaccacattgccacagggtacttagaggatcgttagaggcgagaatgcgcttggtgtcgttcatatccgacgaagtagcatctggactgccacataggtgtgtcagaataaacagaagcgatgattctgtagtttgagcactcaacattgcgcgagtgatggttgcattgatgatcatgagatatcttcctttttgcagtttatgaatatattgctaaataaaaaaaaataatacgatgtagaaaataaaagggagtccgaagactcccattattgcgtgtaatctatttgataataaccgctttagaaagagtttccatacttccaataactaatttggatttctcttcttcagggttctccattgcttcatgcaggagttcaccgatggttttgggttgaacatcatcactgatttcacgcgagcatgccgagtcgtcgtgcatatcaaacacattcagatcatcatcgtccagtggcgtgctgtcattccatgaatagcttgattcatcggaagagtccgaagactcaccgtacagctcatcgaagtcatgttccatttctttttcatacatctcgcttattgctttttcgtcttcttcttgcgccttacgacgagaagtcttgtagaacggcagcaggcgttgcaggactttatggaacttcttcttgctgatcaaccagttaaccgagtagcgagacagctttacttcagctgctttgatggtcggctcgaaatacagcgcattgaccagcgcgtccagtttgtacagatgatctttagacgaatttgcataagcaggatgttcctgaagagcgaacaacacaaacgaacgcatgtcagtgatatagtactgactatgatgtttgttgacttcgacgtatgccggatctactacgcggttataatcgaattcctctgcccatgtaaggctacgtactttagtaggacgaggaccttctgcccaacgaacagtcggatgtttctcacggatgttccaaccatgattgcgatcatactcggttgactcttccttgaaccaagtgaagttaccttcaccgcgcgacacaataccgcgacaccaactgacgttgattgccttgttacggctttcagtaagatcacagggcatgtccagaatagcgacataactgttatgaccattggccacaacgccgaggacagttgcttcgaatgtcccgtagcgctggccaggatacacacgttcgttctcatccaggtaaccaagggtgcaggattcgaagatagcacgagtaccggcagggaaatgggcacgaccgaaaggttgttcagcctttctttccttacgacggctgataacccattccagtttttctttggacagacgggttacgggttcacgatattttttcatggtgtattttccttcttacgattaatttggattatgtacatcccaatgcatcctttccaagatacattgggatggggtctccgaagagacccattttttattcctgggtcagttctttgacagtgccctcgggcgctggtttattcatatcacagaagctgagagagaattggtagcatgaaagtctttatcttattgcgatacatattcacccatgcattggactcgtccacatgagtggatgtgtactcagctaccttaatatattctaaaaagccaacagcatccggaccttgatcaatatagaccatcttgttgaaaagacctacaccaatgagcgataaacgctctgcttttatgaaggcgatggtatcttcgatgataatcttttccaggtccttgtacttaacatggtcgttatggattaatgccaacatgtcatcaacctttacagtcaacaacatgtcttcattacgacggttgaccagttcattggtctgttcttgggtgaacacatagtccacgttttggaatactctcgacagacgactatccatttattattcctctatttagttacgagcatttcttgaccattgggaccgatgcgatgaccgaggataacagtttcattagaaatagtttgctcttcaaacttagcgtttacaaacagtccgccaaaagtcaaaccaataaccactagtgcgaatgctttcatttttaaagtccctttttacattaattgaaggttaaatatcaagttgtagtggttattacatatcgtgcaggtaggtctcatcaatgatggcacgggctagctcaatgaggctatcttcatcaacaacgatgttaccatctttccaggtagcgctatgggataaccagtcacggtaatccttacctcgtacaggattgatgcatacctgacgagtagctgcatcacggtcgccacggaaacccatgatagcacgtgcacgacggattgcttctttctctaagtcttcatcagatttgaaagtcaggaaagttgccatagtttgattcctttttactgatttaataggtttaattacactgttgtgatatactggttaaaatgctttgaatgtattattttatttccacagacgacaatagtcatctacatgtcgagtgatttctgcaacagccctaagtcgccgccgaccagttaatttagagcagtgtttattaactaatgtatcaacagttttacgtaacctaacgcagcgttcttcgttaggtatatcttgttcgataaacaagctagttaatttatggatttccatatggattttcttacatacatcgttagccgatttttcttcatttaatttgttgtatgattcgactaacttaacaatggttgtagcaacagtagttgcggcaacaaaaatttgaataccattgataaaatttttattaaacatttttaaactccaactaatgtattaaaaaatatgtctatattgaaaataaagccctccccgaagggaggatgtatgttgccaataagtgttactaatttatttagttagtttgaccatacgttctttcaaagttgtttacatcataacctgagtggtgtgttgcagaaccacctgaagtagtatctgtaatcttaactaccacttcatcattttcaatgtaaaccgacagttcatctcgcataaaatccacgtggtcatttcgagaacgtagatatttcattacagcttcaccactgattttaccgtctgccattattgtttcctcgattgattccagttaaaattatcttttgcatttttagtgaagaattcgttaccccaaccaaatgagtatctaaagtccttgattacaccaacatccgaatcgataaccttatattcaatgactttatcactattctccagaatgactaagatcgcgataagatctttaggatcacctacagtcaattcatgtctttcagactcatctctgtgtataacgatgtacatggtactttatcctctaattacacccatttagttactgggagttcgaatgttgcgcaaagatcgagtactttacgatgttccaagttattttctggatagaaggtaatgggtgtagtcggactaccccaattaacacgacatccagtttctttatggatttcaccaagtgcgacatatgcacctgcgccatctgcataacccatttgattagggttaacacagatttgagtaaagcgctctgtcaatactcgattaatagtgatggtcaggagacgaacgaactcacgggtcttttcgatgtcgtctacccagaattccagtaggatccatttcccatgagggttatcatacccaccttggaagaatacacagaaaccttcttttgctttataaaactcgtgattggtgatgttgcattcaactatttgtttcactgcatgccatacacgctcggtgacataatcaccataaagttcgatgcagtgaccacggccagggaattgttcttttttagaaaatttaatttcgaacatggtatagattcctttttacattaattgaaggttaaatatcaagttagtaatatactgtttaaaatggtttgaatgtattatcggtagaggagggttacccttttaactttttaatactattggataagtacatgacactacggaaaattttgaatcttgaaaagtattcacgtacttcttttttagtcaatacaagtcttccatctttgtttacattatcaccaaagacaatttcctgagtattcttccataaagatctataaagataacagccatgtggtgcatcacaccaatcatagatcttaagttcaaattcaactttgtcgacaatgtcgtcatcaaataaaatagtatttcctttactatttaactccattaactcatttgcacaatttattgcaaactcaaccgctgcccaggttctaccaccactgaacatatctttacttaatttatttagatcgatagcattataagttgttttcttagtgtttttcatggactgcactcctcaataataaatagaataatctatatttaattcacctttgtaatataccctttaaatacatttgaatacatgacataaagccttcccctgggggaaggctattattatgttttaatccaatgggtatatgtacataggtcagtttctttaataatggttgatttccatttatcccatttaatgatttctttagggaaataaacacaactactattatcgatttccatcttgacagcagtaatgtacatttcgtctaaaatatccttttcaatgacttctttataaagttgagaaccgccaatgatccatgcatcctttccagtttctttattgaaatgagtggcataaacaatagctgcacttagattagggagtacacctaatttattatcataggctactgggtaattaccgttacgatataaacttgatgatacaacaatgttattacgattaggtaacggtttactacctaaggataagaaagtatttttacccatgataacacagcaaccagttgtcatttctttaaagaaagctaaatcctcaggtatatgccaaggtaatagattattatatccaatgacaccatttaggtcatgggcaacgattaatttaatagccatcaattttccttaggccagaatttacaagatacttcattatctttaaattcaatagcccaactacagcaagtgaaattagttttaaacttaaatgtagacgctaataggtaattaatttgagccatttgtaatagtgttaattcaccatatactttctcatcaatcaatacaccaggtcttttatgtttaataactaattcattcaacttaatatcttgttcaatatagaggtattccacttcgcctttttctagtataggtatgtcccaaagaatcagactaatctgttgtgtgaattcctcaatactagttgtaatatctagtccttcataacctatcaatagatttataagtacttgtagactaatcagattaacaggtaagtcttttaaatcgtcttctttaatagttgttctaaaataaacagtaccatctaagtttttaactaataatctatttaatagatgattgacttctgatttaatctgataatccagtttgatcattaactaattccttgagtctagtcatgccattgctaacttcaataatgtaactaaaatcaaaactatatttcatcattttgaattcttctttaaagttagcgatatttccagacagagcaatttgttcaaatcgactaaaatcagtgatagtttcatcgaacattagttctcttgcggtaatatctggatcatagttaggatgatcaactacagtgccttcgtgatttaaagtaccttgaaaattcaaagtcttcttaacatggtctacagttattttccagctagttgcaatatatcgagctttaactaaattaggagcatacctgtaaatacaccattgtagtggagtgccaacagtttgcgtatcatgcgtggcttttataactttaataaaattctcaagttgatcaaatgtaacatttctggttacaccatcactagtggttatattaagagatggtcgaagaccagtaccaagatcattggtgatgattatgtcctcaactaaagcttcatataactttagtccttcttttctggatccaacatcattgcccattgtttagcttcctcttttgttaccagttgataaagtttattaaattcatgttgacgcattaatttgtaatctaatatacgcccattatttttacgaattaaaataataaaatcacccggacagacaattttatctttatctgaacccacacgtaaaataccatgactagattcagttagattacataatgggcaaatcgcattactaagagtagactctttagtaggtatagcataaccaacaatagcaccttggttgatattattgataacgccatcaccaggtatatcaccgttctttttccattcgattgcttcaattggatcggtgtatctcggtagataaaaagacattcttaattaactccgataaataatagtagtatagtaaaaagcacttaggtatatttctattttaagttatattgctgataaaataaaacctaagggtacatagtgggttattgtttaaagctcttaaatagcatggtagaacgatattggactatatagctgtaacccttaaggcactaaggctacagaggtttttaagataaagatatccaatgtaccataatatgcttttacaatagatcaactaaattcatttaaaatgggtcgtaaaaatacttagttgatctaaagatatgttgaatactttttcacatgaacttacgactcacaattggaaattaacaatgttaaaaactatcattaaactagacggtactgaagaagcatactcacctgctaagattaatggttggggtgaatgggcagcccaacatcttggcgataaggtggattggagtagtgttgtgatggatgctgttcaagctcttggtgataaaacttcatcacaagaactacaattacaacttattgaagaatgtctaaatcgtaagacatggtcttattatctaatggctggtcgactatatgcgatttatcttcgtaagaagttctatggtctaaatggcatcccaactgttaaagcgcttcaaaccaggatgcgtaaagatggtatcattgttaaattagattatagtagtaaagaatacgctcagattgaaaagatcattgatcatgatcttgacctactttgtccgcatttttcacttcatcacattcgtggaaagtatgctctacgtaatcgtaaaactggtcaagaatatgagactgcccagtttgtatatatgcgaatggcaatggctctagctgaaaaagagccagctgaaactcgcatgacccatgtggagaattactataaactactttctaataaaattcttagtgccccaacacctaactacgttaatctaggtactaagcttcgtggttttgcatcatgctgcctatttgcttctggtgataatggcgtatcactggcaatgggtgattatattgccaacatcatgacccaatcatcagcaggtattggtgttaacttaatgactaggtcaattggtgatcctatccgtaatggtctaatcattcaccaaggtaagaaaccatacatcgatgtaatgggtaaagcagtaagggctaacctacagaatggtcgaggtggtgctgttacgtgttactatagtgctttcgatcctgaagcagatatgattacccagctacgtaatccacgttctactgaggataggaagaaccgtgatcttcactatgcattcctaagtaataagttctttgctaagaaagcggctcagaaagatggcatgatctttgtattcaatccatttactgctccagatttacatgatgctttctatagtggcgatattgataagtttattaagctttatgaaaaatatgaagcggatcctaaatttgagaaaacttatgtaaatgctcgggatcttctcaaatcaatgctagttgaagcatatgagactggaaccatctattcagctcaaattgatgaactcaatcatcatacgccatttaaagaacctatttacagttctaacctatgccttgaaatcgcagaacccactaagccttactatcgaatggaagatctttattctagtgaggatcacgggcgcggcgagattgctacttgttcactggctgctattgcagtggataatgttcctgataagcaaacttatgaaatggctgcttactacgcacttaagatgattgattattgtatccttaatgcagagtatgctttcccacaccttgcactaaccgctaagaatcgaatgagcgctggtgttggtatcatgggtctagccacgcatatggcacgtgctggtcttaaatatagtagcgatgctggtaaagctgaaatccacttcattgctgaacggcatatgtacttcctcattaaggcatcacttaagatttctaaagaacgcgggaatgcgccttggattcataagactaaatggccagagggatggactccacgtaagacttataataagtcagtggatactatcatcgaaggtggctttgaagaactttatccatgggatgagctagagaaagagattaaggagaatggtggtattgcacactccgtactagctgcatacatgcctggtgaggcatcatctaaagcactagggtcaactaatggtccatatccggtacgtcgtctaattctgaataagactgataatggcgcacgtgtgttatgggctgctccatatggagatgatgattcctatgtgtatgaatcagcttatgatatccccactaaagatcttattgactgctatgccattattcaaaagtggactgatcaaacaatcagtgcagacctctatcgacgcattgtaggttcggaaaagatctcttctaatgaaatgctaagtaatcacttctacatggtgaaacgtggaatgaaaacccggtattatgtaaatctagaaacagcggcaggacttgacattaaatcacttgaacgtgctgttgaggtaactaatgctgaagttgggtgtgcaggcggttcgtgcactctttaagtgtatacaccctcccttaattgggagggtgttattcccaatttatactaacctctattatttattgtaagaaatatttttaaattgtaaaggaaccgatatgtctactaaatctcaactaccaaagaaaatcttcaatgctgctaagagtgattatcatctaccggaaattattcttggagatgatccaggtctactagattcaatccacactcattatcctaaaatgtgggagctatataagcgtctaaagatgcttgattgggatgagctagaatttgacttttccacttgtctagtagaatttgaaacgtgtgataaatcaacttatgacatgatgattaagacactggcctggcaatgggaagctgactctgtagccagtcgttccattgttaatattctatcacctgtcatgacagattcacgagtatgggcaggatatgtacgtattaatgataatgaagacgtacatgctttaacttattctgaaattgtacgtaatagctttaaagatcctaaagttattctagatgaaattcttagggtagaagaagcacaagaacggatggttgcagtagcccgtactatgggtgaggcgcatgatgcagttcacgcgtatgctcttaatcaggtacccaatgatcaagaactttacaataaagtattcatgttcttcatcgctctgtatttcctagaacgtatccagttcatggcatcctttgcagtaacctttgctattggtcgcaccggtgcattccagcaaattgcagctgctgttaagaagattgcccaagacgaattcgaaatccatgcgcaatatggtcaagaagttattcgtgcactactggcaactgaacgtggtaaactcgcttacagtcaatgtaaagataaaatcattgaactactatgggaaattgtaaagactgaagttacctgggttaattatctattctctgaaggtcgtgaactgactggtgttaatgcgactaaacttattaactgggtacttttcaatgctaatgccgcagcaacattcctaagtattgaaaatgatgttgtagaacagtatcaagtagagtttaaagaatcagctggatttgattttgtttggccagagaagaacccacttctttatatggaagactacctagacatttcatcaacccaagcttctcctcaagaagaagagaaacctgattacatggtcaacgttgtgaatgatgttggtgaagaagaagaattcgaagtagatttcatgtgatgaataaattaattcttgcactatccttagtactcgtatctatgactcttgaagccagtgaaattaaagcaaccactagtgggattattaaacaagtcgattgccaacttgtagctaaagataatagtatcgctggtgcaactattggaggcaccgtcggagctgctgccggtgctgcggtgggtaaagcacttcttggtaaatcgggtagttggattggaggtctgattggtggggcagctggcggtgctatcggtaataacatggctgcaacagaaacttaccaatgtaagatgatcattgaagatcatggtaaactgtacatgaatcaaatcgtcacaaataagaagttagaaccagacatgtctgtaactattgtagaaatgtctgatggtacctacgaaataatgtagacataatgaccctcccttaattgggagggtttatgctaacaattctatagcactcttattaacagtcatcaacgagagagtagacatgaataaaatgctaaacttcctaaaccgtacgctatatagcggtactgaaaaagtatcttcaaaagctacaccaagtctagaacactttaaaacaaatgttgaacaagtagataaaaagattctacaaccctttagtactaaatttaaaaccattctaaaagaatgttacagtaatgaagagtgggttgaagaacaatcatttattgaagaacctattgatcttggttcagctgcacgcggtcttaccgagcgcggtattatgcgtggtgattggggacgcttagcgcattccactattaaagaagcagaaggtatgatgcgtacttatagtggtcgtctaaatgaagatatggaggcatctgaaattaatgaagtaattcaagatatgccttataacttcacagctggctcagctaatactagccgtttagaagaagatgattctatttttgttgaagcagatacaactgtagttgaacctctgtctaagcagactctgccaaaagtagcagaacttactaaccaactagtagaagtttataaccgaatcactgaagaatttacagaaactggtattgctaaagttgaacaagttgaacagccagcagttcttgtagcacttggtgagatcattagtagttttaataaactaattgatgcttcatgtggtgctctaccagtggaagaaactgttattgtagaggaggatccgttacctgccattgttactggtccaactactgaacccattgatggtgaaattccacctgttgatgctattaataattctgcggcattagaagagtttattgaagaagtactaagtactaatccagaattcattaaataccaaagtatgaatgatagtaatattgattcatatctaactggagatgactggattatactaaaatttaaagatggttcttattatttatacaatgcccagagtgctggtgaaacaaatatagaaatcatgaaagatatggccgaaactggtagtggtcttaatggttttataaatcgagttattcgtggcgggtatgtagagaagtccatcattaatactcccggttttatacaagtctcaaatgaaggtcttatcgacaccattaagagtatcttcgactctggccctgagatcaatcttgataaaaagaagaaagctattgctacactgaaaagtacctatggtgatgccaaatgggtggcagaagcaaagcttaaaaccggcgaagtaaaagtatcgagttacgagacgttcgcgtctaatgatcctaagaccgcaaaagccaatatcactaatgctgtagctaaagctgatcgtcacaaccagaaagttctggatgagaacagtaagatactagcccccgtggttaatctgttcaaagggaatgattggcaagaccctaagaaagtcgctactcttctggctgaatggaaacccaatgtaaagacaaacttccaagaacccaaatggccagataatgctggtgctaagattaagttgcttgatgctaccggtattgtggaagcagctaacgttatcattgacgttctgtctaacaacactaagactattgcggacacttgggtagcccagtatcctgacctatctgtcaatggggatatctacaaacataagctatccactattaaagataaagatgctcttgaggatgtatatctgctggctaaaagggccgataatgccattcttaacattcatgcatcgtacgacgacgctaaggttgaatctacatatcgagtatttgctatcgacatgttgaaactaatgcaagcatctgtcagtagcttcccaagtggttcaaccgtagagaacaccaatgaacgcaatacggtcattggtattgaagaataacttactgagtatgtaatgatatgtagaaatgatccctccccctcgtttctacattagtcataataaatcggagccagtcccccttccaactggctcccagagagtaaaactctttgctgggcattaatgacgatatatcgcctcccttcggggaggctttatattttgtttttacgtgagtatgttaaaatatgtacaaataacatagagtaattataaaatgattaagaatgaacttttaccagggttaatctatgcccaaaaagaatttgataaaattgcagctaatgtaaaagactatgataaatataaaagacgtgaagctggtagggcaagcgccgttttaagaagtctagtgaataatattgtaaatcaaaataaaccatcttcacttgaacatgaaggtaaagttagtactactaatactaatgaatatttagaagaagttaataattacttctttaacattaataatattaaattaatttctcctaaactcataaaagagaaattaacaattgatctaatgaatatttatgttaaatggaatatgattggagtggctggccgaaatgatgtgccaattattgagcacagaattaatgattggtgcgaagtgaccgatgtctacattaatggtaataagataacttctttacaatggccacgttgaatttaaaataagttgtaataaaatacctagtattacatgttatgtattgaagcacaatgcccgaatggtgaaattggtaaacacagaagacttaaaatcttccggctacggtcttgtcggttcgaatccgacttcgggcaccaatttaaatacggagtgtagcgcagttggtagcgcacctgctttgggagcaggatgtcgggagttcgagtctccccactccgaccattttaataataggtaaataggatggataataaatggatatcatgggaacatcaaattataggaacagctctttacgctattcttagtgaccctgaattaactaatattcaattagctcaaggcttacactatctaacagaagcaaagtcttctgtattgcatgtttgtaataatcatattacattcactgtaacctatccacatggcacatttagaaccaatgtaattagagagtgccctgttagtgatacaaatacattcaaatggtcaggtgtattagtccgtcaaaaagacggaacattcctaccagaataaataaaagggcctatagctcagttggttagagcaggcgactcataatcgcttggtcgcaggttcaagtcctgctgggcccaccatacactagcctcccacttgggggaggttttatactgtctcattgaggaaaacatgaatacagtaataatgttagtattatctatcaaagttggattatttggtttcacttcgactaatgagagtaagatcctatttgaaaataggggacaatgtatttctcacctggatatgctggagcataaatacaagtctcttgaaactattcgaaatgagaatactctgaagatagccgacagagataaccattcgatttatatttttaaatgtccctaggaaaaatatattgaaacaaccattaatccgattcttaggggtggtgctaaataccattgaattttatttcaagcatacggagtaaatatgaataatttaactgaatctcagtatagtgtatattccacattttgtagtccaaaattaatgtgcatgtctcttacagatgcgtttattgaaattcataaacaacatccagaagtaaagcaatgtattaagaaaaagatcagtgatagcgaaactcagttcatctttatttttaaagatgggactgataatctgattatcagtcgtaaaactgaaccgtgccctgaactggatattcccgtaggggttagggtcaagctgtctagtgaggaacttaagaacatccttgctgaacatggtagccctaaagatgacaattattttaagcactggactgaccgaccataataaaaatattactgattgtataatactatgtaagaagtcatgtccatacgttcgcgctcatagttcagttggttagaatacccgcctgtcacgcgggtggttaggggttcgagtccccttgggcgcgccatttaattccgtgatagctcagtcggtagagcaagtgacttttacgatttcattggtaagtacccgagtggtagcagggagcggactgttaatccgttggcgaaagcccaccgtaggttcgaatcctaccttaccagccaaattctaaagagtagcttcggctactcttttatgttgccatgggttatcttatgaattaaaatgatttacttgagagcacactcatgtttgaattactattatcgccagatataggcgaagagttacccttggttggatttaatgaaattattaaattaggtgatctacctgtggcactagctggtactatgtcatatgtggatggaaatacactatatgttggatctggacatcatactgaaggacaaacagccgcaactgtattcagacgttttaccatatcaccattcgcagatgcaggtgcaacagcttctggaacattcctaccaggtgtatccttaggatttggaacattacataagaataactttattgtttatggcggtattactggatggaacgcggcgggtaatggtggtacggggacatctaactttatacaacattttgatataagtacaggtagcagggttaaacgatatagtgggcctgtaccattttggggtacagcatccgcatcagatggtaatgatcttattttgtgtgtaaacccagttggggtaaatgcaatgcggttaaaaccatcgggtaagacatggcttagtggacaagattattcaggtggtgctcgttcaggtcaacagttattcttctataatggttacttttatcattttggcggctgggataatacaaagaacatacctaatcttgaagtttatcgatataatgcaactaccttagtatgggagcaaacaccttggatgattatacctgctgataaaggaacaatctggcaaggtaacggttatgtagatggagaatattttaattatattaatgcagttgatgtcaatggcgtaactaaaatgtttgcacaacgttttaacattaggcgtcgtaaatgggctgaaccattagaacttggcatagggttccttaatatatcgtcaatagctaaaggtccagatggcagtatgattattgttggtggatctaaaacggcagttggtggtggagcatatatgttgaaaagccaattattaactggtatatatcaagttaaagtagccccattagttctcgattaaactaaagataaaaatactagtgcgatgatattatgtaggattactgtatctagataatcctaaagctatccactaaatacactcggtggtagatttaattatagagtgtgtctgagtgccaggggtttgccacccctggctatattatgtcaatgagtgtatctcgttctttataaccactattgatatttaatataggtgaagggaaggtgacgaggcctttccatagccggtatataacctaatttaataaaggttatatactacattgtaataaaggaacttctataatgaataacacaaatcagtttgtaaaaactattgttgattaccaggctatcctggatgcattgatatataaaactaatgagaattggaataagtatgggatgcattatcatcttaatgatgtcagtcatatcactatacgtgatcatagaacagtagggttttttattggtcgtcaatctggtagtactacagcattaatggaattttcaaaacgctaccctggtgaatgtttggcagtattcaccgacgaaagaattcgacgtggtgctcaagataaactatccaaaacaccagataacattattccatatttaactacatttaaactacgtagctatatccataaatctggactatcaacgatccagaaagactttaatgaaaatttactttcagatatccgctatatacttgtagataatgcatcttataatctaaatttacgaggtattactgataaagaatttaatcagtgggtagctgatacttttggcactagtgtgattgtagttcgttttagttaaaatataaataggtaaaataaaagccctccgtcatggagggctttatgttgttatgatatgacattgttgtctaaataaaatatagtacgcatatgcgaagtcatttttaatggctttgcatatgtcattaactataaattatagtaatttttagaagaggtatttaaatgtttgaggcgttattatttacaccacttgttaatttaaaacctgttgtggatgctatagacatatacgaaggtagtttaccaccttcagcaagtttccaggttatcgatttagataataccgtgactgaaccagaggttataccggatgataattgaacttaaatggcttgatcctaataaaacaaaatatcactccactgaaatttatcgagccgattacgaattcgataatattgaagatgctgaattaattgctacagttggaccagggataacatcttatcaagatacaaccgtggaacataaaaaaaacatattattatcgctttagattgatctatggatcacaaaaatttgaagcatcggatatgttcacatttacagctatcccatacactggacctggtccagctattttccaatttggagatgaacgttttggttattttggaaagttcccaatggacttaccgtcattaccatcgtttaatatggttcgtgaagcatttagtttagggccaattacaggtaactatctagaagtagcagaacttcataaattcgcaataggtggtactgttagaggtaccttcccatatccattggcaattgggtcggaactaccaagagatagtgaaatcatgcaaacattaattaatggtggtgcaattccattaacaataggtttacatgattggaaaataataataccctcagccgaacatcataataatccaaaccataatgtgcagcatttcccaggtgaactgcggtcaatgatggcagttattacagagatgtatgctcgtgttgaagatgctgagacaggtaacaaaacaggtggtagacttacattaaacagtggtttaaatatgttctatgacccattgagtgccagatttccagataccgaaataaaatatataattagttcagattggactgataatgaatgtacagctattaattggacaagtagagatgcagtatatccattaagagcaaaagaactacataccgaagtagttaatgtagccacagatgacgtatggaataaaatgcttatttggccaattctagtttatacaggtctaactaaaccgaaggaggtgtagccatgagaattgaattaactgactataattcagatccatccactactataaagatatatcggcattatttcccatttgatgcagaagatttgccgcccgtactacttgtattacctggtaatacaagtagctacaccgatgagaccctcatactcaacaccatggtttattatagggtatcagttgtacataatggcaatgaagtagttggtcctttatacacaacaatgaaacgttattatactggaccacagattgataagaataccccagataaaatcttacgtggtgatagttatattggtcgatatggtacattacctttgaacgtcatattgtcaatagatgaagctaaaaaattagtaccatcatgtactgtacttgaaggaatcgatcatgaaacaatagaggtcgagaagtgtagttatcatgggaatgtgttatttatttctaatacacctattttctatggtagtcctgaagatctttataatgatggtgctctactatcatacggagacggattaggtgtattcagccgcacattttacgattctttaacaactaaagttgagcaagggaaacctgtaacgtataacaattattcatttaagttcagactgatgacaacaagcgagtatgctgaactatatgttaagttatatccagattcccctatgggtcttacatgtgatcgagttataggtaattgtaacacgcattcatataaatcaccagtcgtagatatcggatcacagggtaataaattcagaacagttggattagatggagtgtcttcagacacagagtggactactaagggaccactttatatggtggtcgagttaatgaatagaggtgatatggcatggccaagccctgatgtaaatatcattcctgctgatccaactgatcgcatgatgttctgtcaatctgaaattattaacggacgtgcccatttctttggtggtgtttatagccattttaattcatatgcatcggccactactaaacatatcagtattaatttggatggatctgataggcaagtacatgcggatatgccagttggggtatataacgcatgtacttgggttaacgggaataaaatctactgtatgggcggcgccaaaaagataggcagtagcgaatatacgtatgctgaattatacaatgacattcaggtatgggaggatgatggtacgccagaaggttcttggtcaactataacgaatagtttacaattttattatggtgctagtgttacgaagtattatgataaaatcactgatcgtcaaagacttttatatattggcgggtatggtaatgtaattccttccggacagtataattttgcaacagcggatctggatacatttgacggtacatttacagtctataatcggtctaatttctacgacggtggcggcggtccaatagcaccacatgaagattatttcttatgggttgctccagaaagaagtactaatggttttacaaatgcgacatataaattaactatacctgaagacactgactcgtatacatatagaaccaagataactcaacaaggtacagaattaccaaccaccaaaggtggtaaaattcatatttggcgagatactatcttcatgtatggctcggcatctcttgatgagaaacaaggtgagttatacttatatcaatttgtacctaatgaaaaccgctggttgaaaataaccgtagcgataccaggattaagtaatagcagtagagcatctttaaatggagcgttttacgaagataagctcgtgcttatgcataatcaaccttggcttaatgaatcgtttacatcaagtttctatgttattcgattaatcgatccaatcgatgcaccaatcatcccagtcacagatgtacaagttggcacaagtcggatatttacaacttatgctgaggtttcgatatgattacctttaaaattaggaatcctaattctagatcaattacaagtattgaagtataccgcgagttatcaggtacacctattccggatactcctataaaccaaccaatccagaaactagacggattcacgacagctattattgatcgtgatgtggtaattggtaatgtttacgattatcgcattaggactgtaagagaaggcggcgacacagccattagtccagtatttacatttaaagctgtttcgcaatatggaccaggtggtttcttagaacctatgatgcaagcagatggagctgcattgttagatagggtaactagtccggagcttcctagtcttcaagatctattaatgatgtttaatgggcaatcggaaaatgccataaattggactgatcaatggacaaaaattaaacataaatcagatatttactttctcccatatatgggttatatcgagataccgatagacaaattatctgagctaattaataatgtagataataatagaactatagttaaaggtaattgtaaatattctttttatgtcccatcattgccaacttcgttctatatgcaagttatggatggtcggtttgttggaccatatacactaccagctgattaccctagaaaatcaatgatccggtcaattagtgatcaggttaataaaaatgcagatgatgtcagggtaattatgactgtagtaggtgcgaattcaactagagcatttaaggatctgagtaagtatgggtcatcaaccattaccacttttaacccaactattgatgctaatgttagttggtattggaaacccatattaaattttatccaagaatcaggagtaaattaatgtacatcactcttaaaaatgttagaggttggcctggttctacaccgatcgttacattttggtcgtataccaatgcgataccttgggattacaataacctaccaccccactattactatgattgggatttaatagcaggattctggccatccagataccctgaagatacatgcgtttggttgaacttaaaatataaggatatatttggtcaattagcttatacaggaccaatgcgtactcttagtgtaagtagtaaatggcaaagtgtattgggatatacaaagcttgaagccggtgatggacaatatgccaggttgacaaagtcatacaaaggtgaaaatagaccaacccttagaccaattggttcttcgccatatagcatcccaggaatgaatcttgatgaggctccaaccccttattttattgataatgagtatgtagcttttcatgatacatctagtattgagaaagctgtcgctgtggctgtttaccatgcggggtacatgggacggtctggagatatgtccgatgtatggccgagtgaattgatagaacatataggtggtccaactcaacaaggacgtataatagatatgcaggacgttaagtgggaggtatatgttccaacattaaacgaattcaagcgttatatgggtacagcttttcagacaggcatccaaacagaccagtccccggtaactaatttatcactgccagataatgtaaagttcctcacatcaacaccatctccaagaaataataccatgttagttgctatcgataacgatggtattgaatatgatgttgacatagctaatgaagttgatgtgatttttgtatttagacctatactaaaataactttatacggcataagacccctctatatagaggggtctatttataagtaaaaatatacataaagtcattattatttgtaggttaaccctacatataactcaactagaaaccgggcgttaataaaatttaacactacggaaaacataaaggtgactcaaatggcttttcattttaatacactagatctagacgactttattaataattcaaataaagtattaaaaataaatgttggcaagcaaacattagtagcttatgatgttgataaactaaatattgttaattcagctattaataaactagtttatagcgaccctataagtgaagaacatatcgaagcatcactgacagatgattcattaaaagagcttaataattatctacttaataatggcattcagaatagcgccaagatgatgattgatgctgctctagaaatcaaagaatattataaaaattacgattcttttaggccatgtatttataaattaaaatcaatgcataccaaaaatacagatgatgtgtatctaatatttattctcggtgaatcggacaagttatttgatactatgcaaggttatattgttaataagtcaggtaatctaatcagaactactgttcagtcatggcgattcgagaaaattgaattcaatgacttagccgaatatgatcagcgttggttatttattgaatcttacactaatgttaagcaaacgaaaaatgatatagccaaagagcaagaagccgaattaactaaatttatttattatagtaccccaagttaaaacaaataaaaaaataaatataagagctagcccataatgggctagctctatgttatcttactctgctacatcttttacatcgggtttattatttccgcgtactgctctcacgataccatacgtaagaataagagcacctatggtgccaatagtggcgctaacaataataccaagagtttttggatcaatattcatatctagtaccctatttacaattaatagaaaatattacttttagtaatatcacattagtaatatactgtttaaaatggtttgaatataactttatctattataataaaataatactttcatatacactatatgtagaagattacgccgctatagctcagctaggtagagcaacgcacttgtaatgcgtaggtcctccgttcgattcggagtggcggcaccaaatttactgaggtttaaactattcttaaatatattagttaggatgggattgaacgcgaaagactcagtaaatcatattgcccctccatatggaggggcttatgtttgtcattaatcaggaaagtataaaatgagtcatctattatttatcatccaagaatatattactaataaatttgagataacacgaattgatatgaagccatgcaatagaatgttacgcgtatgtttatacggtcaacatgagggaaaaggtttcgtccgtgtagatttatggtcagttggttatcgtattacaaagaaataatactccagattatttaatatgtattaatcaaaggagtttataatgagtaatgaaactaactatctaggttatgaatggaaaacagatataactacttcaaatcttaatagagtagttgatttatatacacttgaattagcatggctaaaagaagattttaatgatactctttttataaagtcttataaagcactagagggtctattagaggaaccgtctagggcaatccatgatgatacagtgcccattcaagatcaattagatgaattaaatactgtttttaaattagtatttgggaaagacaatgatgtagagttatcaattaatgatgattcaattattgtaatcggcaccacagatgaaactaaagaaaagttagaggtagaggtgcgtgagtttgcatatagaaaatcattaattgatgaacgttatccagacattgtaacggattaaaatacttacagctatctagtatgtaactaggcggattgccatttgtaaattatctatttaatcaaactgaggaaatactaatgaaacaattctttcaactacttctaagcctacttttcaaactaccggttctatcatattttgctgagaagaaacgactagagaaagagaaaaaggaagaagaaaagcgtcagcaagaacaacgtcaaaaagaactacttgacgaacaacgccgcgaacaagaagatcattatcgaaagacagcttacgatcgcctagcaaaacttattcatactcggtggtatgatgagtttaatgcatatgaaaagaaactagttgatctcgctgtatcgagtggtaaagcagttagtgttaagtatggtaaagtcactaagatgcaacaccctcagcaatttaaactacttaatgattggctggatgatatcccagtagaagattattctaagtgagtttaaataaaaaaataaagacatagcccctctccacatggagaggggtttatgccgtaattatacacttactttgataagatttttaatatcagtaaaatgggtatatgttgcctttttatctttgtgaaccagtaagcaacaggtaccttcatttactgtattggtttgttttaatgggatatttaaagcatattcaaacagatcatccatccagttaaataccatgaacttattgataaggacatgatcgaaatcaattaatccaataaacgaatcgatctcagattgataatactctacaaccattttagaccattctttgtttatcgcctcaatgacattaggattatttattttattaaataactcaatacgttcctgagtaggtaaactgaggtaataattaatattactcctaacgatatctggattagtgatatccattttttctggtaagttatatttactatctacataattcttagtttctggtgtcattctccagcaaccataatcagcagtagtacttgatggatctattttagtctccactactttagaaaatacatctacatataaattaacagattcgtatacatcaggtctgattggattaaagtttaaacttttaataagacccctaactggccgagtaccaattagacaatgcaattcaagcttaacattttcctctttagccatcttaaatatatcagcaaaactgagcttttctgccatttagaatataccttttattaattggacaaatagattagatacacatagcaatagaataaaccataaacctagtctttgtaatttatctatacgcttagctttttgtttcctctttaatctaactaataatgtatttttaatatcattcattaaattatctcagattttttagacggtgtataaaccctcagtattacatgttgttatgatattgtaaagacgatgccaatagcgatcatacgtatttttacgtttgtagctattggtgcggatgactagattggcgacccagtgattctgatcaatggtctcatgtagatgcccgaaataagcccccagttcaatttcgaatgggatcttacactcacgccccttacacattgcttcacgcaataaacgcattgcagaattctctgcattggtatctttaaataaaagactaatgtatccagggctaccaccagtttcttcatcaacatggcctgaacagcaataaatagttgcaacattgataaattgattaaaccatttaattaatggcctacatgcttcatcaataagatcttcatattcaggtttatacattactttaacagtatcatctgcacgttgtttcacatgatgaaaatattgctcccaatttacattagtgtaatatagcatatccatattagaattactcatacaaatcaaccccatatgttattggcatattcgcggtcattgaaaatgcgggtaagatccatccgcttttgaatgcgcgctagtatccattttagttgtttagttgatagttcttgattttgcttgtactcacctgtagcatggatgtaataatcaaatttacgacttacagtagtagtatgtgcacatgcaatagcaaatgcttcaagtgcagttagtttggttgatccattatcattacaattagggataaactcaagtacactattaactgcatctacaccactacccaaatgagcccaatctttcttggtgatgttgatacccatgtctttaagaataactgtatatatgtcaccattctccatagtgaacatcatagaagtattaccattaaacaacctgcgttctatgactggcaagatatttacttcaactttaaaccaatcagctaaatcaacacctgcggtaagggcattcaatagatcataaacattatctatagttccagcaaaagccatagttttaacacgtttaccttgccaagtaactgtcggatgaaaaattatcttgtggcaatcattgtaatatacatctacaccttcagctttagcagttagatcaatataaccgttatctaatactggaagtcgcccaatgctatcagttgcattattccgctcaattaataggcagtctgcaatcatgactttaccatcatttacgatatatgtcattttcactccttataataaaataaataggcttaagcgaaataaagccctccccgaagggagggcattatcaataggtgggatctcggcggcaccttcatttgcggacgggaacgctgaagggagatagtccgggagatcccgatttgggtattctttacatatggtattactgcaagtatttgttccccgcagtataatcaccattgatccaatttttgattacaacactgatcccttcattttctttaacggtaacccccaactcaagatcgattgattgataagctacagccgccagtgttaaccgaagataaacggatccatctttttcgatatcgtaggatactacgaacccgtcttgtagattttgtagctggaatgtattagcatgttgtgggtggagacgatccatattgtactcgacgacatctagtagatattgccgagcatcagcagcattatcaaatccgagatcgcacagaccgatcggataacgagcttgcgtgcatgtaactttcatagatacgacgcggtgttgtttgcacattatattttcctcttagatgtcaaaaaccctccccgatcaggggagggtatctcattggtacttcttcagcaaaactgaaactaagataaaagagcaatcgtaaaggaactacatagaatagtgtatttattttactatttttttacacaacctctttagatgggggttctttatgaatccagtctaaagttgttggtaaactattatctgatctgaaggtacacaccgtccggaaccgagagtgatcaactacagataattgcccgttaatcgcaacctcatattgcttacacaacttcacacaccttttctctagatcagttggttcgtaaccttcttctcttggttcagtgtatggtccatcccaaaagaatattaatctaagatcaatcccagatttatactccgcttggtatgaatattgatgaacatcaaaatcatctaattcttcaactagatgtgatgttattgttctaggatgttcatgagttaattcactgtatatatgtttatttctagggttttgtaaatcaactacgataagttgactagtcattttaacttttatccagatgtctattacgagtgcgttccactgctgtaggttcgacagtggctcgcggtagataagtaatctccgggaaagtcttattaagagcatcttcaattagctctttagcaatctctgcatcgatgtaatggtttagaataataccacgatgatacaggaagaagctgtattcatcataaccatggcgaagacttactttaccacgatacccaccataggttagagtatcttcgttaatttcattccgataaatatcaagttggatattattttgaagatgcatttgaatgaagtcattactatcaccgccgaatagggttggtcgtttccgaccagtaacaacatcttggatggaatccattagtcggttaatgtctgtttctaatcgttggatatcacattgagaattcattgcttcatggaaacgagttacaactgcattgaattcttcttcagtccaaccactggtacgtttttcataatcaacaatgataataccgaaccaggcataaccgttagaatgttttactttaacacatagatgaggtacattatcagcacctgactgatggttaacagtgtaattattattacggctgattactagtttgataaaaggtagactaatgattgacgccatggaaatattccttttgtattttttaaattaaagtaggagttattattgagtttcaactcaatacatcaataactccagtatgttttcaaaattaaatacatgtatttacagttacattgtaaccagttagttttgccaacaatacaaattagcgaacctgttcgattttttcagaaacaatgaaaatatgtgcaatacgatcctcatcaacataccgatatcgaaatgaggtataactagatgacacatccgtatcgtttaaataggtgatattaaaatcatctacttccctaccattagcagccgcaacggtatttagaatgttgagtagactcattttacagattcctttttagtatattaatatttcaatagactattgataaaagcattagggtcataacggttatttgaaaaagccgccattacatcacaccctggttgatctttaaatctgatatcttcaggaatatcgaagtcagggaacattagtttaatatactccctaacctcttgatctcgtagatatggaatctccaccatgtaatcaacgcgacctttccttagaagtgctttatcaatattctcaggatggtttgtagttagaatggtcatagtttcatctagtggaacaatgccatctagaccatttaatagagctgacaaagttaatccgctagctggttgctcatacgtgattccattcttcatacacttctttaatttccgccatcggcgaattgtggcaaataatggatctttctcatcggcccattttgaaacacccaattcagccatagcataagcacttatcccaaaaccttgatcatcactattttcatcaaagatatagatggtgtcattaaatccaactacagagtatccttcatagtcatctttaagatcaacccatgaagatggatatttttcaattaaatcaataaaagaatatttcctctctaattcctttatctctttatctagttttacaggatcatttaaaacgcgatctttaactgccggggtatcatcgaagtcctcaattaaaagaatattacctttaggtagtgtagtaaatgcccgcctaagactatcactagtcatagaggctagtgatagcgcactaacatttttattaaaatgtgaggcaattgctttactgatcgaggttttaccagtaccaggaggacctgttaaaacacaagtgaatttatagggtagtccacgatcatcgtaccatttccgatcagaatagaattcttcaatcttattaaggaattcttctttgatctctttacgcaaaatcaccgtgttgatatcgcgtttagtaacttcgatttcattaccccagcgattaccatcccaatgtgagatagtaagacccatttcatttggacgccagtggtacgcatcaactaaatcaataataagtttactacttctagataatccacggatagtaatgtccatctggtctcgactggcattttggctatcccggcgtgcttttacaaaccagaataacctacctttaaacagaaagaaatgtaagccaaaaccaacaccaattttctgtttagttgcactataactttgctcatcaacgttggttgaaaaacggcgattaaatccagctaatggttgtttaatataccactccataaatgagtcaaagtttttctcatttaaaccattaccagtattagtgatatgtaaactaactgtaaattgatttaatgtgaatctaactatcttacttggtagacctcggatagtggtccataatacaccaccaatcgccataccaatcgcaccacccatcaccatattcttttgagagatatcaataaacatggcataatagctaatgaatgtatcaatcattgtaaattcctattgaataaagaaaaaaataaagggctccgaagagccctttactagttaaagttttacagaataggttttctcgaacacttggtgaacaaaacgatctgacgcattatcccaattctcacgaccatctacaccaaaatagtgaaattctagttcagttggtccaccaacaaaatcatttttagcaaagctaatgactttaccattagtgaacttgactaatacatctacatagaaaccattgtatgcccatgctttggcaattagtgcagattgccagctatattgcttattgtaaaaatcacggatagcacacattgtcctaaaattaaaattaccagttcggatagaagtagagataatattcgttagtttattagctcgattttcctcgccaataaggtagatacctgaaatatcagtatccgataccatgtctaaagtaaacgccatattggatagtggtttagccccatattcatcggtgaagagagttttaataacttctttaccttctcgccgtgcgaacatattgagataaccatcttcaatataagacatatggctgggttggatatattcgctggcatctactacaatgttagtagcatttagattaacctttagatgattcactaggtcatcgatctttttaaaacgttcggcttgtctagcggtattgagatccacgtacaccacggcatcaatatagtctagcgccattgggctgttctgcttatcaatgtcagcgttaatatatacataatgaccagcaccaggaccaaaacaggtcatgatattttcacgtaatttgaatacatcgttatgatgaatcggtaatccagcaccaccaacaatgttgaagccaatgcgaattgtattagaacgacgtgccatggttatatttcctatgttaaattaatgaattatttattcaattaccgtactacatctgtgattagaataagttcaccatcactattgataacacaatagctttttacaatttcgatgcgcttactaataatcttattctctagatctacttttacgatattaacatgaattaccttattcgattgatcatgcatttctttaaaaatgcattcgatatttttaccaatgacagcttttaatttttcaatgctgtcaatggatgaatatttaaaactatatgcttctgccagggtttttgcattacccacaacagtagttagggtaccccaataatcataaacatacagcgcagtatcactattgggattatcgataatttcaattataaaatccacttgtatctatcctattagtttattgatagtacacttgtaatatagatcttaaataaattatgatctaaccatttaaaatagataaagactctatatgccaatggtgtattagttcttctttactaataatattattgaagtagtttaatcgatgcgataccattaatttagaatgcatatcgacttcactacttaccttaatcaccccagtctctaataattgtagagagccaatatacgcaaataaagttggttttaaataccagtgttccctatattgtttttggtcaggtacatttcctacaatgtagtcagtagaattacttcggtatgcgtaaatagttgatttagaaccaagtaaattaagatcgatatcataactcccgcttttagctgcaatacattcaataactgatggggccacacatatacggttggttacactgtcttcgccatcagctctattacttggaatatatggccttaataaaacataatccccaaggtatactgtcgatatgtgatacataattaacctatttaattaaaacagataacgctctgttactgaacgatattgtgacatgatgtttaatggatcaacatccactggtgctttagtgacagttaagcgagcaccttttaaaaattcaccaatatctaatttccttacagtaacatcatggatagtgtttttcgtaatccactcagtatcaatgctattgtgaggattattattcttaatccatttgtcagagtccctaaatggaatggtataaacatacacaaccatttttaaaatatcatttttatcgatattattttgacaatagattgtaatatccctatcaacagtagcatatctatcactatcaaataacttttcgatagcgctaccaatacctaaataagatgcatctttttcagatgacgttgcatataggtattggttagactcaataccatcccacataacaagttcaccagatcttttaaatcctggcattaattcatcttgtttataaagagaaccatggtaaagtaattctggtttattcataataaaatccactatgctttataagagttatggttatcaattaacttcaaggtagcagtgtggccgtattgaagtgattggttactgtttcgatcagcatatgctcgatgttgattttgtagtattccggttcttcgttcaattcccaaatgacagtcgcacgtaatagtgcaggtgctatgaatctaactaccttaccatgtgtgtcaaactctacattaaacattgcataatgttcagtggtatgatctttgtaaaaagtgaaagtaccagcgtaactgcgaacctctatttcaccgtgaacactggagtagacttcctggtggaatactttacctttaaggcgtgtattctcttcaatgatatttaccaattctttcaatttgtctttatctagttgcatttgtaggttcctattaataaatgtatacgatggatatcttttacgatttccggtgcttatccatatctagttttacatcagcatatatcttgaatctatcagatagactatccatatctacacgcaatgcccgaatatgcatatgagtatcttttggtttaccttcagactcccatacggcctttacgatatcaaataccacattgttcaaatagtattcgacttcatgttcatcaagcaaaagagtgtcatggaaaccaatacgtgataaaatggcgtaatcacgctgattaacatctctccaacctttacgtactaagtaacttttacagattccatcttttttacaacttttactaataatttctataatgaacttatcatgccatttataatccataatcattactccttcatttaatcagcttcattactagaggaacagatagacttatgccattggccattttagctaggctatgatagacatcgtctgcttcttgattattggtacaaggtatagaaatggcatcaccatagtaaggactgtagttaatacggtcgccatacacaccactcacaaaactataatctaatccatccgtagtagtcataataactacaatatgatcatccccaactataccggattctaaatcctcacatagttccagtttttgttgcacacctcgttgacagatccatacctcacggtattgatgatggggatatggattacatgctacatcattttcactaacgaagtacatagtcccccagttgtaagactggaattgggttgtttgtttgtgggcttcccatacctcctccatacaaaaggtatgtttgttaacccatagaccatcgttattaagactatcaacgatcccatcacggacacgtactacacggagtgttttagtcatctacgtaaccctcatcagatacataagtgcgttcagggctgaacacatatttgatgttattaattacagctgtgatataaacctgatattcttttgaaatagattccatcagttcaatagatacggaatttgaactctgaataagtttatttactttctttagttcatcaaattctaaccgaccgtagattacaccaacatctctgaaactgataactggatagtgtttccaaatataacaattcagtttaccaagatgaattacttgaattgtttcatcgcaccattgtttctttttcttattgtagtattcaacacgacgttcgatgaagacgcgagtaccagaaacagaggtgtacgcattcagttcataaccatacttatggtcaacgttatttggatcttggcgccattttggaatgaatgctttcatttgtattttcctttttacgaaatagaagccctcccgaaggagggcaattataccattattaaattacgagtctatatacttcttttaatttttcaccaggggtagctagataatctacattatatttaatagcaattacacccacaagttcttttctcagtagctgttctacctgatcgcataatttatcaatagctccatcttctacatcctcgtataatggatattgactataaatattatcaggtgtaagtacagacagtttcaattccccatctttaccaatgactgggtgatatgtctgtttaagacctttacaatgatagtgataggtaatgcgctgttgtttagtggtcatgtaaagataccttaaataaaccgttgggtagttccgtctttaaagacagttagttgattaacatctttcaatgaattatctgcaatattcttagccaataacaatagatcatcgtgatatgttttaatgagaactttaagcctctccctttgtttatatcggaaacctttattaatcacagtaactccatctggattatttttataattcagtacagtgattggtgtattcggtacaaagacggctagttcgtcatcgaatacaatgtaaaccatcactttataattattaaccgattcttggaattgttgtgtgattacattatagtcttttgtgcgatggctaagaaacagctcactattagctcggcagaaactatgtcgcgcttttttatcagcactcataacagcgataccacggataatgaatttattatctaaggtatattttctttgagacatcgcatagtcgactacatcaacatcgccgccaaatagcacggcattttcaccgtatccacaaataagagccatttataattacctgtttaaaaattatattcaataaattgaagagtgaatagttcactacattcccatgtacgacttgctaatttatatttacctttaacaggtaagtcaaaataacgtaatgctttttctactgaaccagcctcatgattaaccaatagaacattcctagccttcagaatatttgaacaatttacaagttcataatcatctcgcttaggtgtcaacatagctacattagtgcctggttttctagcataccagagcacctcatgaccctctggattaataatagagatatatagctgacgttcagcgggtaaccacaagttacgtggatcatactctccattaacatcaaagaatttaaatatcatagagttggaaccggttttgatggatcagcaattagtgcagattcttctacataaaccattgcgaagttttcaccttctttacgaataccagtagaaggtgttttcgatggatcataaacgataatttggcactgctgtccagctgttaaataagttgggccagttaatgcattgggttttggatgaggaatatcaattttagtaatacaatattgaccagtacgaaactcacgcattatattaacctcttaatgaataactgttgcagaaggacgacatttcatagttttaaaaatgtcagtaggatagatattaccagcttgtccgaaaggtttatcggctagaagaaactgcggacaaactgtttgtagataaccactatcagtgggtaggaatccttcaatatcactgatgagaatttgccagatgggcaattggttataatagtcatccatattgtagtatgcgtggagtttaccaccgaacccatatacaaactgatgagtatcaattagacgaataccaaatttaggttgtcgtcccatcctttgatcttcttcaaatgcgctcagtaaatctgcaatctctacgctacccgtgatctgtttcacttcttttaatttttcaaaaatggcgtaaaaggtatttactgccgattccttagtgatgcatgcagtgatcaccagttcaggaaagagtggatcttctttattacacccacacgtgtaataaacaacattgggaccaatatcaccttctcgttcaagcacggcaaaaggctttttggatagtttcatttgcttttcaattaactgtctgctattctcacgaatagatgcatattcgtgactggccttaaaaataggcgctttgtaatctatctcttttggttctactagatcacttgccgatttgataactaatgggttactcattgtatatttccttttctcatataagaaaagggaggtattaccctccctaattaagcattagatatttaggttcagtggtggctcggatcttagcaataagtgctttctgatcactaaccttactaatggggtattctaataaacgtaaatccatgtcccgatgtactaaacccaacattgccttattttgatgactattattacgtaatgcagcgatatgtttatcaacttcattactaacagtctttgaaagccctactaaatacttcccagttgcaatgtgttcaataacataaacacctgctccaactatttcgcttcttttcccacgaccgtgcgaagtacttgaccaactataacacttatcatcaactataaacatggttaattcccgtcctataactatctaattggacggtcaagtattagctaccagtccatgaatacttatcataaactaaccacattgaatggatcttattgatgatattgaaaataggttcttggacatcttcaaaatcacctagatcagctgccagattggccatatattggaatagccgctcagttgatacatccaccagattggcaaatggaatactggcatatgggatttgctttaacataccaaacttataaattttagcaaaccatgcatccaacattgcaacatctgctttaaacatccaataagtttcagctggatatgtgccgtcatggatagagcagaacaaatcaccagtaatcgtttcaacaagcatttctacttcagcagaattaatttcgatcatctcaacccacctttagtttactgcaatatagtctaaacttaagaatatcctctactaagttagaccatagagtatacctatttcgtgatgcatttacttcttcaatcttagcatttatattttggcgaagaactttgtaatgctgatacgcattagtcgcatgtttagagaataagataataatatcatcaggacttttatttagcacatcagctagtgaatcatcatcatatatttcaataagcgcattaacgatacgatgatgaagatgggttagtaattggtaaatatgatattcgctaccaatataattaccttttataaaagctcttttactgtagaggatctgtgcagtatctcttacgcattcaagtttcattgtgcattaacctgatgtagatgaacataaaatccattactaggaccgctattagatggatatactaacagatggtctccattaacagactcgattataactacagtgccagctttgcatagtgtaagatcatagccgcattcaccggtgctattaataatatctgtattgactacaactttgtcaccgactttaaatgaatttgacatatatcacctcaattataggcgtgaagaatatcatccatatctgtacattgtacagtttcaatttgattataattgtcggcatttaaaactctaaagccgccttcgggattaccttcatcaacgcctaatacagttaggtcatctccttcatcggcaaacttccattctagataaccattctttttacaagtacgcatgatccaaatatcctgtgttgcttgtagaatcataccaacttgaactttattcttagcgataagactaataccattagctagcgcgcttgctagacagctcactgttgaactcatttctttttacctctttacaactcttctcttcagtcagccatgacttgttaaagatgctatttatgataggattgaatttcggtgattctttctttttctgatcggtatccatcgatatcacctatattgataattttattaataccaattagcgtactacctaaaaccgctataactaaaaacaatgctacatatttcattccttccatttgtgatacctcagataatatttattttatttggcatggttgttatataactttaaattttattataataaactattaccccgtattaaggtaatagtttattatatttattatagttatcgataacccattggcatgacatatgtttaggagtatcacctagtaatttggtgtacgttagaaaatatattacttgggctttgttaaagtccaatccagcttcttcccagatataacgatactgttcagttttatccccatgtgcagcaaccagaccagcgcatgcatcaatgtatcgatcctcaccagagaaaacagcacttatgaatttatcagtattatccaacatatactgagtcgatttgattaccttatcattcattttcatttgaatatacctgtttatataaaaggatataaaagcctccccgaagggaggccattatgacgttacattgtgaaacgaattgacacaccacaaataggactattgtcatctgtccaaatttttgcagtaccatcatttttaatagttaaacaataaccccaacggagattatttattttagtggtataaccacttttgaatacagccatgtctttataaagctgagggatagttggcactacctttgactgcattttaccagataaatcacgatagtagagtttatctacaatcacattatcaaattttttataatcaccaaagacttcagatagattaaactctaccccatctgctttcaatggagctgtcataaaactaccttgctcagttgtaaccatactgatagcaacatcatggtctaatagaaatcgagtttcaccattagttttcttatatactgggaaacttcctagcggttgtagaacactcattattaactcctgattgaaggtctataaaattgaccactatagacccatatagcattccacaccaatcttttttataaccatatcagactcactatcaacatattcattatcatggtaatactcatctgaatagccaataagtttttgttgattgtgataatttaaaaagaaaataacacgcattacaatacatgcatacccaggatgatcaagatacagttcttctttatctagatcaaagaaaagagtttttatttgaactggttcatttgtgaagattaactttattggattatctaactgaactaccttagggtcactatcgaaaaccgtagtatcatgtttacctaagtaatacgtaattgatttaacatagtaagttatatcctcggttttctctaaccgggttatacaatagccggttatgactgaaagaacaaacaatgataaaataactaatattatctcagtcacattgaccacccatataaagtgttgttatatcgatacactgcgaaacagaatgcttacatggaataaatatttcatcgatggttaaatcatcatcaataggttgaatactttctaatctaccaaatccatcacagttaaatttaagtgctggataaccttcaatacccatgctaatccaactattattatgtttagttacatggttgaatttaaaattacgcatctttcctaaaaattcaattgtccatgtagcatccttctgcttcttcaaatggtaatatttattcattagtattcaccattattaagattagtttcattctattaaatagatagggggtccaaagacccccattttcataattaattagaatgcagaaatggtcaactcattgcacttaacggcagcgagtttttcccaattttcttcatgttccatcaagcattcaattacaacatgcatggaccatgactcgccatcaatatttgcaaatacaaagaaaccatcatcaagctcagtaatgccactaatcagattatttttgatcaggtagaccaattgatcattaacgattttaacttcatgatcaatgagatggctggcatatttgctagtgatatcaaacacttcttttgatgaaagtgatccatcgcgtttgacggcagttaggctccaattaaccaaagacggtgaacaccaatgaagaccatgcacattcatcaaaactggatgtttgttatccatagcttttacagaatgagcccagtacttttcatcaatatacatttatatttcctttttttccagattgattattttattacaatgccttcagcattgcgtactgcttctttagcaaattgaacatctccaaatacatgttcaataaactttgatgcatctgacccagctacatcgcttgatagtagtttcacagtcttggtaatcttaccaggataatagaggatgatatcccatccatcactttctttaacagagcgaatttttagaataggctcttctttaccaaggtgttcaagactaacaccacttttgacagcggcttcatatactacatcagagatagacatattagttaccttcttaaaagaaagcggtcatgcgaccgcatctttaatcagcgagataattcgcgctgatggttcgcgccaaaattcaatacgtacattattgaactggctatcgtgatgcataaaagctgacgattgctttgctgcatcgtgattcataatagaacgtagctggataatatttttgtctttgagtcggataccatccagatcaatgactttcagtccagagttcatagtttttacagttacatgttgcatttacaatttccttttagttggattaaaaatctgttaaacttcttttataagttatttcggttttgcgatagctttaatgagttcctgttcaagttgcacgagttcatcatctgcgatgtcgcgtgaaacacacatacaccgtcctggtcgtttataccaagtaatgcagacatcacgccaaataagcgcaccttcatcgatatcattgagcctgaaagtctttagctcgtcagtgttaagagaaggaccaccaggataaggataaaatctttcgtaatcaattccactatatttcatcactagggcatatagtggtggttgaaccattttccaatatgaagctaatttaatatcctcacttggtacagatgcccaatactctttttctgcttcatccatttcttctggtttaggaagtccaccaatcagacaatatgcatgttcagcaacttcaactaagcgtgtatttttcatagcttaatcctaatctttgtaataccgcaatcgtgctcaccgaactcgacttttctccagcccgcttcacgcaatcgtgctttaacaaccttcattacagatggagcaatttcatccttatgttcgacaacaatttcataactgcgaataaaatggaagttgttgaaaccaggtaggtcttcaagcatctttctccgaatacccgcacagacttcattggcttgccgttcaaccaacattgcatgaatttcatttttggtcggaatagagcaattgccagtttctatttgaagagttttgattgcattttccaaaagagattttgaaataccaagagtcatcgtatcagttccccgtgagttaaataaattttaatacgcgttttgatggtttattatttaccaatagatacaattacctcttttaatttaccatggtcattaattgccatctgacaagtggggcacggatacgcatccaatggcctgccatcagcaccgacccgcgcaacatagatcctatatccttttcctttggagaggatgatagaacgcaactcactatgcatctcacaacgtagatcagacaatcctgcttttagagaataacgtttctgaacaggatgtgttttaccatacatattttggctttcactaataatcctgccacgcttatcagtaatgactgaataaacacgttgacgatgttttacataagggatctcgcgacacttttccaaagcataatccaacataattgatttacctatttgaaatttagatagttttatcacatttgtaatatactgtttaaaatgctttaaatacaaaaaaataaaatataagccctcccgcaatgggagggcaatataataactattacaatttattcgccattttacctggtactataacccagtgtaaattacatttaatgtgtttatttttaagagacattcctgagatacacacatcctctttggttatgctaattttaaataaagcttcccatttattagctgtgatgatttcatcaacagtgtgatggaatttaagtgtgttatctaatactgaaatataaaagtctttattgggttgacctttagttaaatcaattattaacctattatttaatttaggtgaaaaagttgttaatgtaccatcttcattattttcagatatataagagcaaccagtaacaatgaagacattatcatttacactattggcataaattatttttgggtgtttaaaaatattaattagataaacaataattgctgacaggattagtgcaattactatatcagccattattaacccctattaacaaagataaaataatctcgtagttcaccagctaaatctaatggttgataattatcactaccatcatcataagggatataatcagcacctgcttctacagccgctaaatattcttcctcaccaactgctggaattaaatgaaacgctgggcaatcgtcattattgccatctagtatatctagcatgcctgtaatgacactatctgctacagccctgtcccgatcagctggctctgtaaattgatcaagtttagagttattgatagcattatcacgcatattgacaacactactaataaatagttctttaacttgttcctgtgttacaggtttaacattaccatcgccttcaaaatagatcataattacataccttgttatcagtagcttataaatttattagttcattaacgcattattcgactgatatcatcagctatttgtgattgtatcttttccgctttttctttagctttttctactaacatagcaagttgctcttgcgtaaaattacccgagtaatacttaacaggtttctcacctgctaaactaaggaaatggttcaatagtgcatgtggtcctttgaaaggttccgtaaatgtcttagaaacttgataacgtagattaccagaaatatcaactgcatcacactttgcacggatattatcttttaaattttcaactgggtttactggccaataattctcaccaatacttattaggtagtcaatatcctcttgagtaacattaggtataagtttgaatccgggtatatttggatcattgccatctaggccagctgcgatgctatatataaatccatcaagcatatctctgatagatagtgccttatctgtattttgagtatcggtatactgtttatgccagtaattacgtgtgctttgaagccaatttacaaagagagaagtttgttcctcttttgtatattctctcggatcatctactttctcccattctttttgtttatttatcttaggagtcttagttttctttacaggttgttcaatcggtgaatctgaaacctttgtttcaaatcctataccaactatagttttatcggttgtattgatcatagaacatgaaacctttgtatatagtttggttttatgcgtttagtaaattgcgctgaatgctcaatgtaataaatgcatttatcattaagtgaatacactgtataatagtttttagcacatatatgtcgtatgccaatagtaacacatatttcccaaccgatctttgtaaatacataacctaactgattaggctctatttctaaacatcttttgtcgaagttaaccattgtggcttcctcggaatagttcgcaagtactgaacaataagtcgcgcgaattcatccatatcgtcttcaactagaattaactcatccaatgtataccagccatcatcagttgtttcaattagattagaatcatctttgatttctctatctaagatggcgtataatctagttggtccaaaatcaggctcttctataaccccaagatgtatcaaagaatttctattattagtatcatctgtgatagttggctgaacactaatattggaagtttcctctgggaagttataactatctaaaatagcaaaatcagttaattgtctaatagcctttctagtgaaatcataaaccttcactatgggatgaatcacataggttagtttatcattaactaaacgttgccttaaattaataaatgcgcagttattcatcgacatactcatgtaccattttaatagttttcaaaaatacttcttgattattactatcatctgcttttagaataacaggatgacacataaattcattttccaatgatactcgataatattcattaattgtctgaatgaaatcaagcgggggataaataataatatccttatctgtttcggcgtaattaactacatttggttcatgtttaaatttggatttatttaatttataaacaaagtattttatatcatttttatctacttgtgatacaaatacaattcgttcatacattgataaatcaatatctttaccaatattgatagacagtggcataccaataaatgagcgtttaatattttcattcattttttaattacctatttaatagtttaatgttgtattagtgtaatatagatttcaaaaaaaatttaatgtaaaagccctctcctttgggagagggtttatgactttatttatattttttcttatgagtgtgataaatatagctaaatagcataccgattgacattgatacagctaccatacccacatagaaaagttcattactaagttgcattagatttcctcaaatagtttaatttatcccacctagttttaaccgtccagtcggttaaaaagaggacccgaaggtcctctaattatttcttataactctcagggcatcccattttgagtttgccatcctttgggtcttcagcgaataatacttcatctggacacttcttaacaggagtgtccttcgccttatcttcccattctacaacaggcatttctaatttcttacgaaattgatacgtatcataaagaacatacgtaatcattcccataagagagattacccatacccatgcaacaattaggatgattctagttatcatacaactcctcgccgactatattgaaacacccattactgagtttttcagtcagcatctcaccaagatcacttccctcgctctttgccaaaagcttaagtgcgggatcagtgagattttggtatattacatcgacattatccaatgcgatattaatagcgagtgccttatcactctggtttttatctatggcaatggatagttcatcttgcagtattgcatacatctccaatggctcaccgccattagtgtagaattgaaccatattctttgccaagctgtgcagcacgtagcaagatgacacggttacgggttgtgcattaaccgacattgctaccatagtgataatgagcgagaagacgtatttcatcctattttccttttgaaagtattcgatatgaattaaatgagttcaacaattaccatgtgagtgaatttctcaccaatatgcttcatgcagtaattgccataatacccgctgataaaagctgccagattaggagtagtcacattgtaaccttgactacggatataatcatggatctctttactgttaaggtcattattgattttattaagactattgaatacgaatgttaacgcaatccaattattggtatccaactcatctttgagtttagcagagttgttgagcataagcacaccaacttcatctgcgctatgaccttcactcattcgaaatacagcttgtttagtaatggtttcaaccattgcacacgactgcacagtgagttgagcatcttttttaccaatcttgatttcagccattgcggtattgaacatgataccggtaatggcaatgagaccagcgaaagctgctgcaattacatttttcattttaaatccttcttcatttatttaatggtaagaatagtaattttttcaggatttactggaactttaattttagatttatgttggagaaactcaacaaccaccatagacttatccattttatacacttcacatactttgacaagcctatctactacgcaaccaattttaccggcattttgagaaaagaaagattttgcttttctaatagcctcgcgtttctcaagcatttccatatgcatattttcaatatgtttatcgcgttgaacacgattaaacttacgcatatgtcgttcgatcttactaatttcagaagagtgtaatgaataagcagcagcttctttcagtttctcatatacttccactgccattaccacgtgatcatcttcaaaatttcttttcatatctatgccttttttactgtttgattaaatttgacactgcttcttgtttacattgagtattcatccataatgcaatgtctttgggttcttgtccagtttccaccatatcgataatgatacgggtattacgttgtgctttctcacgggcatttaacatatcaggatcattaataatgaattccctacccataactggatctaatccaatataagctttagatgcaatagttctcaccattgcttcatattggtcacatccacgttcagttaatacaaggttatctgcattggcactaccgccaaatatcaaacctaggaatccatagaaaaaagtgtgacgtattgtcttccaacaaatacgcatctcttcattttttgtataaagcttttcccaatcaaacattaaatagaaactttctttttggatagaagggtgtaaccaaataggtttaatacttacttcaagaagtttactatttggattcttaccgataaagataacttcaacaatggctcgtgctaaagcatctttttctttaccattccatccaaattttatttcatcagccgtaatgtaaagacgtattccatcacccacgtatttgggtaaccaaacagctttacctagttgcactggaacatcattagggattcccccaaccatccaggtggccttggtgaaatgaatagcaacatcatcattcaaccattttagaatagctggccttacccaactatctaccaaattaccacatgtcaatgcagctagcatagccatgagcataatgacaatatagatactaatcatagtctactccaagttaaatttagtaccaattgcttcaacacaattttcagctaacctatctaggatagctccattggtaaatccttttcgtttatttactcgaatatcaactaagtttaacttggcatataccgcacctgcatagaactccaagtcatccatatccttacgagagatcatgtctaactgcatcattatctcaaattgggataggttcttatcataaagctcagttgctttttgtgaaagatttactgccacattacatgatttcttagtaatacccacttctacagcgtgggcaggctgacatgcaatggacaggattggcaggaaaaggaataatagccaattcttaagcatgttgtacctccattattttagagtaagtggttttgcttcaaacgcacctgccgctacacaacgctggaaataaccattaatgatgaatttctcaggagtggtcttatagactttagcagcatttgttgcacgtggcaaacttgcctcaattgccattttatctaccttagaccataggtaaaatagaccagtgagttcttcaactttagactggttgatctttagatctttagtgttattaaggatataatgaatcctttcataagtcttcatttgcacttcagttacagatgcaccttttacaaacaattcatctgcctgttttacaaactcgatgcatgaatcacgattagtgtacatgacagccgagttagcagtgatagttacaatagacaacataaatgcaattacatatttcataatgaattacctcaaaattaattttattaactattggtttcaccacgagtattgaattctaaatccaatacaactttagtaaattcttccagtgcaccaccctcgtagatgagtgggtcactgtcaccccggtacatgctacctaccggtacttgaccacgaaacaccatcagcatatcgttttttactatgacatgatgttcatccccgacagcaatgtcttggatgtgtctccagcgttcacgcagtaagctgcaagcgcaccatacggatttcaaacgttcagtcattgtattgccctcttggttattaaattcatatttgtaatatagctttttaaatagtttaaatacaaaaaaagataaataaaaccctccccgaagggagggtgtatattaagtaattattttaacatacaatttcattatcagaaaatagtttattatattcttttagtgcatccccaccaaccatagtacacctgccatagagaacagatatagccagatctttaatagcggggtgacaattatttaacttactgattagttgagctttctcagtcagatacagttcagcaaaatcaggcttatcattaacaatcgaccacatgtttgaaatggaatctagtaacttaagagattgaccactccatgaaatgcgagaaagtctttcatgttgtaaactaatcctagttttacgattaccttcgtaagttacatttgttagttcagttactaaattaacaacagggattgagaatagtttagttagatcagaagcagttacagcagtatcctcaattacatcatgtaaccatgctgctttataagcagcgtgagataggtcgaataattgcgccatctcagctacttgtaataaatgatgccagtaaggttttcctgaaccatctcgcaattgaccaacagcagtatgtgccgcaatggcatatgatgcagccattgcattacccgcattggaatatttgccattacctagatggttagttaagagaatattctctttccctccttctagaatatcgataatttcattcattagcatagctatattcctatttaaattattggaaacctaatataggtcttcactaaataaatatttagttactaatctattttctaattcagctcgatataactgattattattcttagcgataattactgcttcttccctagagtggaagttttcatactgatcaataaaaccttgttcatgatcatctcctgcatattcatgcaataccttaagaccaccatacattagctgttgttgagtcattatgattgatgaatgcctcgctgcaatgaaataaacatccttccatctattgcaggcggcaactatccttaatttcacatcgggatgttgttcccaccaccatagaccagtttcctcattccaatacctttctttcatttgagtttttctaaactcaccttgtatgtctaaaagtctaaatgcctcttctttagacatagcttgtagaataggatacttatccatttaatacagatacctaattgcgaaatagaaagagccccgaagggctcttattatacaagtagcttttcaatagtgaagcttgtccagaccattgccctataaccaacactctcttcagtataagtgatatcatcaaacttattaggtggcatgaaaccacgttgtgtactagcatcagtcacaacaagattagaatcttttaaagtttcatttagagccttaagtttatccttactaattgatcccttaacatggaacttgaaataagcatatcctttatgattgatacgacaactgtcaagaacagtttgtttatcattcatttggctcatcagatcactaataactgcatcatcttcaggagtatcgtcattgacaatattgattaattcaatataagttggcattctttttgtttccttaattagattgactacataagataattttttaattaatattctattaaatttttaataggagcccactgtgattaaatgagataatacagttatgtcccatcatggcaatatgataagatattatattatcacgtgtatcatttgaaatcttgttcaccttaaattcattcatgatcgcattatgaatggctaagtctttttctcgatactgctttgagaaaaacataatatcattatgattaatattgatagtatccattgtattaagaaaatcttcaacatcaaactttttaatagtttcagattttccaacacaacgctcggttttatcaattaatgaaaaaccaatagtcctaattggttcatccttattatggaagctataattggtaatactcatacctaccaatagtccatttttatctacattaactactttagaatcagtgtacttataaatatcattgattgcataaccagctgaatataatacatctttaaaatgactagttactttatcaataataaagttttgataatctgattgatatagtttatcactatattcaagctttttgataatatcacttagttcatgatacacattggtaaaactattcgaaaaataattatcttttattcctaacctagttaacagatctagctggatttcttttttagatagcttcgtagaattactaagtttttcaatgacggatgtaatcgtacgtagatcaattgctagtgaaagtgatttaaagatattattaattggtgtatcagatagctttgaaatagctattagtagattatctaattcatcattagtaattttcagttctttcacaatgtcattatattcaattagtttaccatcaataatattacagattagaagtttatgtaattctttaatattggtattaacttgtagattattcatttttttaccttttagttaatttaaaatttatttacagttctaagaaaatattcagatggatcgtcgaagaagacaatactatcaacaacactattttgtcgagtacaccttactttgataagattatattctctgaatttattaagaccccaagcttctttagcacgatggcgtaatccactaccaacaatagccccatacctagtttgttcaacaaataaataaacatcccagccatgatgattatcatggtattttgcgtagtatttattgtctttagttttgtttaaactaagactatacctttctgtctgtagttgattaatattcgatttaatcatttcatttaatttgggttccactatatgaatgacatcgccagcagtagtggccattacctttagtttgtgatgcacgttcgtaagaacgtcctcccaaatgttagtaactacgtccatctattaaaacctcgacaaattaatttgattttgtaatacacacatgtaatatatatctcaaataaaatttagtgcaatagccctccccgaagggagggccatatgctcttattatcgattaactacacgataattatcaatgataaactcgatgtactgctcgacatcatgtaagaagcagttgtaactataccgatcaagtttatttaaagcttcagttagaactggttcgatatagatatttatttcagctattgatggaatctcaacatacttgttttcatattcggtaagctgctcctttaccttagccatttgctttttgtaaatgtattccatcgaccattctttataaatggagcgtgccccatcaaagagatggtaaccaaatgcgatgccacctagtaccagaacaccagtggaaatagttgacacattcatgatatatctccttttttcaagattgaattcatattagtaatatactgtttaaatatgtttgaatacaaaaaaaacacaatataaaggcctccccgaagggaggcctttatggtaactttgtaaaagacttattatagttgaaagtctttatcttcttcaatgatttcataacctggtaaattaactatatttttatttaaacggactcgttcatctactaggtatttaactactttaagtaattgacttatcgacaggtcattattttcatcagtatctgatttaaaaatacgaccactggtaggtgaagcattcgtaaaacaaataccttcattatctttataaatatcataataccatacgacatatggattattggtattacttatgacaaatactaaaaacagatcttcatcatcaccttgaccactcaggatcccgatattttttcgatgcgttataccacctgtaataactaggccgttgacatcatcactgaatttaaatatatcatacccaccttcaagtttaccattttcaaaatactgtaatagcgcaccacctactacagcaccccatgaaaagaagttatctttatttaaatgctcaaccatcttaaaaatcctctttaggttcagtgatccgagaataaagaacaaacatatcagttaggatatttctatctagaatggtacgtgtaagtaagattccatattgaaatatacctgtagtatacaaattataaaacaacataaaaagagagaggataaattcctctctctttatgcaactaaatagttttattctttttgcttttctttagcttcacgtttagctttgagttctgcattattaagccgccaagcagcttgcatagtagctagattgacaaacttaggctgttgcttatttttaactttcatttgctaattccaaatttatttcaaatggttaatctaaactattaaattgcttcatattcttcatgcataatttaatcctcagtcagcgtagtataatctacataaagatcattgagttgctcttttaatgaaatatttatttttaattcattaagagtaatcctattccaatgtttacgcggattaccacatagcatacaacgagacctaccgcagttaaacggattatgtttacgccatttacctttagcctttgctgaaggattagtgtcattataaagactcgcggctagtgaaacataataattaactatacgagtattgtgatgacgattaagttgtacagttagtttgttgcttgacatatttatactccaccttaatacccctaccccaatatggagtagggtaaagtatgtagtagagtaaattgaatacattaacttttaacattctaaacttcattaattttccacaatatcctggatggtaagtagacgttcacgcatcgtcagtaagaaattacgataaggttcaccggcgtccaaaaaaggtggcatgtttaacctattagtaacctcttctagaaattctttatacttataaagattaatagtgaatttattacaatctggatcagtagtagttgggataatataattacgaataaggtagtaaatatgaaaactgctaccatattcaattaaagtataaggattattatcaatgaatttctgtgcttctttttctcttaaggcgaaatcttctcgttcaacgatttcatgaagtagtggtcctaagaactgcattggaatcacaccatacgttttagtgaacttcttaatatccttatatattacttctggattaggatatacctcacgagtccgaccaatatttttaactagatatagtttttcttttactaagatattttcgatgcatagttcatctttaaatagcataaaatattttccttttaataagatggtattaaacttttttctttattgactaatattttcttcgttcggtaccctgtagtttcgcgaatgtgtcgatcttgtactggtcaacaaaatgccaggctagatcggtaagtgcatagatgtccggacgttcgtatttaccgaagtctggtttctcacgactcaattgaaaatcgatgaactgatctaatatagggcaacgatctatcagatcctgttcagtagccccaaccttatcattaaccagttcttggatacgtttataaaggataggatctgttagaagaggcagtagatcatggaataccatcggtggatgttccagactttcacggacccacattgcagccaacagaggacgaagagaatagaagtatttcttcatccggaccttctcatctgacaaccaacgcattttggtttgtttggccatcgagatataatgcatgtaactcgattcagggatgaagtgctttagcgcagcatcacggattaacttgtagtcccgatcaaccttacggtaaacgattggggagtttagccattccaagagagtggggttagacttgtaagcaagttgaagagtcttagtgatactccaaccagccaggtctagttctttagacaccatctcttcaatagtatcacgtgcttcattatccacacgaacataatgactcggatggttaatgtaaatgaaacgaacgtcatagtcactattggttgaagcaaagccccatccacgactaccggactcacaggcatagataacctttacaccatatttcttttcgatgcgattaagttcagcatcgatgattgcgcgcatctcatcgctaactggatgtcgtggatcaatcatgtggtcaccttaatcattcgaaatttctcttctttaccgatatccagatacatgaacatcgaatttctccaagggaaataaagcctccccgaagggaggcatttatgttagacagcaactttgccagcaatgtgtggatgatattcgtagttctcgataacaaaatcatctacaccaatttcccgaatatctttaccaatagcttcttctttaaaacgaatggtaggtagaaccttcggttcacgagttaattgaagatcggtttgttcttggtggttagagtaaatatgtacatcaccaccagtccagataaactcttcagctaccatattcatttggttagctaacatatgggtcagcagactgtagaacgtgatattaaagggttttcctaagaaagtatcgacgctctcttatgttcacccagggtcgttaatcctgagccgtttacttaaatgactttataaccagaatactttggattcttgctgttaattcggtatgttattgtaccctgtgatactccgagagccttagctgcatcggcctgggataaataaacaacaccgtccacttcaagtttgtttgagttagttggctttataccgcgtttgttatccgtcaacttttttctggtttcttcggaatgtgttttaccgtagaatggattacgttcgcctgttctctgagaagctatctccgacatcctggctcttgtctcatcactagctttaatgccaagacggtaagtgttacccgtgtgtaactcggatagagctaccttaacttcttctgtgtgagtacgaccatacatcccattctgctcacctagtcgaccatacttttcctgacgagcctcggctccaatctcatcaagtctgatacgtattgtatcactccgcttctcgatgatttgttctttgaggttatgcctggttaagttatcaccacccttggagtgtctaccaatattaagaaggttaccttcttcttcatgcttggttatccacatctgttcgagtgtaaatgctgattcccgactttcacaacgatagtactttaacgagaatctttcaccgttatcgtattcttgttgtaatgggtagttatggtgcttggaattactaaggtctctgaaatgtcgttgaacgcgcttaactaaatctcgcgcacttccgacatatacctttccttctttggtgaataggcaatacacataagctacgtcattaataacaccctccttatctggcggagtcattaagtaaaccgctgcatgtctccatgcaggacagactatatcacgatctcttaaaaagagacccctaccttttcggaccacttggtcctactctactcccttcctcttctcagagtggtttcgatagtcgttaggcatttatgaccgtagtcaatttagcacgggattgtctcatagagagtttccccgtttagataggttattcgactaggattgctcctagaaggcgctagtatttaacgctggtagagttggcaactcaatgcacgtttaggaacaccaagtttatcccacagtgcgtgatcagtttccggttgcgcaccttcaaggaaaatacgttgagcttcggtgtcattaagttgggcccagtcataccgttcttctaacgtcagttcacgagtccagaactggaaaaagctatggcacggtgggagtgactgttcatcgacaagttgtggtgcccatgcacaaacgatgatccgacgagaatcagggttagtcttaagttgattaatcacgtcttgaatctgatcgatacgtctagtaacaacacaccgatcattctccatgcaagtacctggaatatcaactacgaagtcaaagccacgtgcctcgtaatcaacccactcgtgttttgggatcacacgagtatcttcaagatcacgccaagtcttaccgtaaacagcacctagatcgccgccgaccaggcgtgctggttctttatgcgtcaaagcacgatacagccgtttgttatattcagtatgaataccttcaggatttttggcttcatcgaatccttcagtagcgagcctattccacgacttttcactaactccaatgacgtattggatttcctcacggttaactggatgttcatcccagaaagcctgaatagtctctggggccatacccgactcgaactccactacagtctcgatgattggagtagagtcatcgttcatgcaatggacgtacattacgaatggggcaccaatgagggtagttactgctttgagaacggcctcatcagtcatcggcgcatataacgcggtatttggtttaacccattcattccaaatgcgtacaccattttcaattaaataatctacacgagtatcaccagaaagcatccagaataattcatggataacggatggaagatgaattttcttagtggttactacgggtagaacgttgttacgtaaactataacgttcttgttgaccaaacatgctttgggtgccagtaccagtacgatcacctttatgtacaccgagttctttaactaaacgaattgaattaagatattgttccattacttgatccttggattgtccactagtccacagttgaaccagagatgcttatcatggcggcgatcatcactaatagacatgatcgtacccttaccatctttaaagttaataatcaatgctcgaactcggccattggcaagagcattgaaaattttgtacgaccttacactgaatgcgattctttcatcaagacgatccatactttattcctctagtcttactgataatcacagatcaacctctattcgtttgtatttgatttcaaccggaatacctaattcattttttacaagattaaatgagttttttgatggagtgtatgtagcaactataacggcttgactatcagctacagctacgtctcgccattccatgtgcatgttatcgaaatcatctttacccatgatcaagtaataagacgtatcattatgcgtaatggtattttcaaacggtctaattacaaaagcacttaaactagacggtatacggtgtcctacttgttcaagtgtaactgtatacataaaacctcctagacggtatacgggagtcccgaaggactccctaagcgcaactaaccaatcggctagtatcttacctatattattagtctatcagaagtatttttattatagaccaatacgagtcaaaatttcagcccaacctttctctttggcatatcgcaataggctattttcaatatgggtttcactatagacaataggttcatggccaccttgcacatgatacattgttaatggttccaccacatgttgactagaccaagcatcgtataaacgatcattgattttaatcaccacatataccatcaatttatcgtcgatgtcaagatcaatacctgctacaaatgcattaacattggaacgcacttggtcagcagttagttgcacttgcaacccgccatgtacttcaaattcgatattacagatattcttatttaaccaagtatacactgcctgattagcatatgtctcaattggatcactactacgtaaatctaataatggtccatatgtttctaatgatgagacactggtatcaactaggtcattcaatgagtattcggtactagaacaactatctaaaacacagatagtgttatcctcgatatggataggtaataccttgaataccacattagcaacattaggtaatgacgtatctggttcagaactattgaatggagtataaaataatcgatcagccacttcagtatcaatagttgatacatccattggaatgaatccattaagatcttgtttgattacgtcattgtgtccaattccagaaaaagataaatacattttctcagacatatccgtacctatttatttacacagattagagtatgttctactttactggtactagaagaaaaataacgtaatagaacaccatcgctgatttttacagtctctacattattacgaatagcacttgctttagctagtttttgaatacgctcaatcgcgctaaaacaagtagtcatgtcagagaactcagtggttgactgcgatgcaccattggcttgataaccagcgatactgatactactaaaaagaattgctaaagttgcattcatttcttaccacctttaataacagtgagttttggtggaccagtaggacgagaaggtttattaataataatctgcgaattggaagaattattgaaatcctcaaccatcttatttacatcattgtcaaatgaattagatgtattatcacccgagtccacagttgattcactaaccacatttgaaatagggtaactgaggagttccatcataagtacattgatgttatcctgatagttttcattacgtgtacaattaataacccgctcacaccaatccataattaattctggtgcattctgtttaattgcagttaccgctactctaatatgtgcatctaattctggattactaaattcagttactctgttaatggcgctttcaatcatctgatcatgctcattctcagatgtattccttacaactaacttaccattagtggtatcggctttatttttaaaattaacctcagtgacattacctacggtagttaatactgggtttttgtcaactacattattaacagttccttctaatgttgcacgaatagtatctgcattgagatatctatctactagcggcatttcaaagaatgcgttagaattatcatcaataggtgtaactacacccaatactgcataaagaggaagtttaatactgaccccaactccatttactgttacattgaaagagatatattcgtcactgatataaaaattctttgcacagcgtggatggatattgaaagtgatagtgtgatcttctttcgcatgctttagagctacctcagataaatcaggtactaattgagtatgtgctacaattagaatatctctgaagttattctcaagaaaccaatcataggtagctcgaagaatatggccagtaagtaatgattttacctttagcatatttgtattacctttaaataaattataggaagatatcttctactgagggcactatattcttttcttttacaagttcagtagatttggtataatgtgcattaaatagtttctttaaatctgctttttcatattttacagtatctgctaatttccaaatagtaagacctagatgaatactaactgaattaacatgttttacgcatagatcaattaatttgttaaactcttctaattcatttttaatcaacgatgcatctaaagcctggtgcaaacgattagataatttaactttatctttgtcaattgtaaagttattttcaatatccttagcactcatcggtggttcaactttataccacacattggttagtttaccgtccacacgcgtcgtgatgggatgtttataatcagtccaacttctatgtagattatgtttatcatcaagaacatctacagtaactttctcattacctgtaaagaatggatacattaggttgcctttattttatcaatgagtaattttaatagttcatcattagttaaattgtctttatttttaataatgtcttttagtttaaacatattgaaagtataccacaaccacttatgaattatataacaaatcactataactaataatagtagtgaatgtaatgctagcattataactacctattttgatatgacttgaccaaatatgtaatatagatttcaaaaaaaatttaatgcaataaaggagagctaaatagctctcctatttatgcttatttatttttctttcttgacttatctttaataactaagtctaatgcttcaaacattttaacagcagttaaatggtcgatagagtatgcctttttacgtaaacgtccaatagctactgtatactggtattcagataaaccatcactcatattgtcaataattgatagtgcttctttataaagcctgttacactttatcgtgtgtttgatggcataataaccccagttaattaaagccatcattataatcagaaacaaaatacctataattactgtcatgatatcattcatttgctgtttccctattattacattttaatataatcaatgagttgatatcgtaaataaaagatgtaaaaatatgttgatttgttattttagatgattctttatctataatgtcttggacagcattttgatagaaaaaataacttatgccattgggcattttatctaatacatatctaaccttataaacacccatccagtgaatataatgattttttatattaataatgaaagttacacatgttgatatagccgttagtgttatcattgatataacaaatactttatacatttgcaacccacagattctcatctagatgaaataaaccagccccgaagggctggtatttattttacaaccacagctttaccgtagttgttatccatacaggttttaaatgatgtaacgtatgcatcacgtgggctttgtctacgtgaatacacaacgtgcacctctttaattgctgctgggagaacattgtaaagaacgttatctttgttcttcacgccgtacccttttagggatcgtaggttttcttcccattgtaaaatgggtgttttacgctgacgtgcttctgctgtggcatgtgctataagtgcaacaccattacagtaattctcgtcaactaccaacgatgcagctagtgggtttgatacgtataacaacgtacttaatacggccactaacttcattacgtgtgttaaacattgcatcacgttgtacctaggttgctaagatcagaatataaagctactaaaatagccttaaatcattctacaaccttaacgttaccatcttcaataactagatctttacctacaacatcggcaagatctaacttatcctttacttccagtttcttgatactgtgtacaaaacggaatacagatagacgaagaattagttcttctggtacatcaacaacatcaataaagtattctgatgggttgatatcacaattgacatattcccaactttgtcttagttcagtttcattctcagttacttgtgcatcaagaacttcttcaaagttaatattggcaatattagtatcattatcattcagataagtaaattgaagactagcattattaatgaattcttcttcaactacagttagtgcacgttgagcgtgaatgggtagatgatatcgaatacacccattaataataacctcatttgccttttcaatataacgttcttctttgaattttacattagatacgacgtaatctaggattgccttgtaatattctttatgatctgggtggctcttttcaatccactgtcggctacttacgctaatttttttctcggctagaaaatctcggaatttagcacgatcgatataagcggtacgttttttcatcagtagttcctattatttaacatttctaggtgttagttcgatatgtgaacagatcacataagatgcacatgccagtacatctaaaccataatactcatcataatggaaatatcctctgagattaccttgtttagtaaaggtgtattcatcagctaaatctaactcgttacttgtctctagcacattgattaatttatcatattcaacttttagtgctatatcagtacagattatttgcttgatatatttatcagagtttggatcatttttataatctaaagtatcagttaatacagtggttaatgctagaataacatagtcatggtaactttccggttgtttaatctcaccttcaggtatttcaatccattcccaaccatgtcgtaatatatttagcattacatgccacttactggcttcattactaaccacagctattggtgaatcactataaggtttatacaaacctgttgtttttaaaagatcttttttaatagcagctatatataacgggcggttttctgacatttttataactcacatatatttcaaatgtttgccaattggtttattagggttattcatataaccacgacctgctgctgccctaattactactttctgtatatctgttaattttctataattatcaccaattaatttaagtatgatactttctatagaatcattagttaattcagaaggatctgttactttgaaataattatatactaattctcttttaactagaaaatcagctctttgtttttctttaattcgtttataacgttgagatacatggataaatgaaaataaaacaactatccagaataaggtcaaaagtaggtactcataatctacattcatttttaatccctatctttttttcaaattatcttgtaactcaactagtgttctgtttaataaactaatttgtttctgttgttcacatacaagttcacttaacgtattaatctgcgcctgtagttctttagtattagtatcaataacatcaagaatatattctttatttttcttaggcattctttgcttcctcaacgttaattcaccgaacggcagaaaagatgactgggcagccaacactcttttagaatgtcttacgaagtttaattggtataagcattaaataatatctcttgatgcccatgtaccatctacagagtcatttacaaatggtgcacgatcaccaggtattacttgagcccataaatccacctcaagtaatatccgacgacatgtataaaaaggctctacttctaccctgtatgaattatctttaggatcaatatacacagtagcaactagcttaggctgggctcttcgccatttatcccatactttaagaattacttcgccttccattctggctatacgtggagttatctttacctcactaatgattagcccatctggacctaccactcgtttaggggatagccatttatgataaccaatatcattaatcccattctttgaaaataccgagtcttcaagatatcctctcacaccagggtataacggaaccattgtaagcatatgacacctatagtgatccattggatgcccataaaactgaataaggattttgagttaattggaatctaattgcaaagttttcgatttcccaaaaacgatcagtcttattccactctaattcctttttcgccagatcaacattaattgttgatataatacgattacgctcttcttcaaatacagtaaacctgacgattgctggaaataagcaatctctttctttataaaagtttaaagtattcttatcgatataacctggtcctggaataatttcaaggatattaaaatcagtccatcctaagtctggtgtacctagatcaggtaaatgttttaaaaccccattgcgtataaagggttttccatattctagtgtgacttcatgaaaagaagaaccatagattttcatacaaccaccatgcgttttaattcatagggttagtatgtttagtactgtttgaattttatttcattacagacgatcgctttgttatgcctggtgtttgaatattttagactagtttcaataaatgctttctttttcatatatacacttacgcaaaataaatagggactctcattaagagtcccttaatattaaacgaataataactccagtactaatactggaaatttatgccgatattgtggatgtacatacgtatgaaatttatgtgtgcctaaatggaattcaacgtacagtacaataaaatctttagctgcatttcgatcatgtacgtaaacagtgagtatttcaccatcatcatctttcttacgtccataatcaaaatagtaatttttgttatcagctatcccttcagcatttaattgaatgcctcttacatcgacaacatttaaactagaatcttcatcaaataaagatctagtactaccatggtaaaccattaatggatctaattgaatctgcatgtgttagtcctctactatgtagtgaggcacatgcctcacttatattgttttaattttcatattaatgatcaattaaagttaacagtgctataagctttgcctaaagctgtaaatagttcttcattaagttcatcaaattctaaccaaccattcatttcacctaagatagttttaacaatcgtaagattaacaatctcagagctaggaatgatatctcgaattcgctcatggaaattaactacttgttgaatacttactttagtatcattgactgagatatcatcatcagttaacttattaatagccatcatcgctatacgtgagaatagatcagtatgttcttccttaacaatttcccatgctgcattaaaggagtcaagaacatctagatcatcagaatttagttgcttttgcattttaacctcttaaacattataacacatataccccacaacataagtcatggagtatatgcctcgaagggtacgtaatagaaatactactacatagtattgtatttactcattaataacagatactttgttattctcagctttacttttagccgatagcgctaaatagagacaactataccaagtgaagtagtctcttgggaaatagccctttaaaaaagtagccatatttttagcacacgctttattaatattcttattaatgattttcctctcattcattattttacaagctaacaatgaataatgtagttgattattagtacttaggtcttcaaggaatagttctttcactgcttgtggcttagaacttagacacattataatttcttgaacaatatagtcattcgtcactgaatgaataagttcaagatagagtgaaagattaatcgaatacagatcttgtttattattgaaaatgtatccatttctatctaatgtaactaatttcttatatgtgggtgacatcttttcattaactattttataaaaaagactaatcactaatttaatcattttaataaacttccatctactctataaaaaccatggacatcacgtttaccatttagactaggtatctcatatggatcagttgatggatttatcagtttgattttgcatttatctaaacgatcacgcaagctgatattaccagataatgttaaaccacgatactgaatatcgacattatctaaatcaacaatgagcgtactaagctccccatttgttaagtatggtaccacaaccgagtcaattacttttgcaattgttttagcttcaatatgtatccagtttccaatatgattaacaatctctggaaacttatctagatttaatgtgatgctatagtcacacctaattttgataattccattacttgaccaataatgcattgcactattgatgccacctagatgattctccataggtgtgaactttagccgtccattgaaatctataagcacttttgagttatcacacgcatcaactattcttgaccgatacataaacatattaagtagttttctattgatggccacagttgtaccattagttagttcaactacgacgatatcaccatctgcttcataagactctacaattagagttattgggttactatcaaatttggaattatcagataacccatccatcacaatcttgtaattactattaactgatttaacttgatctattaaagatggatcaatgaaatccttagtgagtgattttgatgtgaaaattacagccacatttagatcactattgattggtgtatttaaaggtaagtattgttcattagaaaaatagaataatttaagatcttctatatcagttagattaataatatctaatgaattattagttactttatacatgaatgaatcaaaattttgttcaacaaaataaatcatccatgtcttagtttctttggtataataaccccatgctaaacttcgatcatgtaatttaccagatagcattcctgtgaagtaacctgacaaaatatcaattttatcaacatctacattttctctgatgtatttatcatttagatcagctatcttttgttctaatgtatctaccttttttggtttgttaaaactatcaataacattttttaagtacttaaacataatcataaattaccttttgagtataaacacggaataaaagcggtgtacacaccgcttattgttcaaatttgattttgatatatccaccaccaacattaggctgcttaggtcttagccatcctagattaagatccatattcaaaacaaacgtatacgctgttactccattttcatcatcaacactaatggagtgccatccatcatgattttgatctttaagagaatggattttgggatatagttgattatgattcaaatcaaatactgtaacatctccaattgatctaattggataaccgcgagatcctaaatgatgggctcctctgcggtccagtgaaataatagcttcgttcacgataattacctcatgtagatgtttccattagtatatgctaatctataatgtagatctcaaataaaatttagtgcaatagccctccccgaagggagggctttatgacaacattaccgcttactcattatcgcaactagttcaactttaaataatgcttcttcgactttacgagaaatagcatttatttgaacacgtttattattttcacgatctaatgcaattgtattttttcgtgtacaataatcgtgtaaacccagttgtcgcctaacatagaaaataacaattaatttcaaaacacgaatatatctcataacgcgcttgaacattttataaatcctcaataatttaaggaattgcttttaaagcttcttcgcgttcagctaaaagcttatcatattgtatttgtaatcggttaatttccgcacgagttaattttgtcttagcattaggtttcaacttatggttaatatcaacggtaataccatggtacctaaatagagcttccattttggctattttcttttcaatatcatccatagctaaaatccaaaaaaataataatgactaaggggaccagaaggtcccctatatcgttaggcagtaatagcgcggcggaagactgaatcaaactcttcctggtatgctttaatcagctttgcagtttcttcacaaatggtattattaccataaaatgcatctgcaaaagattcttgcttacgtacttcacaaccgaatagctcaagaccattttttgctagctcaactttgaacttagctaattcggtcataccaattggtttggcccgcccttcttcgataccattttcttttagtttaatattatcacatacactgcaatgacgaacatctttttgtttgttcttacggaagttaggacttgatttagtttgttttgcagcaatgtccataaaggtttccctagaatttttacgaaccgcagcttcatgattctttttagctcgatttttctgtttcttctgaaccggcttcggctgtacacccagcattgaaccaagttcactccaggaagaaatagtattgcgtgacatgtattagaatctcctatatatgttgattatatcacatttgtgatatactgtttaaaatggttcgaatatatgaaccactatgatggtcaatcatagatagaatggttcatgaataacaacccgataacgagtgttatattggttaattggaaacatatgaacaatcttaaaatgcagttcagaaaccaaattaaagaattcagcacgcatgttatcagttgaaatatcaaatgagattgtatcattaactgcacaaagttctaaatcagatgcctttgtaatttcagttaaccgactgacaaacttttcttggttaggactaagcattattaaagtctcgctgttgtgataccaatttgattttgatatttaccattacgttttgcataactaacttcacatggggcatcacctctaaagaacataaactgggcaatacccatatcagcataaatttttagaggtagtgtagtgcagtttgcaatctcaataacgacttgtcctttgaaacctggttcaataggagtgacattaacaattgcacctagtcgtgcataggttgacttacctgtgcaaatagctaggacatcatctggaatattaaatgattctacagtatgaccaagaatataactgttaggtggaataatacaataatcaccagtccaatctactaagaatccatcactaggatctaatgggtcaataactgcacttgttacattagaaaagatcttaaaattacgggctagcctcacatcgtacccatatgaactaagcccataactaataatctttttaccatctttttcacggacctgatgaccaatgaaatccgtaatcattggttcacgacctttagataagtcagtgattgttttatcagatagaatagccatttttaacttttcctgttaagtaatcatccccagaatcgggcgatgaagtgaacacactccatctttttagtttcttccaggaacttgaaataaccatcatccacaccattgctcaaaaatagctggcgataggttttttccgaaatgacttcaccattaacatcttgatcgaacatcgttggcttctgatcataatcgaagttccagaggtcttccatattgaagatcattgtcagtgggtaccaaccatcttcactataataggcatatggtgttagattgtcctgtttggaattgacaatttgtgaaaggcgtccttcaaagttgttccatactggatgcgagtcatcactgacgagtgtaccaaatccacagcctttaagggtcggtcgacagaatcggttggtatactcgttattatcggttaaccaatcccaaagataatagcaacggctaaagttaagagcctcgcatgtatgcatgtcaatgaatttaagcacacgtgcaccatctgagacacgtgtagaacgtttggtaactacagggaaaacatcaatacccattttaatcatccagttaacagaatttttcttgaccagggattttaccgtccataatctctagtacccaacggccagtcatcaactcacgtgcaacatcacatgccacgccgccaatcttctcagctactttgtctaacagaattggatgatagttgtgatcacccattactgcgaacttgctttcccgttctatttcagcaagtaaatcagtgtcaacccattcaacacgcccatctggatagacgatattaagaccataccacttacaatagttttcgatggttacaactggaatgtcataaacacctttaaaacacagcggtaatttacgatctgagtaatgaatacgttcagtcatttgccattcaccaattcaaaataatttttcagtagattttcagttattggacgagtatgttctttaatcgataattccttactgtccatttcaatttcatattcagaaatttgaaattgcttatgtggcactgaaccatctaacataatgaccacatctgctaaggcttgatccactgcacattgcaacaaattattaacttgttgattatcagtaagtgagtaatcattgatggctttattacgaatgtcgtatagccttttacttaaaggagtgttacgttcaatatgttctgttcgccactcttctaaaatctgatctgtacttagtttggataatgaagatccgtcaagtttcttcctaacttcattttctgaaaatggtttatcatgccagaattgatgatcttgtttcatagtaaatccttttttataatttagaaataggttttaataccgtatctttttcattaaatggattataaactttatgtggattaatcatctttagttgctcattctttctttctaaataagcatccgatggtttaattgttttagttttccaaaagtcatcgattggttttaacttatccatttctgactgttcgttatcaaaaggagtttcccgatttcttagtcgggtcgaattgaataggagtcgtaaactcccgtcgtaattcctcatctaaattcttctcttgaattaatttaggaaaatgttttctaactgttttaattgaagctattaaattggaataggctttttctatggacatttttataactcaaaatacattataaagacagtggctaaaaccactgtctaattatttcccataatgatccacctataactgcacttagaaaaagcattttgaatatgggtggttcttcttgttcatgttgcatatctgatttattattttcgctagccattttcttttactctaatgcccaccatattctctaattttctcaccatcccaaaactcataaccagtcatattgtgattaaatggctttattttagtaaacccactacgataaatccagaaatgaccagtgcctctttttaagcggcacttatacatttcttttttctcatattccgtgggagggctaatttctagaacttcaagttcatcaccccgtatacagaatagcgctggtggatgctcacaggatgctttcataccgagaacacctgttgaccaaactgtatcacctggcttaataacagtgatgtcatttgatataggtattacaggaattgcacacatattagatgctccagagtaattacctccaaagagcaaacactgatatattcatagtctgctctttagtaatatttaagaagttggaatactcatactggagataaactaatgtccatttatactaatctcattgtgtataataattctttttgagattatccatatcgtaagaatcatgtttgaactcaaacttcttagctatctcactcgaaaaagcttgtttacgtttttcttcttgttcacggatatcgtaaggaccattctctttaacaagatattttttatacggcccagttccttggatatatccatcaggaataatggttgtgagatatttagcctctaccaaccggatgcaccgtccataaccaacttcattggcatgacgaacttggattagttgtctattcttggcaatacgttcagatatgcatgggaagtaaaccggatcatctccttttttacagttacccatatcaacctttgcgtacagaatttttctatgattggcttcgaagaaagcccgagcttcacgaatacgttgggaccgaatagcttccttagttctgacattctttagatgtgcaggttgtaaaaaaggattcatctttcgcacgtgacgttggataagttttgtcgtgtaatgaggtgaatcattagccatagccagtaggctattgtacatctcaatcgacatgattacttgctgcgggtcattattgcgctgcatgctgatctccgtatgtgaaataatgctttactttaaggtcatcaggattataaataacacgttggaattcatgtttcttcgctagtttaaaagcagcttacttttccttagaaacctacacgacttgctttgcgtgggctactgcaagaactagtattcaatgcttcagctaaagtaagattattaccgacaaactcaactggatctagaccattagctaaacgagctgcaatcgcttgttcagcagtaagtgttttgaaggtaagaatatcgaaagcacggccaggtcgaactaaagcttcatcaacatcacgaagagtcggaagattagtagaaatgataatcttggtcttagtagatactagaccagctgtagcatttaatagccctgacatattactattaccatctacacgtttagccaccattttatcagagtcttctgtaataatgagtgaattatcctcaacaccacgaataaaattagtcaaaccggcgtggccaagtacatcatcttgatcagctagatacacattacgatcattataaccacgagcccgaataatctcattgatataattagacttaccagtaccaggaggaccaatcaatagtagaacattagattcagatgcagcgaattcagtccagatttcagctggagatcgatctaggaatggatacatttccatcatatttggattgtagttacgaacagaaataacttcactaaagctatatagttcattattttgatagttaacccgaattcttttaatactaggtggacgagtctgatcaaatacttcttcaaaacgtaatttaaatactttgatcagttcttcattggagtataatctaaagttctgactagtggtaccttccattccattcattaggaaaccaatgattccttcatcatctagtaatgcaaaaccaccactaattctgaatgctttcagatttaaagggcttataacttcatcacatagtttgtaaatttgttctttgatgaattcttttctatcaactccaaaaggatagtgaatacgtagatcttcactatctgaactaattccctgttcattaagagtatagcgatatgcattggaaattgcacggccattatcaacctccatagcaatggagataaaacgatcaatccacttctgctggactaacgtaagtttgctattacgataattcatttgatgttccttttctaattgataatctaatttgagacgatataaaccctcctactaagaggagggtttattttggctattataactaattcatttgagaaaattaattattatattcatccatcaattcaggtagacggctatctctaggatctaagatttcagaccaatcaattggcatatatggctcatcagattcatttttatttaaccattcttctagtctctttacatcatcggaccagtataggttatacatagttggcacatttgcatctaatgccaactgccatgctgtattggtgccgccactaattacagaggttggtgttttctgttcgccataagcaataatagttgaaacaggttcacgtaaagtatgaccatgaatttgaaacacattacgagtatgtagttcaatacctgttctacctaaaccattgaaacttccccgagctgcacaggccattgccatagctgtgggaatggtatcagtatatacagaggcatcatggaaccaggctaggttttcgatacgtctacctaaaaaaccatttctgataatgtaaatacgactttctacagtgtcccatttatcagactgaattgcaccataccaaccagctctatctgatccatatgcatcacctgatgaaatacctatacctagatcaacaaatgttcttcctgagcgtatcatcaattctagggcccatgtaggggcatagcgactaccgacaatagctgtcattgccattacctaaccctcattagaagacggatatcaccgtacttaagaacggcattccggacttgatcaataaacggtttaaattcttttcgctgttgatcagccgtgagtgtataagttactttgataggttcattaggaacattgcagaaagatagataacgcgatactcgacgtagattacgtaggtgattcttaccacatttaggcccgactcgttgtaaccgaccgtcgatgaccttccaatcataattagctttgaggtttagagaataaaaactttcagttagattcttataatactgtaattgtttttgagagattttattaatttttgattcatctgttacaagacgtgggctataccgtgaatagcaatctggttctgacatacgatcccaggacataaaagcatatagactcatatataccgttttagtaactggtttaagctcactcataccttttagaatagcttcaccactaatccatgcatcacagcgtggatcatcatcataactacaccaccattctggtttctttttcaggtcatcaggaacaccattatggtaagcaaatggttttacatcccaataattgcgaatatcaagtagatatgcataaagatcataattctgtgttagttcaatatcttcgataccgatccattcatcgtttactttagcttgagtttctgaatatacataatcacccattttctttatttcctatattagattaatataaatgttttataacaactatttcaatattaaataacgtattattgattgttttaatttactactcaacctgataatgtgtaatacgtctatctatatatctcttttctctggtgaagagcattagcattattccaaggtagagtccttattctattaaacatataagtaaataatccctccccaataaaggggagggtatatgttatcttaattcatgcttttgaaagatcatatttaacagcttcatctttcataggagtcaatacaatagttactttctcaaaaccatgtgtatccctaccattataagaaatatcaatattctcccaatcctgattaactacttcagtttgtagaatatttttaatattgatagcatctgtcttatcaaaccatttaaaaacctttgggttaaatacaagttcgaaagtagtttgatatggatagcttttctgtttaacaagcctactagatgctagtgatgtattctcaacgtttcgaataacatcaatcattgctttacggatagtaagtaatttacttttcagaaccaaatcaataaatgctggatcagttgtcattacttcttttacagatggaaatgtgatttccatagcatcctcttataggttaattattaaaagataaatcataatcactttgtctgcgattcggattaacaggatcaggatattttccagttttgataacttcttttatagctctaaaatcacgttctagaaaatctagttttttaactaactctttttctaattctttattgagtagtcttcttaatttgctcatctacgtatactcttacaatgaaccaattgattaggccaaaaccttttggtgtgatggtaatgtcatctttatatccatttttagtgattacattacgtaatactttaattgcttcaggtggaataagattagcattaccggtaacactatactcgaaataataacctacacctggtaaataacctgatgcaatctggttagtacctgtgatattactaacgtgttggaagtcactaaaagcattcttgtagaataacaaaatattaggaattacttcatccctaatagtagaactagtaatggcatccgccgatggaaaataaggtactaattcatctgttacattggtgctattaatatcggacataatcttttcctcattataaaaggataaatatctttatggtaatcctgtaatatagatttaaattaatttataatgaatggcataaaggagcccctggtgggctcctttaatgtaataggtccgacccctatctagaggtcggtgagtagcaaggcaccgtagttggggttcgtgtcgttcctgacgatactttagtaccccggtttatttacgactggatcacccccttaaagtgcagtgcgttttacgcaaactgccttgctctatatcattgcactgtgcgtatttttattcgttagctaatcttatgacttagagttatatttacataccccttaaggaaaaatgcaatgatagactcatttaggaagctaatgggctcgctatcaattactgaaactgatcaagaaattatcatcagtggttttgatggtgctgcattcattagagatattaacaagtattggcgaaccactaaattagctacgcagttatttaacacggttagtcgtcgtagtatttcattttataaattctttgctcctgaaatatattacatgctagaagcagtaaagaattatagaagtagatacatctctattaaaactgttaatgccatccgtgaagcaatgcttcaatatacctggttaaaaaatactcgtcctgtagataccaactctgtaccaggtagactcaatttcaagatgttagacaaattgacatttacaccagatgagtctcaaaaagcttattttgaaaattataattatcgaattgaccagtatggtttacgtggtgatattgttgcaggtaaacctggtactggtaagacattcatgacgatggctattgctgaaatggttgagtcggatatcattatagttgtttgtgaaaagaagtctattgatctaatatggaagccatctattattgagatgtataagaaaagacaaaaagtatggtcgaccattgatgataaagcctacaacggtcaaagaatacttatatcccattaccaggcgcaagataaaataattgatctattaagaagcggtatattcaaaggtaagaacattacggtgattctggatgaatcacacaatatgaacgatcctaattctgcacaatctcttaagttccagcaaatatgttttatgtctaactctaataacagattattagcgtcaggtacccctgttaaagcacttggttctgaattagtaagtgcattaagagtattagacgatctcttcaccaatgaggttgaagaacgttttaagaaagcatttggaaaagagacacagaaaggattagatattgtccaacatcgctttgggttaattgcgtacgtcattgaaaagaaagatactgaggttttaccaccgaggataaaagcgtatcgtatcaagataccaaatggatcacagtatactcttaatgccattaaacgtgattgtgaagcttttattagagaacgtgtaaagttctatgctgcgcgccgaccagaagatgagaagtattgggctaaactaatggcgatacacgagaactctcttaagacccaggcgcagaaagatggtttcgctcgctataagaatttgattaaaataattcagaagaatcaagacccgcgatacattggtgaagaaattaaagaatctaaccaatatgaaaaaatgtttatagagccaactttacctcgtaatgaaatagctgcttttagagatattaaatcagttataaaatacgttatgctaaagatacaaggtgaatgtttgggaagggttttaggtgctaaacgcattcagtgccatgtggacatggtaccgtatattgactgggttggtatcactgaatcaactatgaagaaaacgattgcatttacatcgtttgttgaggttgttgatactgttgataagtacaccaataaattaggtatgcatccggcggtggtgtatggtaaaaccaatgacaatttacctcaaataatcagtagatttgagaaagaccctaaattaaatccattggtagctacatatgcttccctttcaacagcggtccgtatgacgatggctgatactatggtgacaattaattcaccgtttaggcattacattctagaacaagctattgctcgaatttaccgtaaaggtcaggattcacaaacagtcgtatatcaatgtactctcgatacagaagatgaaccgaatatctcaacaaggtcagatgacattctaaaatggagtcaggcaatggttgaagctattatgggtattaaatctccatttgagatcacagagtcattagaaagttatgttgataaaaataataattttgatgaaaataaaatcatttatcagatgctaaaagaatcatttgagaagtatgatatcgcaattgattttaatgactttgatacacgtatgtataaaccatatcagcccgcatatatgcggttttaaaggagacagaaatgtctgatccacattcatctaatactggtgaagatcttattcttgggcctgaagccaccagtgaagaaatgtataatgcgattttaaggtgggttgacaaagtaacaaccatcctagaatctggtggtggccctggtccaggtcctagtactggtttaaaaccaattctatttcaaactggtacattaaacccaggagatgtagttacttatgatctttccaaagttattacttctatgggtgattatactctggctacagccatcgttgatctcaagattatcgaccctgaaactactagtcctactagtggtaagcttattagcgcttctgctagtattggttgggatctcgattcatctacagggattttaaatatccgtgggtatagcctgtctgtaccaatcacttattatattcgagttgactcacctattaagacggctgatattcccgtgtataccccgtaaggagtgagaaatgccttctattgtcccgtcgcaagtgccgggtcctgtggcactaaactctaaagttaaatttaactttagttcagatattcagaaggtgtattatacagtgagcccggagttacctccggtgctctctgaatacattgcttatgatggtgaccctgcaacaggtggtagtccatttattgctgttgtgcaagatggcactggtaatgttctttatgattgtagttttccaaaattctataatttaaactatgatacttaccaaattccggctaatacaacaaaccctcaagatctatggggatgggtaagatatttttataatgctattgggtttattaggaatggtagtaagtacgaatcaactggaaagaaattcttagtaatcacagatagtaatcctagtgaaccttattcagtcctcaatacgtcaggtaatggttttaaaaagatactagatacggctgctcgtgtacaagattctacctatgatgtttattacccagaaatgatgggtggcacagtagaccttactttaacagatcttaataagtattatgcatgtattctattctctactaaagatcataatactggtgcattaactcctgaaagagtgagtcaggcgactattgataatctagctacttggcgtaaatcgggtaatggtatctttgttataactgattctgcttcaagagattacactaatattgaagatgctaaagaaaataatggtagttttgcatttaccgctaatagactagcctttaattttggttcttatttctctggtgttgttgataggtcagatgttcaatatactgtaaatcagatgctaagctggtcaccaaaagctgcatcatctggtttgtttacaggtatgaataaatctattggtaatggtcaagtaactgactttgttatcaaaggtgattcaagtgaaagtgagattaagcttgttactttcccagcgtataacaaagaagatattcctgaatttaccttcgatcatactggcgagtacatttacaattttctttgtacgacatctgaaaatcctaataaaccgtatgctatttcatttagattccaagttggtgtagatgatggtatctttgttgcacgtgataatggccaagctattgatactactcagatactaacagctaagcgttattttgatcttaatctaggttactcaaatggtactgaccatcaggattatctaggcgatattcaaataaatggctatttagttggatcattcttatttagtcagggcattactcagtgggatctgataactcatggatcaactcttttaatccatgataatgatcagatacgtattaacgtacgtgtaccttatacttacacaatgcagcatcaagtggtacttagttcaaaacctgcttctctttataatgaagcatcccttataggtacaatggcatgggatgattataaagggataagtaaagctaaaatttatgaatatattaatcttagcatgaccaagtatatgtatcgtgtagcgaatgcatataagaataacattaatataaaaccaatagtattgactgcattacgccgtacattccttggtgagacattaaatacagctaatgtatatgtttatgataataactccacatggggtaaactatcacaacgtgtccagaacggacgacatggtgatattgttatctttgcagatacttctaaagttgtccagtatgatgaactggcttcaacacctggctggtatgtaatgaaagatccaggattagctgatgtaacagtagctaaactagttccattctttggaaataaccgagctattaaaaataggttaaagactggtgacattcttgatgagaccactggtcaaccaatttctttccatgctaattggaaaatagaaaatgataaacttgtaaaagtttaacggcataagccctcccgcaatgggagggcattatgttgttttaaccacgcgttatattaaataaccgtcttttctgatcaagtaataaaatagcgcttgtggtaattttaatgttaaacctacgtttagctaaactctgagctactagttcaatagcatcaactagatcgattgattctatatcacctgtatttttagatttactaattggtttactaagaattttccatcccttagtaaaattactagctgatggcttttgacctatcttgctacgaaaaaatagtccaactaatttactagccagttcacgtggatcattaaaatctgcttctggtgaatgtaaggtaatattactgtttgccaggaattcatggttctccgcacgatcctcgatagttttagcacgtggatcaaaatcccaacaattaacagttatatttacgtcattaccattacgacgtagatcaatacatctaacgaaatcagtcatgtcaaacttacgttcaacatcacgcatgccattagcaatcttctctaattcatcgttatcagtaataccaacttgcttagtaatatcaaaagtcaaatcggctaaaacggattgaggaaaactggttgcgatcagcaaacgcagtacgatttctggacgactttttctatatttgtcgcctgacatcttctcaaaggtgttagtcatgatggctatcccaaaaaggttagttcacaccatttaaacgctcccagtcatctagagttgcacgagcatcaaatagtgcgttgtgaagcattttagaaccttttccacttagctcatgatttaattcaaatatagttggtaactcaacaacttgtttacctttacccatatccatagctttaccagtgtaaaccatatcgttaacatgattagctataaaatgtaatcgagcaaactgaccaagaaacttggctagtctatcatggaattcttctaaagagattggttctttttgaagaataggaataacgttttctttaacccattcatcttcaatattgtcatatggtagaacttcgtagaattcacaacgtcgatcttcactaacaataccgagtgaaataagagtaccagtaggcgtatcaaattctgtatcaacaaaaagtaacatagtagttttccttgtacgaaagtcttatcataacaataatgcacttacgtcaaaaagagagaaccatcatggttctctcctataaaagtattagacttttagtccacgaatattgaagattatttgacaagctgcaattattctatttctagaaatctttacaggaattttatagtgattgagtacagctttaggattctcaacactcatcaattctttaagtaattcgtcgctaattttattatgtgttaggacaaaggttgcgacatcgtggtcccagcatcgttttattgcactacaagcacgaatatacttctcggctaattcggggctaaaatctaatgcttctagccatttcttacgaccagcagtgtaaatcactcgtgtacgagtattcgatgggacagctacaatataacctgtacctagtgtcctacgctcttcaatgggtctgatgttccaatcaccaatcatcctaattaatgtagatagatcatcattagcaccatagtaaccaataggtaaacctaaactcacttgtgtatctatctggtctacagtttgatgtgtaataaccattgtagttctcttcccaatagggttttataaacttccacaagactaaactccattatagccctatcagattgggtaataaaacttaacaaaaaaaatattaaacataaaccctctcccgaaggagagggtaatatataactttagccgtacattacaaaaggtacttcataaacaattagataagtatacatcagtttaaaaccaatgtgtaaccactgatcttgattaaatgtaattttattatcacattttaaataatcaataatgcaatgagcaattgtttcaataagtcctaaaactaatgaaccagtgatgaaataaactgcaccgccatgcataaaactatgcgcgggtaatacccatttccaatatagagaacctagttcagtggtatgatctttagcctttgcaataaaatcattttgcaatgaaaaatcaaagatgaagtgtgctacaattaaaccaaagaataatgccattgagctgacactgattaattccattttatttccgcctagaaaggtatttcatcttcaacaatgtgtgaatagtcgatattatgttttttacataattctttaaacttatttaatttagtttcagcttctaatagatcagaatgtaactttgtcttatagtttttaccgaagtcagctgggttgaatacggaattgtaataagcgtgtatctcagaatattctttctttataaaatcaataaattttggatcattgccatcaccaagataactaattaaatggcctagatcataattctgtcgcctagctgcttttaatataagttcattaatctcaattaattcagacgtattacaccgccttcttttaaaatatcggataactttattaaatagcatattaagtaatccctagccattgtaaatatccactatcacttaatccacgataataatcatctttatttttacgtaaataacaataaactattttacccattaattgataactagtttcattatcaaaggtaaattctttttctaatctattattactatccactaatgagattactacattaccgtaacgtactgttaatttcacagttctagtggaatcagcatcatgaaagatataagtcaacccataattcaattcattatttaatacttgaatactagtagacctatcagatttaatctgaagtggatgttcgacaatcgccttgaatgctttattgcataagagaatgttttgtatttttaatgaatccatgacattacctgatttagtatttataatttacctatatcgaattagaattaggtaatagtgggttgactcagtagtcttcaatctaatcagatcagtgtttagactgagattgagtattaagctgtagtgacactttaatcaatgacgtattatggattcccggcaagccagtttactgcacatgttgctgcttcatcaaattgattcaatgagaatttggttatccgaacagcctgtgccatattaagaactttaaattcactatcaccagactcaatataagatatcatggcatgatgatcattactagtatcataaactgcaatgcggatatccttgcccctttcaaccacatatgcgatagatcgttttgttacagggttatcgatgacattaactgtttcacgtaatgtagcgtcaatctgggatgcattaatatgggtactaatagcattcagcaaataatgctcaatctgtcgccctgtttcaagagttagagaacccattgtaatctccttttagaatccaatataatctaggaacccatggtaatcgaatgttcgtgttgggatacttgtatccgaaaagaacgtatttatttgtttagctaattcagtatggtgatgtgaattatctttgttaatcttagtaaccactttctcatcaaagaaataggttacgcacatatttagtggtttatctatattgatttcaacaactaccttacgaaccgtatcctcagacaagagtgtacacttagcgccccacggtgaaacctctattttaatatctacatgaggcttgaggttatcatgatatttcgtgagttccttcaatacatcatccatcgtttggatgagctttatattggtaatattcattataacccctcataaatatcctttcgttttggatttatgcctgcaaccttgcctttactattatcgatgtaacaaaggtattcatcacaaatggtagtctttacaaaaggaatcaattggtttagttccaatagagtgtactctttacccaaatatttacacatctgggtcaatggactacacatcacattataaattcccttagtattttttagagagaggtattcgccatcaatatctctatcattatttatcatgtaaatatcacgaataggataattatcttttaatggtccgttaccaaacttaacaccatgtacaccattgggtccatttagtagataataaccagttggcacagaccaatatgtggtgcctttaaatcctgaaagtaaaccatacggctcatgataatcagaagtaaagcattgttcatcattacagatgacttcttgatacatcgaataattaacaagaatctgtttagttggatcacttggtttaactaatggaataactgaatattctggataactagtccatccgcaactaccaagtccagattgttggtcgaagttacatggagcaattcgcggagtatgattagagtagaatagtggtacaccataaaaagcaagtggttcgtaattaacactagctttagtacacatgccgatactaatcagaaataccgcacaaaatacacgcatcgataatttaaacatcagtgcatccaccctcggtttccttaattgccaattttactaatacattaacccatgcaccttcatcgagcagccaaccagcagcgcctgtaccatgctcggcaaatccaagactatctagataatgtagcatgaatgtagttggaccaaacccatatttcttattacattcattacgtttagaagtattccgaccttggcgatatatatccaatacatcatcaatataacgcaactccgcttctggataaccacagccacacaggttaaataatttgcgtgtaatggtattgtatgtatcactatattctttttcattataatcaatgaaagagcctacccgtttgaatagttgcttatcggatgctaaatcatcaaaatgaccagggtaatcttgagatggaagtgcacctagcgccattagtataataacgcgcgggtctttacgttcaactgattcaatgagtacttcaaagttaagttctcgttgcaccacattgttattgctgttgatattattcagcagaatgtccatagcttcttgaccatgccaactacggatgttaggttggttattagtataaccagtaatggtcaattggttagctgtatttgattcaccaacagtaacatgtaggtaataaggacattgttctaatttcttagtaatgccagttgaagatttattaccctcaagtagtccaatatcgccatgaccgatatacaaacagataccttcagtagaaggttgagtggtgtagttaaagttcaaggatttaaacatactctttcctctattataaatgattagctatttaccgtttatataaagattaaatggacattgacacatgaattccgcatttagaatactttcgatattgtaactaattgatttatcagtgatgatgttgatatctaaatgccatgtcttagtattttgagtaactaacctgtattcaatgtcaatactaaaacctggtgcatcaactggatcatcatctccttcattctgatggataaagtatgaagataaagtatacctggctttaatatattcatctggttttataacttttaaaggggcattgatatgtgaaataaaaccatgataattaaattctttatccctaatatcgataactttaggagtaaccgatacataggctggccattgtggtagatctagttcaccatgtttagattggtctttatcgataatgtgaaaagctctaacaattctattgaacacttgatataccttttaacaaaaaaattataaagaagagtccccgtaatggggactctattatatcgtattttattttttatcgcgattagatggtgctagtttataaaacttccggaatttattaatagacaatgtaaatgaatcttccctaccatccggataaccaagataaacatctcggcgagagagtttaattagcttatgcgctgtagacacgccatttcgttcgactagaaaagtacgaccaatataatcttctaggttatctagattagttgcagggatgtatttagattctttcagagtcagggtagtgctcatttaatttcttcaccaattacgaaataataaattaattttatttccagagtgttttaccaattagatcattttctgcaatgaatgcatctaattgatgtccatagtaaagtaaactatgaatttgttgatttagacgttctttatttgaacctaagaacatcttgtgcttttcactatcaggtagctgatcgtaaactcgttggcagtacttctgtgccacaaccttaccagatgcaaggaaacgatcatcaccttcgaataactgagggataatattttcatcaagatacttactgatttcagcatctagatcaaaattaatagtgtcatcggttgttgcgacagtatcttcttgctgttcatcattccatggtatttcagaacttacactatcatcaaactgatcactagttgtagttttagctagttgttcatcaaatgatgattgtttatttttttgtttatcacgcaggaaaataattgattcaacaatctcattaacaatgatgtctagatcgcgattggtatctacaacaattgaactaggttgattaattaagcgtccataaccttcatctactttattaaagtaactggaacccttagactcataatagtcaagacctcggtcgcgcatttcaattcgttttttacgaacttcttcaggagcagttaaaaagaaagtagccggttctggaatagaatgtagtgttccttgaagaatatccataaatagttttgataggtatggattagtttcttcaaaaggtactacattaagagcataagtagatgcaatgaaacgttcagtgataacgattttatcatcttttaaagcaggtcgaataatgttttctacattaagcatcctacctgcactatgcatcaatacatcgaattctggcggacgaacttcatctttaaattctggccaaattaacatttgtcgaatcttttccgatgtagctgtaccacctggttcacgcattgctactacatcgtaattgcgcttacgtagttcctcaacaaccatctttgtaacagttgttttaccaacaccttcagttccttcgatacatacaaataaaccattcattactaatccctcatcttaagtttaattactgcttcaacattatcttctaaatcttgttgcgataattctaatgaagctctataacctaagctatatagaacatcaactaatacatcaatgcttaaagctggtaaattaaacattttaatattctcactaagttcatcagagatgcctagtttagtgaaaacatcatcaatcaatactttttgagaaatggctttttgacgggcagtttgtacaattgcaataactagattatatttgatattgtcagaatgtgattttttattatcaccatgaacttctttaaataaattctgatccgccataatactcagttccttaaattattaaaatgtactatttagccattaaactttttttaatataaaaaatgaccagtgggcaatgcacccactgatcttattatattgaaatagctagtatatattagctattgacatcttcaaagaagctggctacactttcaacaacgtcagtcatagcgctactcttatatttggtatctacaactgttacaagagcaccactgcgatcaatgataccagaaacagttgcaccgcctgcattataagaataaccaagctcagcaatgctttcattttctttcatgtacggtgcggctttttcagcaaatacataacttacagccgctgctagttgacctgcaccttcatgtacctgcgcatactgctcggcagtaacgcctgctggttgaagaacaacttcttcaaatagaccgtcagggatctcaaataccccggcatcagacatgcttactttttcatttaggttgtgggtttcgataaacttcttggtggtttcgatggacattttagtactctctctatttacggtggtggtttaatttacatcttttatcacaaagcaactaccatcattaaagacaaccttaattagattatcagttaatggtcgtttatatacaacacattttacatcggggagtttaactacttcttttaaagcatctggcataccaattagattaatggtagttaatactttattcagtgggccaagatgtgaagtcagttcttgcgctgacttaatcaaatctaccattgttttgtctttatctaccatgctagttactcgatttgatatatgaagtacatacgtcacccaggtcttcaccagagtcgatcatctcacgagcatcaccgatgggagtaccagggtgctcacgctcggttgctttagccacgtgttcaattgcaactggagaccatcgagcggcaacagcctcacatacaccgatcgaattcactctacggatcatatgtgcaccagtatcaattacactgaaactgagttcactaataatttccactccttttagtttatcgatactatcaataacctgcgtactaattagataattagctgtatcgttattatacgcaagcactagtttgaaactcattagggagttatctttatcggtgtccccagcgattaactcatgatttgaagtgagtgtatagatacaactactctcctgagcagtaattggtgatcctggtgaagaactatatacactaggtgcattagctgtatttagtgcaaacttatttacagtggaattagcgccaggaactttataaccaataggtctggcagtgaaaattacaacgctcattgtgattcctctttactagatagatggtttcctaattacacactagtaatataaatctcaaattttttttaatacgaaataaagcctccccgaagggaggcatttatgtcaattaccactataggtaccttcagtaccttgttctttacgtcttacgaggcgttgatgaattgcactaagagcacggtccattgaattaatcactacctgattctcttcacatgcaaatgggcctgcttgataaccttcaaataaatctttaacgattttaagtagacagtcagcagttaggccatttacaccaacttctggaacaagtccattctgcattaggataacacattcagtcagattatcaccaggcatagcagctgggttagtctgagcattataaccagttaccacataacgtttagttgcacctgatttctgatcaataccacttgcttcaatatttagaccattttcatcaaaatgttcatggccataaataccttgcatagttacccatccaccatcttcttgataaatccaatctaccccatttacatgataagtatcacctggttcagggtcagttggaagatctttagtagtggttaatgcacggatacgcgcatattcttcaattgcaatttgtacatcagttgcagtaattttcttctcaggttcagtagcttcatcttgttgagacttatcgctaccttccttttgatcattatccatatcggaagaatctactgtacttttagcttctttactttctaaggaagctaaccactcaagattaggtttagacatacttacctcaataaatgaaaccaccaatgtaaagtgacactactacatcggcaacccgagggtcttgtgaatatttagatttgactagtttaataagttcggctcgatttttaatgaagcctagtttcttattatcaatttcttcagctttaattaggaagtcatctaacttcttcttactacccagtaaattaatcaccatttgatcaataactgcattagaatttgatagtttagttaattcttgttcaaaaacttccttacgtccttctgatccaattaaagctagaccgatctttttaagtagagacatgttaattacctattacattggtttaagaatggttacaataaataactattccaagtatttagaagcgaccagtggtgttagcaaatgcggatagtgcacgtgctggttcaccatcaagaacccaagataagaagttagatgggcttctccagttcttaaaggattgcgtagctcgtgttatatttaggttcatacgttttccaacataatagaaatcagaccatgactgagatgtcaatgtggctgtataatcttggaataaactttgttcatcccatactgaaccatcagttaatgctagacctacaccaataccacgatcaccatctgcaccaatcccttctgcaactgcttcaccaattgttgcaccagctgctttaaaagcagtgtcaataatcgaaccgtcagcaaaacctgcctttagtgggatgtgcattatcttagatagatctttaacgtttatttgaacttcacagttaagcatgtgattttcagcattccaaccaatattaccagtaccccttctaatggtaattgaatcaacaatacctagttgacgctgtacccgtccttgatggaatatctgacaaataaatggtgatgtatatgctgacctaccagctgaacgaggaagccccatcggtaagatcatggctaatgggataaaaatatccaagaagcgcgacatcacattgccataaggacatactaaaggaattgtgtaagatgctgttggcaatgaagcaactgaattttcccaatgctcgggtacatcaacaaatgcggaacccgctaatgtagccaacccagccatgttaactgaatctaaagcaccaccaatgaaatccattacgcctctagtaacattacccatcatttcagtaacattaccttgcataaagttaaattgagcagctcgtccttcttgtactttactatttaaagtttgagctacaccaatgtctgttgtggtattggtaaatgattcagatacttctccattatgttcaacccggaaagttacaaattgtgaaccatcccgctgagcgccaactacgaaatcataaacatttttcaacttagaccatgatgaaaagttttcagaatcaattacaccagcaccaggttttctatcaacttcaatataacttaatagataatcccgcgcagaaacttttgagtcgccattatctttaaaagagctacgaagatagttatctaccacattatgtaaatcatcttggttgcgtgctttctcaaccaatgtatcccatatctttttggcttcatcggatttacgctgtgttctacctgataaagacattatatcaaaagaaccatcttcccttattaatccagggaacattcgatggaagttagctagatcggcaggggttactgtttgaccaggtatttctaggtctttctgaataccatcgaaaacacgtggtctaatacctaaattaatagcaaattcgttagctaatgtattcacagctgaccagtaagcatgcatagtcggtttaaaataataccatttagaaggctgtgttttggctagaaagttaataaccctatttgctgccgtgactccaatgataaatggctgtaatggcaatgatactaaataaccggcagcattacctaactcgtaccaagctcttgatgttgtaccagagttagcgaattgtgcagctgaccgatcatagaagtttgtaaagaaactagcccaactactaaaacgaggaacaccgaatgacatatggattaattgggctgtgtcgtcatgcgcctcactataatatcgacccattcctaaatgtcgttcatcataagtcctgccaattcctggtaagcgtatatctgcataacgggtatactggggtaatggattaattgcccagttaccgccaggagatgtgttagtgaatttaaaagcagctgaggcagcattacgtctttttgatcttgaaccaaaaccaacttggcgttcatctggagtaggcaataaaaatgcttgccttaaccaaattggtttactatctgtcgccataggaatctccttgacaaaataaggaacctcccaatagggaggctcctttaatagattaacgtagtctaattggcaatggacggttatccactacccgaccaggacgttgagagggagctatagtattagcttgctcttgtccagtttgtgcagatggattagccgctttgtttttgatgtaattaagcatatcggcatggaattgcttcagtacacttaattgctcacttgctatatctaacatggctttatcttgactggtaactactttgcgctgttcctctatttgagaggcgcgcactgtagcctgtgttgccgcaccggtatctacaactggctgttgaccagaagacacatcagtcgcagatgaaggtgcaccaggtagcatcattgatggagcattcgtccttaatggtgatgccataccagacattatcttcccaagtccaattttattattagaactatctgttattgatgtatcagcagcaccaccgataagctccttatcagtagccatatctttttgtttagcagttgctgcatcattcatcaactcttctgttgatttaggtttaccaagtgattgactattggcattcttaccgccgccagttctaaacttagcaaccttattctccatgacctgatagatttcacctaaggttctagcgctaccatccgttttaaagaagatagatctattagccctagcttggtcagggaatatctcagcaccaatagagttctggtcacgtgtaaggaacttacgtgcaccagctggacccatgaagtgcgctagataaagatccacatcagtgggtgccctacctaatgcattttctaaatactcataattgtcacgaaggaacatcgcgcccataagagcatttatacgtgggtcaaaccgtagtgaaccattttcatcatcagcaggtataccaaacttagctccatatttagcaagcatccctttccaggtactcttaataaattggaaccagccagctgctgatgaggttggtgccttggcattatagttgaatgatgattcaatgccacagaaaatatttaatagttccactggtacaccagtcatttctgatacagctttaaatgtagcttgagctgcatctctagacttattagattgcggcattgggatattctcccatacaccaccattcccagttgctaattgaccataagtctgaccagttggtgttaattcaccacctgcccctaacttatacttagccgtatagtaagtatcagttatcccttcttgggctctaccaataacttgactaactcgtgctgatgtattttccatccagttagttactttggtcgtggcactattgaatgttgatttaacattatcaataatccgactagcaaaactacgtcctgaagctgcatcattcttacctgctatctgtgcagatttagatttacctggagcttcagctacctcagtttcagcttctttctttatctcatcaagacttattttagctagatcttctactgaatccatatcgccaacaatattaaatattgatggtgctttccatattgaaataccttcatcatcagttgcacccattatcgcattagcaatctggacgcgctgagttgctgttaatgtttctatttggctaagcgttatcgatgtagatactgatcgagcagtaacaataaatgctttaaatacaggtaggaatcgacgatataaccaatcgaccactttaacacggtcagggccatcgctagttgtaaccataccaaatgcttggccagtccacttaattaattcctctatatcacctgtataagtagctttaccattagctactcgcattttatcattaacaagactttcaattgataataatccatttacagcagctaagtctaaaccttgcattccataagcatgtacacgtaatgcttgcagtgaagttaatgaatcacttgcatttgctttaggaataattgtgtctactgttgtagttaccattttacgtatagattcaactggactaaccgctttaattgcttttccaatagttgaatccctaaaccaattagtaatatcagttgacttagacttaatcgtagtaatagtatcatttatcacatcagtagtactttccttaaaactactggaagttgctttaggtgcgacagatgttttctctgtagcgctatacttgtttaataattccttttctttcatctgtatagaagcaacatcaattgataagtcctcttcaccaaatgggttattaagaactagataaggtgtattaccttcgtatgggaatgatactgatctaatgagctgtccttttagttcattaggtactttactatcaacctcactgatatctacatcactacgattaattttggatagtcctttaagccatgcctcaaagatcggtttaaatctgaagtcgatccaattggctaaacgcatgatagctgggccatcatcagcaccatatccaaatatcttaataatgtcacgtgcattaagagcccttacatcaaaggaggcatctccaccacgtgtagctacactagatacaagttgttctaattcagtaaccttgttcatctgatcagttgttgtagcaccgtactgcatcattcgataactgattaagtcatctttgaatttctgacttcctctccaacctaatacaggttttattaagaaatctttaagtgcccacataatcggattactggttacaatagctgcaccagctaatttatcatttgttgatgcaccagtaccaccaaaactagcatatgcagcagctgttgataatgctccaccaccaatagctaaagcacctctaccaagtatttggcgggcagcagcccatttcccacctttcttaccaccaagacctaggtcttccaataatccttcatcttcctcatcgcctttcttcttaccaaagatattctttaaggtatcaccaagtttaccaaaaagaccttttgattcagtggtttcttcatcactgttatttttaccatttaaagtatcgctaacacgtgatgttagatcttgccaggaaccacggcgaggtttattagcatctggtttctgattacgcagttcttcccatatacctgctaataattgatcagtggtggtatctagagctttcttatctatctgtgtttctactttaccagtaaatgcactaaaacgtttcttgaaaggtgatccaagtaatttatatcctaaacccgccattcctttagcagtatctacagatttcttacctaaccacttccaataacgcattgacatattagcataaccacgggctagattacctaaaccagttcggaataaacccttattcttagcagcagtatgcttagacccatcagagttaataagttcaggtatttgttcttcatcaacaacaatgttaccatccctatctaaaactggtccattaatctcatcgaatgattttaataggttaccagcagttgtataatactcacctgcttttagtttaactttctgtaatactggttttaacataccaggtaaatatgcatcccgattacttagaatatccttacctaatccaatagtaaagtcttttgctttattagcaactgtacccattgcattaaagattttctgagtagttgatccaccacctagtacatttcgttgtatccagttagatgcatctgctacattccttcgcagattaaaaccatctgaccgtattaaacctttagccagttcttgagcagttacgactacatcaccagccctgttaataatagtacctttggcatctttcaaattagttataatttgattagttgctgtatcgatatactcaccggctagtagatcacgtccaagaataacagcttcttcacggccaggtatataccaatctttagccatatcagaaacattatctaaaccttgagttaaccgttctctagcatcaccagcgatctgtgctgctttatcacgtaattgactagcaatatcagttgccttggttaataaatcaccacgttgattatagagaccagtagctacttcttgagcagttactacagttataccagcttggtttttaatttcaccagtaatatcagatattttctctactatcttaccagtattaatatcaattaaatttccatttaaaaaatccattcctttgataactggagtaaaagtattagctttggtatatagatcagctattgattgattgactatatcagaatatccattgagctgattactatagttaacagtacggctatacatatcgccagcttggccgtatagttgatctcttaaatcaccaaagttcattgacgctggaatgtttatattcctacgtaattcgctaaattgattaggtacattatcccttacataatccgtagctagtgatactttttgttgtgcgtaattatagcctttattagcttgctcttgggccagtttagaggcacgaataacttgctcttgagcttgacgcatttttcgttcagtttgtgactgatacattgggccaataaagtgcgggttattctgatcacctagtggggagagttgctctggaccaccattatcagaaggtggtgtatcactataacgatcaaatggattatcattaccccatccttcgtattttacttctgaactcattagttcccaaatacgtgggtaattaatacgatcaataccctgctcggttatgataatacccatttcacgtaattgatcagttttaccagcattggttaaacgctcaatttctttaataggatcacgtgagaagtttctaacgtctaagaataatgtagatatttcttgacgcctagcaaagttttcattagtgcttgccatcctaccatcagcgccaatattgtattgccgtttaatatattccgttaattctttaatcgcctcaccggacactttagaacgatcatacccaccagcacgagcatatgcttcggggtcaaaacgtttattcatattggcatcacgaattaaacgttcagttagcgctttcctagcatctattgatagttctttatttgggtcaaatgcttcaagaacatcggtaagagcaccactcacacctcgtacagtagaacgactaactagacgacgttctgtatttgcagctgaatcctctacagacatgaatgaaccagttgagagatcaaacacttcacgtgtaatatcatcacgaccagtccggatcattcttgtttcttgtagtaacctagatagatatccaggaatagcttcaactatagtacgttgtgttagttgattaaagccactgtcctgaccaattgtttgataggagccagtctttaatcgatcttgtaatgtgaactgtggaataaatggagccataatgtcacgaagaataccacgagcaccataagtgttttggtaattattcatgtattcttgtgtccaggcagggaagttatcaagtaaataagatgcttgattgtgtcgaccacctagatagttatttgaaaaacgttccacaccaggacgaaccattctacctaatacaggtataactgaattccttgtccaatcaccaagataagagccagcgaattgaccagctatattgtatctattctcccatgcatccgcgccaaacatgtttccagcgcgagctgcatctgcaaagttacggatattttcattcgcaaagcgagtagcattattagttacggctgatccaaaattacctaagaaatttggtaatgtttgaatagcgttgtcaacaaaactattcgatacccgttgagctgcattaaagccaacaagatccttcattgatgactttttatgatcgggaatccctgtgtttctaacaagtgctgcaaaaccattatttaataattccatggtagcttcggtttgctgtgcaattttccgaagatgcagcatagaacgaaactggatttctaatcctttcttttgaatactgtaattaacttgttcattataactagctaatttagataaattatcaactgtttgacccatagccttagccatccagtcaaatctatcagctgataccttatcgcgtattccacgttcagcttgtccaatagcgaatcgtttaacttcaccctgttcagcttttatagctaaatcccgttgaacaagagttacttgatctatagcagatttaagttcatcctcgtcacgttcagcttccatgcgacgacggatttctttataatttctatttgaatcttcagcgtacttatagttttcgatttgactttctaatcgattattaagtctgtcaaaaacagaagctggaactttatcttttaacttaactgctaaatcttgtgcttctcttgttaaaaagagtaaatcactagcactcgtacgttctacagaatctttgacatcccgaatagttgacatcgtatcttcatatacaccgaacatacgtgaaaagccatctggtgccgcagaccgcatgaatgcttttaaagcttgttgtggtttaacagagtcaaagagtccttgtttaataccattaaaaaattcagtgacaggtgatccctttttagctttcggtgtatcaccaaaaatatcatcgatatcacttaagtcaagaatattaccggcttgccctaatgttgtaccggttgcaccagtttgacctttgggcaatgttaccttcttggccatattaaactccattgacgattagtaaagtatcatatcgttgtttaacttagtattaccaaaataggaaaatagaaaatgaagaaggcattagttccttttaatatttctttacttattcccactaaagaacaattaaagttcttaggtcaagtaaagagtcatgagatatttgaaggtttaggtggtaactttcatgaagatggtttgttctctgtttccatttttggaagagttggatcaactgatcgtgagagtttatttggatatatccatttaggtttagaacttatccatccagctgtatatcgaaacttaattaaattaaaagctttctatgaagaaattattcttggtaaggcatttgcagtatttgacgaatctattaaagattttatccgcgccgatgaactaactggtaaaactggttatacattcttttttgataactggaaacgaattgactttgggtccactaagtcaggggttcggctatcaaggttacaattaatcgaaaaatataaagataactgtatttttaaagacatgcttgtaacaccagccgcttatcgtgatgcagagattgatgagaataatcgtgttgagatggatgagatcaatgaacactataggtatctattaaatcagtcgtttggtgtacctgatagctttggaccaaatgatgacttgagtatctatgatcgcaaacgagtagcaatgcaaaacaccgtattagctatttatgaacattatgaacgactgctatccggtaaacgtggatacattcaatctaaatgggcatcccgtcgtattgccaatggtacacgtaatgtcattagttcgctagatactaatgctgctgatcttgattcacctaatcgaccaacattcaaagatgccgtagttggcttacatcaagcagctcgttcagttgcaccgcgtacaatctttgcactaaggcaaggtgtagttggtgaagtgtttgatacagttactaacactgtacagctcatcaataagaaaacactacgtttagaatgggtcgatatctctaacgaagatatggatttatggggaactcctgaagggcaagaacaaatcatcaatgagctagatgtcattgaaaaacgctcacgtgcaattgaaattgctgatcattatttagcacttatctacgtcgatgataaacaaaatttcaggatattccgcaatattgacgaattacctacaaacctaaataagaagtttgtaagacctatcacatacgctgagttagtttacctcagtggattaaatatgtggcgaaccaattcagcattcgttacacgttaccctgtagaaaactataatagttctattccttgtaaaatgtacgttaaaactactgtagtaggtgaactacgttacccattaaatgaacaatgggaacgggacgatgcattggaaccagcgctagagttcccagtatttgaactaaataaacctgcacagtggcatgattctgtatccatatcaccatctattctagcgccattaggtgcggattaactgtagtactgtatatctggttatcctatagaaaattaatagggtaataaccatgttaaataaatctattgaaaatctttgatttaagaaagttccctactctgaacatggttatatttttagagattatgcagtaaaatacataagtccacatattccgaaatgaatatgttttactcttctaattgctggaaactcctgttagacttaagtgctacaattatcacgaaagtagataatgaatgcttgacaaacttaaggtagggccaatcagcagcgaagccgctaagttacttaactgtaatatgtggaacgttcaacgactagggggttgcgccccgtaggatcaagtgatccgaaatggagagcacctaaacagataatgctgtaggtgaagatatagtctggtcttctagcgagagctagagctgcacgtaatggtgcgggtatcaattaacgactgatactgaacataacgtttgacggggacactgtatcatttaacgctgtttattcagaggaagctatcgctgaaacagatgctttctttaagaaacgtattgcatatatacatgccgatgggcgactggcatttagtgttggtgtccatacactcaatttaactcttcggtacatgactggggaacccaaacaaagggattaatcatgcgcttaaatattacacagtttctgaaaaattatagtgtacgcgaatatgctaaacttcagtcacctaagttgcatgctctaaataaacttgatctacctttcgaatccatttatcagttcttcgatggcaataatgcagtaatgggtcctagtcaaacagacccattattctccaaacatcaaggtaaagtatatattgagcatgttactgatatgcttacatttgaaggtaatccacgtaggacttcaaatatcccagcaacaatgattcaagagtttcgtcgccagaaccgtttctttaaacctttacgcagtgataccggttttaaattatcaaaccagaacattctggtaatgaactataatttaattaaccctcaatggaattatatggcttcttataaagccacatggttccgttggtccaatgacatgcgtacattctggagtggcgtagcggctgcatgtgaacgctttcctggctggaaccagttcattgatgtacacttacctgagttagttccacctccttcttcttttaataaactacgagggggtttaactcaagatctagctaaccaattcaatacacctgatattctaaatatatttgatttagttcgctgggtttctgatgatcgtgaaagttctttcatgaatgtcatcgatgctaagtattacggtaacattaatcttttattccgtgtacaaagctcattctttgttattaacttagggatgcttgatcaatggcgtcgtgatccagaaattaaagatgataaaggttatgatacccagcaaatagctaggcgccttatttcactagtatcagcgatggttgaatataaccaaggtaatacttcattaattaaagaggatacgcctatctttaatgaagatattattgttgatgaagaaactccggttagctatgaagaaggtgaagtagaagaggttgaggatgttgagtctaataacgttgaagaagaagtaactgaagttgatgttatcgatgatgttcagtttgacccaactaacttaactaacttaattgatattggtgcaattgaggtaacatataccccaccaccagaaagtgatcttgaggtaacaaagcttatcattgaaaaagatccactggaatcttcaccttctcgccaaattaaagaagagaaggaactcatcgtagcagatgtaccagaagatgagttatttatcaataccgaagttgatgaagaagataaactaatcgatgccattagagctaaagcatacgacatgtatcgcgtgaatatgatttctgcgaatacattcgagcaagctcaagaagattcgattatgtatcgtcgtctacctgatccatttaccgatcctaatgatgaatcagtagagccgatgacgatcgctgaggcgatggaatatcatccagatgatcttaagattccagaagacaccacttttgaagataagccaaccattgttgataaatcaatgttgggtagtaagttaaaagccatccaacgcaaatataacaaggtcttattaaagaaagatattttaaacagtgttttatctgttcagaaacaaggcgtatcagtaactaattacaaaattgaaactgtgcgcgattctggtaaccattaccaaatccacaaagttacattaaagcctattcgtggtagaagttcacaagtgatgttccgtatccccgtcattgataatgacggtaggttcatgtctaatggagtaacatatcgccaacgtttacaacgtgctgatattccaattcgtaaagttaatccacgtaaagttgcattgacctcttattacaataagacctttgtgactagatctgaacgtgctgaaaacaactttgataactggttaatcagagcgattaccaaccgtgcattagatggaagtgatatgtctgtacattcagttacctatgctgaattagatcaatccaactatgttctaccaagggtgtacactactttaggaacagctttcaaaggcttccataattatcgtaatgtgttctattttaatttcaaagatcgtaatgaattctttgcaaagcaaggactacatatcgaagattatgaaactgatgatttgataatggtggggttcaatggcactgatgctatcttgttagataagaattccatcttttacatgaaaacaggtaatgagctagaacctattggtactattacagatatacttggcttagatttaaccaaagcaccgttagaagctattctaatgtcaattggtggtaaagagctaccattaggtttcattttagcttatcaccatggcttaaacaatctacttaagaagttgaatgttaattatcagcgtcatcagcgtggcactaggattgttgtcaatagtacggattatacattagcgttcgctgatgagatcctagtatttgatcgagctgattataaagcaatgcttgtattaagtggactcaaacgttatcataaatcactgcggcgttattctgtttatgatttcaataaacgagatgtttacttcagggttcttgaagaagctggattaagtaacagatttacacgtgatattgacacattcttctcagcatgggtcgatccaatcactgagggtctacttaaggagatgggtgaaccaactacttttgaaggattgctttatcggtctgtcgaattattaacgaacgactggagtccagcggaagtagatggtgcgtatatgcgctatcgtggttatgagcgcatggca

SEQ ID NO: 3 - DNA, 57534 bp, Bacteriophage
gtggcggcctggacagtgtggtcgctgccacttatgtcaagaaggtcatcggggtcgagaccgagctcattcacttctgctacggtagccgagcggaaggccctgaggtgattgctgtgcaagctgcaccggcccagcagccctggcagcagcccgcagcggcccagcagccctggcagcagcccgcagcggcccagccctggcagcaagcgccccagcagcaagctccggttcagcaacctgctccgcagcaagccgctccggcaccccagcaggcagcgccggcgggtttcaatccgcagaccgccaccccgccctgggctcaacctcagcagtaagctgaccagcatggagggcgcattcgaaagagtgcgccctctttttccgaggagatgtgataatggcagatgatgctgaccgcgcactcaaagacgcggaagtgctggatgaggcgcatattcgggagataagcgcaagagcggcaaacatgcccaagggtgtgcctggtatctgcaagcactgtgacgaacacttcgaacgactggttggcgggcactgcggacggtgccgggacttgctcaagctcccctaagccctctgagtcatataaggaggcgtgatgcctaatgtaattctcgcgacgcacactgtcgcaaagatcgacgcaatggtgaaggcggatcaagggtctgccttccgtgagtggctcggaaaggtgatcgggcacatcggtgacgcataccgcacgggtaacgaggggcaccgctcgcacatgggcgcatcgctcattggcggggaatgtgctcgcgcgatctggtataacttccgctgggcaacgaaatcaaacttcgagggccgtctgctgcgcttgttcaatcgcggacacctggaggaagcacgtttcatcgcaatgctgctgatgatcggttgcgacatctaccagcaagacgagaacgggaaccagttccgtatctctcacgcagaaggacatttcggtgggagtggagacggtgtcgctgtggggatcccagacctgcctccgggcactgctgcactgaccgagttcaagactcacaacgacaaatccttcaccgagctgaaggccaagggtgtgcgtgacgccaagttcgagcactacgttcagatgaacgtgtatatgcgcaagatgggcctggctgttgcgctctaccttgcagtgaataagaacaccgacgaactctacggcgagatcattccgctcgacagtgctgtcgctgatcagttcctggacaggggcgacaagatcgtttggatgtccgagcccccgaacaagctgaacgagtcgcctggattcttcaagtgcagatggtgtgaccacaggcctgtctgccacctcaaggctgctcccgataagaactgccggacgtgcgcctacagcgaacccgtcgaaggtgccaagtggatctgccgcttgcatgatcagcacatcgacaaggaagtgcagctgaccggctgcaaggactacacgccccggaaggtgttcggatgatccaagctcgaagctatcaggtcgaagcggtcagcgcgatctatacttacttcgggaacaacacggggaaccctgttgtcgctatgcccacgggtacgggtaagagcgtcgtgatcgcgatgttcctggaatcggtgttcaagtattacccgaaccagcgggtgatgatccttactcacgtcaaggagctgattcaacagaactacgagaagctgatgggcttgtgggcgttcgcgcccgctggtgtgtatagcgcaggcctgaaccgacgggacgtgcatgcgcccatcacctttgctggtatcggttcggtcgccaagaagtgggccatgttcggccatgtggatcttgtcatcattgacgaagcgcacctcgtaagccccagcgaagcgaccatgtatcagacattcctgtcgggcctgatgagcatcaacccgaacttgaaggtgatcggtctgactgctacaccgtggaggcttgggcatggcaagctgaccgaccctgtgaagaacgacaagggtgaagaagtcccaggcctattcacggacatctgtttcgacatcacaggcatcgaggcgttcaaccgactcatcgccgagggcttccttgcgccgctggtgcccaagagcaccgtgacgaagctggaagtagatggcgttcatatgcgcggcggcgagttcatagcgagcgagctgcaaactgctgtcgataagatggacatcacagtcgcagcagtcaaggaggctctagagctaggttggaaccggaatcactggctggtgttcgctgccggtgtggaacatgctatccacaccgctgagatcatgaatgacatggggatcccgactgttgcgattcactccaagatgggtgacaaggaacgcgacaatgcgatcagggacttcaaggctgggaagtaccgcgcggcagtcaataacaacgtgctgaccacagggttcgacttccctgccatcgacctgatcttgtgtctgcgcccgacagcttcggcggtgctgtgggtgcagatgctaggacgaggaacgcgcccaagcccttggacagggaaagagaattgcctggtgcttgacttcgcgaacaacacacgcaggctcggaccgatcaatgatcctgtggttcctcgtcgtaagggtgagaagggtggagacgcacccgtcaaggaatgcccgtgctgccgcacatgggttcatgccagcctgcgctggtgtaatggactgatgcccgacggttcgaactgcacttacgaattcaagttccagaccaagctgaagcagggcgccagcaccgcggagctgatcaagggtgacatgcccgtcgttgaagtgttcaaggtggatcacatcacctatatcgagcacaagaaggacggcaggcctccaatgatgaaggccacctactattgcgggtatcggatgttcgaagagttcgtctgtgtcgaacatacgaactatgcaggcaagaaggcgcgcgactggtggcgtgcgcgtagcgacgagcctatgcccagcactacggcggaggcgctggagcgtgctgacagggtacgcacgccaacgcacctgagagtctggatcaacaagaagtatccggaaatccttgcgacgtgctttgatggcaccgcgttcggcactcaggaagcaagtgacggtgacgaaggccccagcgtgcagacgcaccacagcgcaccgcttgaggatcaacgtgcaagcgaaccgaccagctatgcggatctggacgatgatattccgttctaatcgatttttggatgccgataaaaatcttttttacgggcaagcctgaaaaagggcttgcatctttgtccagttcgtctatagtacgattcatggatgcagcggtgcatcaaacaacggtcgcaagaccatcaacctctaggagcttaaaatgatcaacttcaacgaaatgggcaaagtggaactccgtcaggcttgcaaagaagctggcatcaagaactatggcaagatgaataatgacggcatgcgtgccgcgctggaagcgcactacgcagaggccaagggtgcggaagaagctgcgccggaagctgtggtcaccgaggaagtgcaggaagaagcacctgtcagcgccccgagcggtttggcgacactggttcaacagatgatcggtgccaacgagaagaaggaagaggagcgcagcgctcccgccgctgccaagcgcaccagcagcggcctcaagattgagaaggcacgcgaagaacgcaacggcatcaagaagccctccgtgggcggtcagtgccgcgctgtgtgggacgcgctggacgacatggtggcagcaggcacccagcccaccgccaagcaagtgaaagcgttggcggaagaacgcggctggaatccgaacaatgcgtccatcgagttctaccagtggcgcaagttcaacggcatccgcggccgtcagtaataacagcaacgaggggcgaaagcccctccggaggcatgtcatgattcggtttctgttagtgcttgcagccattatccttgtgctctatctgatcttctccgaggtgttcgctaccgctgagcgcttcaagcacaaggcagaatgccgacagccgcttgcggcatacatgcacggaggggcgcccttcagatgtgaggtgaaagatgtacgttagtctcgacatgcagaacatgaggatcgtccataagcattcgtccgtgaatgcggtgtgcggcctggtgcatattgaactccccgacgtcgcagtgaatgtctgtccgatcgacatgacagtcaagcacaggaccgacatggagatcaagatgctcttccgatcgtgcttcccagggcaagctgaccacatgcccgtcgcggagatgaagtccaagatcctccagttcgctgaggagtttccggtcacagacttggacgagcttgaagtcaagcgccaagctgacagcattcgggatggcgacaagaaggcctacaagtatgtgaagggttcgtttcgtgcgtctcgacctgctgagctgtttgccgacgctacgggcgacgctgcgcgtgctagtgctaccgtaccggccagcagtgctgcgcggcctgtgcggcccgctgccgccccgcgcgctgcaactggttccccaagggccagcggtgtgcgcgagaagatctgggcagtcgctgaccgcatgtgggaggaagctggaaaaccgatcgaaaagagcacagtcctggcgctgcgcaaggatatcatgaacgctttggagcaggatggggtgaagcgcaccagtagctccaatgagttgggcaactggcagaaagcgaggatcacgtaagatatccgatttgcccgcttgcactcatgctcccggagtgttacattgcaatcccgtccatcaacggactttattcactttcactggagaaagaccatgaccgagaagaccgccgaacagatcgctgccgagcaggccgaagcccagcgcaaggctgacgaaaaagctgccgagaaggcccgcaaggaagccgagaaggctgaagccaaggccaagcgtgaagccgaagctgccgagaaaaaggctgccaaggaagcgcagaaggctcaggaaaaagccgaccgcgaggccaagaaggctgccgagaaggctgcgaaggaacaggccaaggccgacgccaaggctgcccgcgaagccaaccgcatgccggagcagaacggtatccgccgtccgaagcccgacaccctctgcggcaaggcctggggcatcttcgacagcgtgtcgcagaagaacggcgctcccgcgtccatcggcgagtccatggaactggccaaggccgacggtctgaacgaagccaacgtccgtgccgaatacgcccgctggcgcaagttccacggcatcaccggccgtatcgagtccccgaaggccgaaacgacctccgctggcgccgagcgggcctaacctgctacaataaagcgccctgggcatccgcccagcgggaaacctgcaaaggggcagagatgcccctttgctatctaccccggaggttccatgaacttacaaccaattgagaagcgcaccaagagcgctgacggcctgctgtccttacacagcatctttcacaccatccagggcgaaggccctttctgcggaaccccttccgtattcgttcgactcgcagggtgcaatctccaatgccccgcatgcgacaccgactacacccaaggccggcgcgctgcaagcgcccaagagatcctcgacaaggtgcaggaataccagtcgagcggccttgtggtcatcaccggaggcgaaccctttcgtcaggacatcacacgactcctcaacgtactgaccgacgcgggcttctacgtccagatcgagactaacggtacgctggaacctgtcgagtacccttacagcaccatgcccgacattcgaacgggcgtctatgtggtgtgcagccccaaggcgggcaaggtgcatcctcgcatcaacgacgtcgcatgctgcttcaaatacgtgatcgcacatgacagcatccatgatgatgacggtctgcccttgcgtgctctggaacatcgcgcgagtccgtatgtggcccgaccgcccaagaactgggcacgcccaatctacctgcaaccgatggactccaaggatgaagagctcaaccgcctcaacctgcaagcggccatcgactcctgcatgaaattcggttacatccttcaactacagatccacaagatcatcaacatggagtgagctatgtgcgcaatcattggcgccttggtgtggggcttgaccacacctgaagcacggtcacaggccaacagcctgctgaaccatattgtggcacacagccatgaacgcggtcgcgacggtcggggcttcctgacgaactacggtgacgacatcgttatcgagaagagcaccgaccgcaaggacgcgaaggactgggcgcctgtcgagttcttcaagggcgacgtgtcgtccgctacctttatcagcaacctgcgagccgaaccgacaaccgagtacgtcgctgacaagtcccaggacgatcagcaaccctacagcgcggggcactggtccatcgtgcataacggcaccatcgccaacgataaggcgctgcgcactggcaaggtgcccacccgcatcgacagcgcggcgatcgcggaagtcctggacgccaaccgctgtgacggttccaatgcgtaccggaccgctcttcacttcatagaaggtgtgaagaaactcaagggcagctatgcgatcctggcgacacatagcgagcagaagaatcatctgctggtggcagcaaactaccgcccaatctggttcgtcgtaaccgaagtcggcgtcttctttgcaagcgcgcgccactactttcccgacaacatgactccgcgcatggtcgatccgtattcggtcatgagtttctacttcagcgatcatcttgagatccgcggcgagtccctgtacgacgtgggcgctcgttccaaggcgctcgtcgtgtgtagtggcggcctggacagtgtggtcgctgccacttatgtcaagaaggtcatcggggtcgagaccgagctcattcacttctgctacggtagccgagcggaaggccctgaggtgattgctgtgcaagctgccgctgacgcgctgggcgtgccctgcaccgtgttcccgctccccgtgtataagccaagcgactccccgctgctgcaagctgacagcaagatcgctggcggggaggaaggcgccgaattcgctcacgaatgggtgcctgcgcggaaccttctgctgctcagtgtggctactgcctacgcggaagcgaacggattcgacactatcgtcctcggtaacaacctcgaggaagctggtgcgtatcctgacaacgaacccgagttcattgccaagttcaacgacctgctgcctttcgcagttggcgatggaaagcgcatgcgagtcatgatgcctgtgggcaacctgatgaagcatgagatcgtggcgctggggcaccgcattggcgcaccgctcgacaagacctggagctgctaccgtgcgggcgagcagcattgcgggacgtgcggtccgtgctacatgcgacgcaccgcgtttgacatcaacggcctcgaagaggtcatttcttacagtaacgacaaggagtaaccacatgccctggcaagccaaacgatatcacgacatcagctgcggacaccgcgtcttccagcacgagtcgaagtgcgcgcatctgcacggccacaactatcgagtccatttcacctgcgaagcggaagaactggacaacatcggccgcgtgatcgatttcagcgacatgaagtctcgcctgtgcatgtggctggaagataattgggatcacaagacgctcatctgggagaacgacccgtgggccaaggtgctacccgaaatcgacccgacgatcgtgatcgttcccttcaaccctaccgccgagaacattgctcaacatctcgttgaagtgatcggcccgcagcagctcgcaggcaccggcatcaaactcgtacattgtgacgtcgaagagacgcgcaagtgctccgcttcttttcacgctcactgaggacacaccatgcaactgactctgaatcataacgacgtgcaagcgctcgcgcagcgggcggcacaggccattctggccttcggtgctaccattggccgcaccctgctggcttaccccgtaccgcgcggcggtgtgcccgttgcgtacctgctgcaagggctcgcggggttcagcatcaccgacgaccccgagaaagccgatttcttcatcgacgatctgatcgacagcggcagcacgatggaacactggtgcgaccagttcccaggcaagcccttcttcgtgctcatcgacaagaagacggacgaagagttcaagggccgctggatcgtgttcccgtgggaaggcgacgctgagtcaggcatcgaggacaacatccgccgtctgctccagtacgtcggggacgatcctgcccgcgaagggctgctcgaaactccgcatcgcgtcgcaaaagcgtggcgtcactggtgcggtggctacggtaaggatccgaaggcgatcctgaaggtgttcgaagacggtgctgagaagcacgaccagatggtgacggtgcgcgacatccccatctattcgcattgcgaacaccatctggcgcccatcttcggcacggtgacgatcagctacatcccgaacggtcgtatcgtcgggctcagcaagctgtcccgcctggcggacatgtatgcacgccgcctgcaagtgcaggaacggctcaccgaccagattgcggacgctctgttcgagcacctggaagcgaagggcgtcggtgtggtcatcaaggctcgccacatgtgcatggagtcgcgtggcatctgccagcagggacaccacaccgtgacgactgctcttcgcggtgcgatgaaggatgagcccgacacccgtgccgagtttcttcggcttgcccagtaacagctagttcgctataatgtagggacgtcttcggatgtccctacattttggaggtctcatgaacatattcatggcggccgtttatacgaacggctatatggaaggtcaggcgcgccatgccaagctgacggagcacgagcagaacatctgcaagaatcttcctcacattcttgagtcgtaccactacgtcggcaaacagcggtatgtcgatgacatgcgccgcgatggtgctcaagtgttcctggactcgggagcgttctctgcttacacgctgggcgtcgaaattagcgtcgctgagtattgcgactatatcaaccgcaacagagacatcatccgcgtcgaagatggtgtcgtgatggcatccgtgctggacggcatcggtgacccattgcagacgtggcgcaatcagctagagatggagcagcgcggcgccaagccccttccctgcttccacgctggggaagacgagcgatatcttgaatggtacgtcgcgaactacgaatacatcacgctcggcggcatggtgggctccagcacacagcagctctgtatctggctggacagaatctgggaccgctacctcaccgacggtagcggcaatccgaagatcaaggtgcatggcttcggtatcacggccgttccaatcatggagcgttatccgtggtattcctgtgactcgtcctcttggattcagtccgctgcattcggtagcattatcaccccaggctacagccagagcacgatggcgcttccgatgagtgtatcggagaagtcccccagcaggcatgacgctggccagcatgtgaccacactgacacccatcgagcaggattacgttctgcagatgctcgaaaagcacggtttcacgcttgagcgcctttccaccgtgtatgagtcacgcgccgcctacaacctgtgggcgttcggggtgatcaacacaatgatcaacgctgcgcactcgaacacgttccgggcgcgcattcaggagctcttctaatgcttaaagaactcaagttcgtgcagggcgcagtcgctaagaaagacctcctgcccgccatgactcactttgccatcgagggtgggcatgtgcgctcgtataacggcacgctggcgctgtccagccccatcccatttgacattgactgcaagcccaaggcgggcccgctggtgcaggcgatcgcgaactgtaacgacacagtgacgctgagcatgaccccagcgggcaagctgcgcattcagagcggtaagttccgggcgttcgtggattgcatcgacggtgaaacgccacacgtcatgcctgaaggtgatcacgtagatcttgacggtgagcagcttctgaaggcgtgcaagacgcttgcaccgttcgtcggaaacgatgcgtcccgtccttggacgaacggcatcttacttcggggtcagtctgcgttcgccacgaataacgtgtgcctggtggaatactggatcggttcgcagacacccttcaccgccaacattcctatggcggcaatcaaagagatgatccgtatcaacgaagcgcctacgcacgcacagcgcaccgacaacagcatcacattccattacaccgacgggcgctggatccggagccagctgtatagcactgactggcccgacctgtcgaaagtgctcgacagacagtgcaacccgagtgacatggactcccgtctgttcgaagggctggaagtgattaagccgttcgctgacaagctgggacgcgcgttcttccacggtgaagcagtcaagacccatatcgacgaaggtgaaggcgcatcgttcgacatggtgggcttcccgttcgagggtgtgtatcagatcgagatgctcaagctgctgaaagatgtggcacagaaaatcgacttcagcacgtacccgagcccctgcctgttctacggtgacaggctcagaggtgcaatcgtaggcatgcgcctgtaacatgtaacccagcgccacggcccgcttaatggccttagatgaggatagaagatgcgagctgacgctctaggactgttctgggaggatcgaccgccacctcccaaagagaaggccgagaaggccaaacgcacaccgccggaccctgtgtggttacgccccgactacctgccgggccttgaagaagctctacgcttccccatgctggtgatgaacgacgcggaggtgttgcacgctgcaatgacccgcgacaggctgctgttcgacatcgagtgttatgagaactatttcatcgcctcgtttcgatcgctcgctacaggcaaagcggtgttttttgagatgtacgatgggcatccgcttgacgtcgggaaactgcgctgggtactggagaacaccacgaccgtcgggttcaactccctgtcgtacgacttaccgatcacattccttgcacttgcgggcaagccgaacgcattgctgaagcacgcgacgaaccagatcattctggagggttggcgcgggtccgacgtgatgaagcagtacaaggtcaagggtgttaagattgatcacattgacctgatcgaggtggctccgctccgcgccagcctgaagatctacggtggccgtctgcacgttccgcgaatgcaagacttgccgttccaccctgacaccgtactcagccctgaacagattgcctgcgtgcgctggtacaacatcaacagcgacttgacgagcaccgcgttccttcatgagtgcttgcgagatcacctagatctgcgcactacgctatcgaatgagtctggcattgaccttcgcagtaagtctgacgcgcaaattgctgaagctgtgatcgccgaggagatgacccgtcgtatgggcaggcgccctgagaagcccgtgatcgaggttggcaccgcataccgttacagggtgcctcactttattcgctaccagtcgcagctgatgaactgggccctgagtgtcgttgcgaatgcgaacttccttgtggatgagactggttccatcggcatgcctgaagagattaaggcgctccagcttgatatcaacggcagcgtgtatcgcatgggcatcggcggtctgcacagcagtgaaagcacagcagcgcaccacagcgacgaaaactacatcctgatcgacaaggacgtgacgtcgtactacccgttcatcatcttgaacctcggcctgtacccgcatcaccttggcccgacgttccttcacgtgtataagaacatcgtcgatcggcgtattgcagccaaggaacggggtgacaaggtaacggctgactcgctcaagattacgatcaacgggtcgttcggtaagctgggcagcaagtattcgatcctctactcccctgacctgctgatccaggtgacggtgactggccagctgagcctgctgatgctgatcgagcggctggaactggcaggcatccatgtggttagcgcgaacactgacggcatcgtgattaagtgccctcgcaaggggcagcacatcatggaccagatcatcgcgcaatgggaacaggacacgggcttccaaactgagggaaccatttacaagtcgctctattcccgggacgtgaataactacatcgcagtcaaggaagacggttctacgaagtgcaagggtgcctatgccaacccgtgggccagcaagaagaacatggccgagcgcttgcacaagaacccgacgaatacgatctgtgtcgaagctgtggaggcactgctgacgaagaacgtaccgatcatgaccacagtgcgcgggtgcaaggacatcacgaagttcgtgtccgtgcgcagcgtcaagggtggcgcggtcaaggtatgggatcgaattccgcctcccgcgcatagttcgcaggaggagcttctgaagctggcggggttcgtaccgttctcgaaagatagctgggtcagggaaggcgacaccatcggacgcgctgcaatgaacaccgaacgcgcgtacaaggcggcctgggacgagctgtccaagcctggtctgaccgagtatctgggcaagtcgatccgctggtactacgcggtcggggtgcagggtgagatcgtctatgcaacgaacgggaacaaggtgccccgctcggaaggtgctaagcccatgatggacttgcctgacgaatttcctgctgacgtcgatttcgagtggtacgaacaggagtgcgagaagattctgcaggcgatcggatatacctctaaggcctgataaatgggcttgtcggattttgccggcaagcccatttttgtgcttgcatctgctcaagaagtgtcctacagttgcatcacgtactaggaaaggaggcggatatgaacttgattaccttcacagctctatgcgtcttcgacgcctggatctggttgcataaccttcacatcattcttggagcttgaaatggacgaaaccctcgtcgaagagatcgtgctgcgctaccgcgcaatcgtgcctatgaccacactgggcgatcacctgctgttcatgaaagtgcttcacgcgcacatgacgcacccgcttcagctggatgcactgctgatcgcgaccgacgaagacatcgttcatgacgttgaaggtattgcgcaacacttcgacacgaatgcgggcgtttatcgcgagctgttttggccgcgctacgctgcgcagtgcggtggccaatgcaaccatgcgggccactagccgatcgcggcctgtacccccgaaagcgcggcccacagtttagttcaacacggagaaaacaatgcagaaagccaacaccccgtttcgcacgctcgctatcctcgtcgtgatcgtgcttctggtaggaatcgtcggaaaaatggattacgaagacgagctcctcgaacttgacatgtactgccagaacgtgcatactggcgtctggcccgactacgagggcagctataaggagcaatgccatgaaggtcatcgcaagactgatcgttagcgcgacgctcgcgcttgctggtgctgcgcacgcctgcgacaggcaatgcacagcagcctggttcaacagcgacccgaagacccgcatcagcgagaccgggccaatcctgtccgcctatggcgaggaagggaatgcaggcatggaagcggtgtcgcgctgcaagatggacgtcgctgtggtcatgcagggcaagcccgcctatcagcagtttatcaagcaatgctatcgtctgtatcctgcgcgagtacgggatcagatgtatcatgtcgattatcggtacgttccaacggatcgagtcgatgtgtatatccatatcgacaataaaaagccccgctgagcggggcttcgtttagatggcaatgcctgcggaccatcctccggacttgtaggctgtgagcttctgctcgtcctcaatataggctatccagcccactcgtggcgtgccgaacacccaggccgaccctgtccagacagcgactttgccggcttgccctgcccatgcaccagtgggcgaagctgccacgatgtatgtgtcgcccgatgcggggcttccaggcggtgttgcgagatcccgatccttcactgacagctgagtgccgaagcgccccagccacagaaggttcgcgtccataccagtgttccagccgttctcaccgagagtccagccgtagctcattccgcttcgcggttcagtagatgctgccattatgcgcctccgtaagagtaaccatatccggcaccgtaaccggaccgagtgaattcccaatcgtgcatctgaaggctttgaataccatcacgcacggcccacagctgaattctcagccttccataattggaccccatctctgcaagagtgaaggtgtccgtaaccacaccagtcagccccgcatgcgtcacgagcactgaccccgcctgggtcaataggcggcaagtgtaagtcgtgtttgcttccgggccgatgcttgctgcctctgtatcaacgagcgtcgcggtctgctgcaagcggtcgcgatgcacccatgtcacagtgatgttctggtctccccgaaccgtgtccggataggccagactattgatgcgcagcttctgcggagggtaggggcgaggcgctcgagcctggatcgtcaccgtttgcgctgtagcggatgcttctgcaagagtacccttggccgtagtgggcagaagtttgatccgagctacttcgccttgagcgtactccacctgatctgtctcaaaatacacatcagggaagaacacgcgagcgcctagcgcatgtaccgcgggcacagaatcaagcaccccgcgtcccacagtcatagacgagctactgatcgcggtaacgatgaccagttcattgtcgatgactgcataggtgttaatcttgacaatgtccaagtccatcccggactgaatcgggatcaccgtctggttcggggtgatagcagcactgaggacagcagtagggcagaaatcgaccgtgccggcctcctcgtacgcagtgttcgtcgggttcgtatagagcttggcgttacccgcgtcactcgtgggccgcacacctgtggccaccacgaaacccgctgtcgtcggaatgctacgcgcgtcagtttcacccatgcgctgacacagctcccagaacggcgcctcgatgacgcaatgatacgggcaaggcgcgggatcattgttgggatcagtccagccgctaggcggaggaggcgcatagatggcgctcgacagggcgaacacgtcttctactgcgctgatcttgacgacgttgctatcgagtgcgcccagctccacgttcgccacccgcatcacaagctggctgatcccgtagcggggccagctaagcacaaagacgtcaccaatgttcagcgatgcggccttgcggttggcgtagatcgtgccgctggcaagtggaacggacagcgccttgagtgaccgtgccgctaccttcgtggcgatagttccgttcgtgaatcctggaaactgcttcgtcgtactcacgacagactgctgctgtgcagccagtgcgatgtcttgcactgtgatcgaattgttctttcctgtgcttgcgtcccaatagacgacagtcaccgaattgacgagctctcctatggtgttacgtttgaaatccgaaatcttatcgacagaggactcgtccagcaccagcaacgaattgacatcgtatccaccgcgcgcgagcttgagcacaaactttcctgacgtgcgatccacgaacaaggaaccgtcgatgtgcttcagtacctcctgaatgaattcctcaagagttactgaacgatcccacaggagcgacatgcccatgccttcgctatacatctgatcggcagcagcctgaaacgtagtgtcatccacatcagcttcaggatagcccatgccccaatcggggtcagtgaggcactcgcggatgatgtgcgctgggttcatatcctggccgatcgctgccttcgcgatgtaccattgagcgattccgttctggcgaaccagtatgcgctggccccagaacgatgggcgtttcagatacgggttcatgccaagatacacttgacggaacacagcgctgaccacacctctgaagccaggcaccatcgaccccagcttgctcacgaggtagctgttcggcgtctgcgtgtcgctacccatgtcgatatcgaccgtgcccgatacaccgccttcgcgttcctcaccgccgaacaatgtgtcagcactgatagtgattgcgccgcctgtagcgttaccagtccaggcagtcttttcgtcgaactctaccttgatgatcttgtcgatcggtccatgacagaataccatgtgcatgccgagataatacttatatccgactgtctgcgctttgctacttccgcccacgagccacctccactgctgcaagcgccattccgtcattgctggtggcttccagcagcctatcggaatcgatgccgttgttcaagaaatcggtatagtccaggccataccgagcgaacagctcccgcacgccccgcgcacagtagcgcagctcgcgacagtgttccattcggacgatcacactgttcgtcacttcttgcctcccttcttcttcacagggacagttcgaagatctccgtaccacaccacattcggcccgtccatcttacgggtgccaaacagcacagggatttcgcgaccgacttctgctgtgggcgcctgaatctcgtccagtccggcaggaggacgagtctcgggcttgggcatcatcgcatagctgacaaccagcgcgacgatgaatacgattgcatagacccatgccatatcgttctcctaagcgatggacgaaccgctatacgggttcttggctgggatccaagggaacccgccgaagttgtccagattgttgaatttgttcttgcacgtttctttcaagtgatcgcagcctgggtagatggccacagtctgtccgcccgcaaggctggccagcggtcttgccatcgttacggtgtcacccgcatgggcagtaatgaatcgcgcgctgccgtctggggcgacgatcatgccgccggtgtagtaaccgtcgggctgcaatgctgcgcccgctacagcgacgaccagcccgctcgcaatcgacagcacagcgccctcatgcttgtagagctcgcgattgacgttgcagcccttcaggtacagcgtgcgcctgcacccgtattcgaagcgcgcacgcaggcccgggcgcttgatcgatgtgaagacggactcgcactggacctcgatctggttaccgctggtcttggcaccaacgacacgccctttccaatacacaatgaactgagcgtccggatcgccatagtggccgcgatagatcgttactgtggtcacgtcttcgggcgcgaacgcgaggtactgtgaagcgaacgcatcgtcccgagggaataccagcttgatggaatccttgaacgtgtcggtcgtctgtttcacgctatcgcgcttgacaggtgacggagtgaaggtctgccccagccggatgatctcattcactccgctgacgaagttccagcgggaaatcccctgcacgaattcatagagctcgatcggggttcctgtttctaacgacgtctcatagtttgcatatgtcatgactcaggtgtctccgctagtgcgatggaggtcgatacctgaccgacatctctgtgattaaacgtcaccagatccgtatcgaatcggacgtgggacatgaagcacacaaagtcgatatcggtcgttgcaaaggccgttccgatctgtgcgctcagcgacagcgcttcgttcccgtcgttatcggtgctcccggacgttactcgcgcaaagatgcgagttccgttgaggagctggatcatgatatccttgacggtgtagtatagcggataaccgatcggacttacagtgattgagcttgcggtgctcgccacgtcctgcaatatgaccagatcacggttccaggagggcaaccagaacgcgcgctgctttccgcgtcgtgcatggatccatttgcgcagcttccacacgtcagctttattgttcttgatgaacgagatcgtctgcatgaagcgcacccaattcgacgcaatgtcaatctggatgggccctgagccgttgtcgaacatgtcgatcgttctgacaatcttttcgctaaggtcgcccaccacagcagaccgatccgtcataacgggcttgccccgatatgtggggaatgaaccattatcgcccaagtccttgttctgcgtcacaaggaactgcgccttagcggtgatatacttgttcgccgcgcggctgtattcgaccccgctgagcgtcctggcaaagcgaaggggcgcgatataacacttgggccaattcttgtccaggggcagcttaagattgacgccagtaggggtcaccgtcgtgatctccagcgctgccagattggtatcggatgcccacagcatgatcaggtcgtcgtcgcggtagtcagcgttcgcagtatcgaacgcaatgaacgacgaaccagcggtaagaccgttcagtagaggagtcacttcatcccagactgcaatgccatagacgcggtgtgcccattgcgtgctgatcgctttcgctcggctgaactgctgctcgtccagaaggaacttgtgtgagaaagactggcggggagcttcgcgcagcgcaagacgctgttcgttgttgaagctatcgagcagatcggtcttccattccatcgtctcgtcgtaccctgtatcgggcacaaaaggccacagcaccacacggcgaccagtcaccgtgagcgtaggcgtttcggacgggaaatggaagctatacacagcatcgacgatcggagggccgttcgtgctaatgttgatggtatagatgcgagcttcgacagccgcaaagtaggtgggcgccgcttcgggttgcgtgagagtaatgccttcagttccgacctgtgtcaaagaggacaacagcttaggcgtaaagtaggctgaccacacttccacggttcgaacctgtgcagacaataggttgccaagtgcgatcacgcccggattcacgtggatgcgattgtaatagtcgtccaggaaagacttctggcgatatcccgttagtgtgtcctggggctcaagagagattggcgtattgtctgtgatcgtcccgtatgagaaaccaggcgcaagcatgacaggacgattcgggggaaccgaaccatctacgaagtcaagctcgtcataacccgccgcaatctcaggcgggttcttctggcgccatttgttgtaatcctggaccccgtaggtcgtgatcactgccatgttacaccaccttcagataggcgattccgcgctggaagctgcgccctcccttgttgtaccacgggaagaccttccaagtgtcagagcctagagtgaattcgtcgccgggcagatagtttgtcatatccatgtagcggatgcccgggacgacaccgatagggtgcagatagaggttcgctcgattgacagatacgacattcggagtcagcagaccgatattgttaagaggattaggggccaggtctcgaatcatgcggtcatgagtccctcccccttggcaggcctgagcaaggtgtgtcgtggtggattgtgtgccggaccctgcccagttgtcgaatgcgtcaaaagcacagcgcacagctgagccagatctcgcggaagaaagagggacttcagcggcccggaacgggacttcctcctgggaccaaggggagccaatttcgctcccaagccacgtcgacgacgtggtggcattcgtcacgtgctccgcgccggtcgcgtagaagaaacgaccaccaccgggcgtcgaggcgttataaagatcgagcgaaccgaacccgaggcgctgaaacacacctgttgaaatctcaagctccagataaatcgtcttgctgtccggagcgaacaggtaataagatggaaacggcccgaagttcgtcaccatgggcagaaaagcgtgatattgttcgctgcccgctgtccccgctggacgcacagggtatccaggctgacggtcccaggcgctgcctcccgcgtatccatcggaaccattcagagtgatgccatatttgctggcctgcgtagagccattgaccagcaatgaaccgttctggcaggaacgaagattgaaataggctgtacctttctgcagacaaagctcttggcccgacgcccacgctacccagcgattgactgtccagccttgtgcaatagcgaacaggcgcagcttatccagcagatctgtcgctccggttgcggttccagtttcgtatgccattcaattctccttaggcgggaagggccaacgcccagtattcttgaacttcggtacgcgcgacgttctgaaagacaatgtggttagtcccgcctactgttgtcgtgttctcggaagagttactgaagcccgagatagcgaatacaccctcgagctcgccccatactgccaacgtcggaagtcgttgcaataggataagcggttgagtgatataaccccctcctagaacctcgcgatatggaagtgttccgtctccgacagtagtgctatgcacacaagtaggccagacaccgatcgcaggtccgcccgtagcaaaaggcgacgtagggctcatcgtcatccgcgtgattgtattcggattcgaagacgttgctcgttgccctgttgaacgccatgtcccgtcaggaagccttatgtaaagagtcgaattggcgaattggacagtaggtgaagagcatgcgggcgtcgggaacacgctgtgagtgaaatcgttatacgaataacgccattccacgccccgagcgctgttgctcggaatcattgacccgcctaccgctatcggataaggatattggcctggcgttgcgtacggcaagaagaacccaagatagcccccctcgaaacttgtggagacttttaacccgaacctgaaagaacgacctgtcgctgcaaaccaataaggcattgatgtgttccaacaaggaaccatcgggcagatcatgggattgacgtcaccgtaactagacaacgcgccaggctgcataaagaaatctagtacgttggcgtcatatccggtataacccatcaagaagaggttataccagccgttcgaagcgtcgtattcgcaacgaatacccgtgtagatattctcagttccggaattgccgggcgctttgagaagtgcctcactaccgaaatgattcgcaatggtcccatcattcaactgaagtaacaaagaacgccacgacaccgtggcgccggaaccactttgcacgcgatcaatcaggatacgccaatacacatgagcgcccggtgttccgggcacagcgaaatccttcatctcgttctgagcgtatgttggattcgaacttactgtcagtgcggtagtccaagtcgaattatcgtcagagtattggagacggaagttctgtagcatcgtcgagacgtcgctactgttcggcgcccacatacgaacattcttgatttctcgtgctgcacgcaatgtcaatgcgatgtagctggtgccagaagcgtagccagtgcattgcgtataaccctcagcggtgttcgggttattggtgttgagggagcgtggcgtatagcgaaacgagtggaggatcttccgggccgttgcggaagtaggctccgtcatgtttgtcgtcatgcctgctacgccatctcggaattggcgattcacaatccaatcttgattcgccgcaacgagcgcagcattcgtcgtgaggaaggaaatgatcttaccgaacagatcctccaagttcgacgcggtgcctacttcgtttgccatttaattctcctcttagtagcccagcgcgcgttgattgcgctgaacgacgttcataatcaactgttcgccatcgtcagttccgaggtaatctccgacaatggacggatccagcacgttgatgatcttcggtgtgaccacagtaggctgagccgctgcctggtcgccctgaccctgtgctgctgtacccttgcgaacttgtgtgggcgtactgaccgtcacctgctcaccgggcgttgccctaaatgctaccatttgtgagtctgctccaccagtacccccgacggtgaagttaccgccggtcataaagccctgagtctgctgggagcggatcgctgccacctgcgccataccctgcgccaccacgacagcagccatcgccgctccgtagataccgccctgcgccagcgccttagttgcgccctcgtaggtgttcatgatcgcctgggtgattgccgcagccttaccgatagcagccagctccttgatgttggagctttgcaggctggcaagcccggagaagaagttccgcatgttctgcgtcttcaactcgttctcacgctgcgccagctgaaccttggcgttcgagtagtcctgctcgctgatcagatcgttctgcctcagcatgtcgagctgggcatagtatgtctggatcaactccagctgagcctgcatctggccttgcatcccagcggtgtcgatacccatgcctcccagcatgcccatcacctggccttgtgcgtcgcccgcagtgaagccactgctagggttggccagcaggttgttcatcgcttcgatctgtgtgttgaacgcgcggcgctgctcgacgctgttcgcaagcatttgatcctgagctgccaccagttcgttctggcgttgcagcatctcgatcttgctgcgaagcgcagcggtttcctcttgcgtgagcgtgatgccctgcgagcgcagatccttctcgatcttcatgtactcggactcaacctgccgcgcacgcgaagacataccgagcagacggatctgttcgtccatctcgcgattcaccttgcccagcggatcgatgatgtcctgatagtggaacttgaggagctcgaggtaacgtgcctgatcctgtgtggttatcaaacccttggcgaccgccttgttgagcgtctcctcagcctttgccatttccagcttcgcaccttcgaccggagcgatcgtgttcaacaggctgcgcagttcgttcttgagcttctcaagttctttgcgctgcttctccagttccttctcgtccgggccgggggccttgaaggtgcccatcgcttggttcagatccacgccggtctggttgcccaaagctgcggcgcgttgcttgccgattgcctgcgcacgggtgaagacgccatcgacccacttctccatgaacccgccttgctgctggaagccgtcatcgatagactgcgcgatgttctgaccgtaggtctcgaagaacttcgtatcgacttgcttccggtcaaacttgacggtctcaagcagatccatcccgactgcgctgcgcatcttattcacaccgttgatcacggtattcacaaggttctcgacaacaccgacgaccgcgttataggtgcggttgaacatctccttgatcgcgtcaggcacaccagcgaaagccctgaccacagcgatgcctagtccggtcagcagcccagcgatcgcgtcaatggtgcgcgcgatacccttcgccaccccagcaaagcccgaaccgacaccatcatagaagctggtatattgggcaagccagtttttcgtttcctggtcggttgcttgtgtgatcgactgatacacgtccgcaacgatgtcgcccagccccgagaacgcgctggaagcgagctccttcagatcactgaatacgaccgcgatgtcctcgcccacagcacggaacacatcgcccagcgtagtgacgtcgtccaggcctacgttgatctcgtcccgcatgagcgtgaggtaagtcacgacagcagtgagcgcgatcacaacagcggccagcggattcgcggcaagcacggcccacagcgcccgcacagcgttcgttacggcagtgatcgccgtaggtacgaaggcaacagcgatcgcggcccctaccgacagcgctgccgctgcaaccatgtccatattatcagcgatccacttcatcgcttggcccagcgtgttactgatgcccagtgcagaatcggtctggccaatccagcgcatgaaggcgttactgatcagcgtgaagccctgcgagatggtgaaggatgccttgccgaacttggcgtcaatctcttccgacccagcaagcatggcatcgaagaacgccttggaggtgagcttgccgtccagcatcatcttccggagcttgccgatgctaccctcggcgccgtcaatgtggttcgcgacgacttgcaggatcgcaggcgcaccttccaaaatggagttgaattcttccgctcgaacgatgccgcttcccagcgcctggcccatctgcatgagcgcgccttgcgcctgctgtgcgctggtgctgctggccgcaagcgtcttgcccacgttctccgtgaatttgatcagctgggcctgggatgcgccaagctctttacccgatcgcgcggttcgactgtagagctcgacgatatccgtgaagccctggcgggtgttctgtgctgtcttgtagagctgctcctgcacggcagcagcttccgcgatgtccttggtcgcgatgcgaatctgcccggacgcgcttgcccatgcgtcggcatacttgcggatctgatcgactgcgataaaagcagtcagcgcgccgagggcgcgcttgaggatatcaacaccgcttgcagctttctcagcggtgttgcctacgtcctccaggttccgcttaacgacccgagaaccgtcttctcggattcgaatgtcaatagtttcggtcgccattacagctcctctttcaaagcgttctgcaacaggcttccggcgccctgcgcagcagcgaccccgactaagactgccttctcaacaaagcccgacggggcttgtgctgaccagccgtcattcagccgtccgatatatggaaggttgttcgtgatatggattgcggaaccgcccttgtacttagcgatctccgtctgaccttctgcgattgcagcttgaccagtttgatcgagtgcgtcgcgcgtcccactggcaggcccaccgagattgacctgccagttagaacgcgcgcgacccgtatcgacaggggtggcgatgaccacagcgctatcaacagcgagcgcgaccttccgcgtcatggcatcagcgttcttttcgatacgcttacccatcacacgaatccgtcccgcgaactgtctcaagtcggccatctatttgcccgctcctgtttgttgcgtggcgctcttcaacttcttcgctttgaagtcgagatagaccttgtcgagtgcctgtatgtggtagaacagatcctcgcgttgctctccctcgatctcgtttgcgtccgcccactcctttatggcgagccagctgattggaccttctgtgttatagccagttccgcgacatgtggtcaagtcaagaaaggccatatggtacatctccagtcctagcagcagttcaggggcattggcaatcttctccggtagcggtaagcgttgttgaacgcactgttgaatgatgaacttttctgtggggccctgctccaggtagtagagcaggacgtccgttagttttttgcgtcagcctcccgcacctccgcgcggaagagtgcagcacgctggctctgctcctggatgtcacggaacaggtccggcaggtcgtcgaacagcttgatgcagttctcgaccgagaattccatcgcgttgccgttctcgtcctcgacgttctcccagccaatgacgacggtctcggcatacacttctttgacgatgcgctccaccagcgcggattccatcgtctcgttctggatctggcgacggtagggcttcacgcgcgcttccatccgtttggcgtaggcgttgttcgaaccgcccgcacgcgccacgcgaatgcagatcggcttgcccttgctgttttcaccgtactcgagcaggatgccgtccttctcgagggtgttgtcggtcttgaattgtttgtagagactcattagatcacctcatggtgcagtttcagggcgcgggcaccattgctcgcgcccctgtagcttacacgccgccagccacgtcaggcaagtaggagaagctctggaagagcagggtgtggccgaatttggattcagccgcgttgttttccagaggcagagtgatcgcctggtcttgctcaaccgccagacgaccatcacccagcgacagcagcgggatatcccacagcagcgcgaggttcttcttcagcatgacgatatcgaccgtcacgtcgctgttattgcgcacagcctgcacagcggtgacatccgcgaagtaggccgtcgtactgccgcccacctcgaaggtgcccgcgctggtgtcgaatgcgcccagcacgccgatcgccttgttcgggctcacgttgttattcaccgacagcgacatttcggtcgcaaaggcaaacaacggagtcggagcggcgtcagtgctgctggccagcgccaacttgatacggctgaagtcgctggaggtgttgaacgcggaacccggaaccagcgtggggcgggtgcctgacttcacgccctgggtgccagtgcgctgttcgttatccaccgcaacgaaggtgagatccatcgtcaccttgtcagcctgtgcgatgttgagcgtcagctcgttcggcacagcgcccacaaggtattcggacatcgtaccgttggcgtcggcgcccagcgtgcgctccacttggtaggtccggcgcttgatcagcgtcggatcgctttcgttcttcagcacagaaccgaagaagatgcgaatcgtcttgccggtgccaacttccgcttgcggggtccaggacaccttgtcgaattccaggtatgcagcgttgatgacgctcacacgagcgaatccacggttgttcgtgaattgcgtgccaacagcatcgccgcccacatacacccattcgccagcaatcagccccagcgtggtcaggtcgaatacaccgctggaacgggtcagacgaacaagcgaaccgttcatcgtaacgtccagagtcgcgcttgcgaactgatagcccacagcttccaacttggcagcagcaggcggggacgcttcgtcggagatcacctcgttgatgaccacagcggtcgcagtgctcgcgctggcgacgctcttcaggccgttgttggcggtgacaccgaagcccgacgccatgatcagctggttggccaggaagccggtcagccctgctgcggcagcgtaggtcttggacgcgccggtgacaccagtgatcggcgttgcagccgtgttcatgggtgcagtggttttcttctcacggatgtccgcgaagaagaagccttgcagcaggcgggtcgtgttgttgaaggtcagatcctggttgaaaccgccggaggcgtccaggtcagtcgtcacgcccttcttgcgctggcgcgacgggttgatggggttgcgggccacggtagcaatctggccgccgaagtccgcataggagttcggttccagaggataccagaccggcgaaccgggaagggttttgagagaagcctcttcggcgaaccggaggccggttacgttcgaatcgatcttgtttgccatgtgatcacctcacgtcgtcataagagaaggttgccaggacgttcaattgctcaaacgccccactcgtcccagcttcattcatccgcacgtctcggaaccagacatttggatgtcgggcggcctggaaagcatccaccacgagctgggctgcatcgtatccggccttggagccatctcccacgggggcgaacacttggatatagactgttccagtgcgcgaccagcgcttcgcaccttgatcgtcggataacgatgcttgacgaccagttgcgtgccggattgtagcacgagcccacactgtctcgctagtgggagcactgccgggcacatcagtccaaacggcagggaaccccgtcggatcccatgccgccttgaaaaacccgaggatgatatcgcgcgcttcatcgaatgtcatcgcttcaccccgaatacatacaggacgaccagcgggccaggcttgagtgcttgcgcccaatcgatattccagcgaacaccgtcgtcaagaattgcgtggaagtcttccagcgacacgtctgtcggtgcaacgagtgcgacctgctcaacacgatccaggagctcttccttgacaatatcgcgccccaggcccgaaccagacgcaggcacgaacacagcaggcagcaccttggccagcgctacagcaggggcgcccgggcccttccagggcttgctagtgtcagcggcggtagcatccagcttctggagtgtgacctgcctaccgttctcggcgatcagttcctgtgccagctggacgaattcattgtagtcggtagtcatagatcacctgataacctggcttgccgaataaaccagcccccgcaacagcatatccgccgcagggtacggacggaacagcataggggtggcgccaaggccggtctgcggaacagcgaattccgtctcgatcgggccgaccttctttttcgttgcgacaacagtgagcccgctggcatcaaccttgagatcaggcgccagttcagcagtcagagcgcgcaaagcgtattcgcagcacgcgcggcgcagcttcacagggatatccgtgtcagcgaagtcggctgcaccagtgcgaggccatgccagagcctgtgtggtcgtcttcttgctaccgatgaagcgctgtccgaagcgcccctcgatgtaatctgtggccttgatcagcgcggactgcttcacagcatccgcacccgtccagcctgtcattccgcggtcagcaaagtacccatcagcttccgcgatagtgacgtacgaagtggcgtctgcctttgcagtaccgtcttcaacaacgaacgccattatgcacctccgatcttagagaagcgacccaggccggtatcgagcagcacttcgaagccagctgccggagtgaccacagcagcgcgctcgacatagtccagcgtcatggattcgcctgccgcgagggccggagtcttgatcgttcggttgctggttcccgcgatggttgcagcggtagttccggcagttgcgccggctacgctcttgagtgcgaggcgcgcaccagcaggcagggtgaccgctccgacggcaggagtatcgatcagcgccgcgaatgctgtgcggttctgacgccctttccggttctttgcgatcacctgtgcctgcttcattgcttagcccccgcgagtgttgcgacgtgcgcgagcagcgtcgatcggcgccttcaggttgcttgccagctccttcaggttgatgccgctttcgcggatcatctgctggcgggcagcacgcgcttccaggttcttgcgctgggcggccagatagtcctggatgtcgttgccggtgctgcgctgcggacgcgcttcttccagcttgacgcgaagctcgtcttccttcgcacgcgcttcttcgaaggccttatcaacctcggccttgtgcgcgcgaatcttgctcacgagctcttcttgctcggccagcgtctcttcgagcgccgcgatgtcatcggctgccacgccagcggaaccttccatcttgggctgttcggcttgcccagcatcgaggtcatcagctcgctggtcggattcggttgcctgcgaggcttgcggggccgtttgcggggcggcaggggccgcgctttgctgctgctcaccgctacccccttggccttgtgcttgcggggcctgctgttcggcgctgggcgcggtgtagccggttgcagtggtacgggaaaagccaggcgccgccgcagcgacggaatcgcgggtcagggtctggtcggatgccagcatcttcacggtatccaggcgcgggagaccgtcggctgtccaatggttgtcgttcttgacatccagcttgagcagcgcttcaacaatcttgttcgtcatgagtcattctccggtgtgtggttaagaaacggacgcccgcattatactgaccacatgcaggcgtccgctacccttagtcgtcgccgagaacgctatagacgatatggagctcaccgctggcagtcagggactggctgtcggcgctgatgttggcatcgtcgatcagcaggttcaggttgagttccagggatccgtcggtgttgtccaggatcacttgcgtggcattggtgccacgtgcgcgcggggacacgccagcggtggctgcacccagcgcggtcgaagcaatgatatccacttcggaaccgctcagagtggcgtcagcggtcggcgcgctgccgatgctgtagtcaccgtcgaacgtatcctgcacgccagcggcggtcgccttggtgatctgcacgtacgacaccgcaccgaggaacaggatgttcccttccggcaggtcgcccaggacagcagtgccgaagcccacgccggtcgcgccattgacagtgatcgggagcttgttcagcttgacgacctgcttgacaacgtcttgacgggcaggggagccccggctggtagaacgaggaaggcctttcatgatcgcatctcctttagagggttaaatccgaaacaggggtcttgcgacccctgttccagtgcagattagaactcgcgggtgatgagacgcgcgatccggatctgcttccgctccgagaagacacgcttccacgaatcggcgtgagccaggttgttcgtggtggaggcgttgctcgggccaccgttcggcggggtgccagcgtaggcgtggccgaccggatggatgatccactcggtgcggttgaacaggatgtcctggccaccgccgttacctgcgctcggcttgcgatcgacttccgtcggcaccttgggcgaacccatgccaccgcgaacagcaccacgaccgaacagccaggtgttgaacacaccgctggagcgaggcacgccgtcatcgacgatcacttcgcggcccaggaaggtcgggatgcgaaccgcattgccattgacgctgtccgacacgaagtcgatcaggttgttcttcagcatgcgcgcatagacaatggaatgcaccatcaccatcgtgaggtcttccatgctgtcgcccatggtagcggtggcgtcgatgaacgactccgcgctgaagttcgtcacaccatccacgaagctggcgccggaaacgtcatgggtcatgtcgttctggacgtgctcggtgccggtgggcgctgcggcgttgtccgcgaacacaccgttcagggtcgcaacgaatgcggcctgctggcggcgggtccagtagtcggacacacggttggcgatcgcttgcatcggatccgcaccagcgaggtcgccggacaggtccatggagctccaggagttgttccgcgacaggcggacctggatctcggtagcagtgccgatcttgttgggcgtgctgtcggtcgccggatcatcggtcgagacgttttcggcgtcgttgtccagatccttgaaggacggctcgttgaaggtcagaccgccacccgcgagggcgctgttgagttgggcatccaggacgatcgcgccggaacggatcaggcgggacttttcctgggtcatttgctggacgtagggcgagaagatctcgggaacgacgacgtcagcgatacgagttacaccggaagccatatgaattctcctaaaaaggttcggatcaagtttgctagactcgaatccagcaccccatggcctggcgttcgatcgttagtatggctcatgccacaatgatcgcaatgtagcatgagccagtctagcttgcaagcccctgagtttgattatttgcggggctgcgggcgcgggcccccgatggtagtgccagcgctcttggccatctgctcggcacgggaacggttctccttgaggatccgaccctgctccgtcatgttccagccatcagcgctccacgggttcgcaccgccaccgctgccgctacggttgccaccagcgccacctccttgcgacgggccccaccagtgagtcttcttggactgcatctcggtcagccacacggtggcatcgataccgggagtcacgcccacgccgtcacgggtaacgaccttgccttcttcattgacttcgagcatgcgctcggcgtacagaagggcgtcttccactgcactggactggaagccctgtgccttgcccacagcttcgcggacagcgtcgtggatggtgcgggtcttttccttggactggaactgctcgacgacgccagagagctcctgcacgcgctgagccagctggcccttctcgcgctcgagcggggcgacacgggtcttgatgcggccttcgaccagttcgttgagcttgttctcatccagcttgcctgcggccgcagcttccagttccggaacgcggtccagggttgccagcacgtcctcgatcttacgatcgccgagcaagccaagacgctcacggacggccttgtggtcattccgttccttggtgagcgcaccctgcagacgttcgacatccgcctgggtcttcattccttccacctggagttcgaacttaccgttcttctccacatactctttcttgacgtcttcgggaaggtcgtcgatcgaatcaagaatcgctttgagagccatgctccatctcctagtcaaatgccactcatgtggcgggttgctgaccacaccattgtgatcaatacttactcgggtccagcccagcggcacggaatgcgtctgcgtgcttctgtgcaagctcccgaagggttaattcgtctccgttgcgatgaacgaacttgtccagttccaatccaccgtcgcggaacagctttgccttcgttacgcccatcacttcatcctggaacgcaacagactgacccttgagccacgtctggtagctggtcgaggcagggatcggccccaccagttcccgcacccttccgcgcgcccacttgtcgtaatcacctttcgttccacgcggcagcgcgtcacgagagctgatgtcgcccaggccgttcttgtctgcatattccttcaccaggatcttttccgtggtaggctttgcaggacggtcaccggcgagcgtaccatcaatcgcggcgatacgcaaggaccggcagttgaaatgcaacggcgggcgcggacccttgcccacggggaacgtctttccatcaaggctgcgacagatgggcgtcgtcctggagtccagcgtcgccacgaactgttccgcggtaaggatgtccgcattgtcagcgaaccatgcgtcgcgcgcaccgttggcaatgtgctgcacagcagtccgggtgatcgtttggatctgcctacgggtgatctccgttacaccgtcagcgcctctgagcgtaccagtcccgaccacacgtcgcgcgatggtcgccatatcctcgcctgctaccatgcccgcctggatggagctatggatgcgccgaatgtcgtccgctgccatcgtgtctgcccattccttgaggatgcggccctcgaacgggcgagacagtgcgatctggcgcaggaaccgcgcgctgggcatgacggtctcgaccgctacaggcagcaccgtcttgaagatggcgtcaagttgaatcggttcctggtacgacagctgaaccatttcctcggtcaggaacttggttgcttcgtcccacgactcttttcggattgcggccagcgtaccctgcaaggcttccagacgctgccactccacaggcttcgtcagaccttgcatcgtgcgcagcttgtcgcgaatacgacgagccaactcatcctcgctggcgttcagaatcgtggtcatgcggttgcggacatacccgctatagcgcaggatgtagatctgatgacgcaccagtgcgtccagaaactcctcgttggctgtcttggccatgggttacgctcccgcgccgccttgcgggggctgctgttgctgctgcccaccttgctggccctgctgcccctgcataccgggctccagcgctgggtcgccccctgcgcccgtaccgccgcccgacggtgcgttggcgtcctcttccccgatctcttccatctcggcatcgaagtccatcttcgttacaccgcgatccaccagcatcgcatggatggacttcttggacagcggtgcgcccatggtgcgcgcggtcatgaaatcgactagatccttacctgacatctcgaagtcagcgaactcgaggttcggagtgactttcacgtcgtcggggttggcgcccatccactgagcgcacatgcgcaacagcgattccagcgcagacgcaccagtcatcgcaatctggttcagcgtcgcagtttgtgcgccaatacgggtctgcagagcggagccgctttcggtgttgttaccgccagagttgatcagctgacccgaacgggtttctgcacgcttgcggtcgttctcgagcgcctggcgctgctcggacaggccctgcgaattgacgccgatgtacttcgcgtcaccgccttgctccacttcgatcatgctgcctgcaccagtgcggagcggtgtgccttcgtcctcagcggcatcggttttcttgacaccgcccacgacgaccagcgtgtcctggccctgcatgaacaagttctggcggtagtccgcttcgccccgatacactgcaagcgcaagcctgcccaggcccaggagcggaggttcgtccggcgtgctgacgatgtccttcgtattgacgaacacgaacggaatcttatccaacgtcacgccgcgcagttgcggaggctgcatctgtgtctcgtcgtacgatgcagactggccgtcgttgttcgtgaagacgccgacttgatacactgcaccagcgccctcagcttcgttctcgtccttcgcgcctagctggaggatgcgatacttggtctgcgacacccattcgaagtccgtgctgcgacggaaaccgctttcgtccaggaccacaaggttcagtcgcgcttcaccttcgtccgcctcgccgtcgtcccagttccgaatggactcagccacgtacatggcgatataaggcatcggattggtcggatcgggattcacgggcaggtcaagcagcagaccaaggcgcccggtgacaagctgttcttcgttgatgcgccgcagcagcagctccaggggctcaccgtaggcggtagccttgtcgcggagcgcttccatggtagcaggcagctcgatcgtcggggtcttctgccacatgaggccgatgtaggcttccacaccttctttcacgtagtcgtggaacaccgcgcggagcttgtatgcgtcataggcctcgcgcccaggcttgcccgaatccatgccgtccagtcgcatgcccttggtcggcggcaggtacgtctcgcccttcgcctttaccgcgcgctcacctttgtagaggtcgcgcatggtgacccaatcctctttgaattccgaatacttcggatgaaccgaatcaagtgccattttgcgcctccgtcaataagtgcccgtaactgtacccgatttcgtaatgattcgtccagcgggccagtgccagtcaataaaatacccgatcgctgtggtgatatgctgatactggttcttctgatcctcttggaaagacgaacctgcctggagctgcacagtgctcaaccccttgtggcaccacagcgcagtctgaggattcaccttcaacctcacttcgcctttcgcattgcagatcatcgcgcgcacagcgttctggcggtccttgatagcagggtgcgcaggacgcacgcgccgctcgaacttccagccgtgcaagcgtagcacgtcttcgatctcggtgtagtcggatttgtgcccgtgcttctcacccgcgcgacctgccgggtcgccgtagatatagactgtcttgttcttgtgttccttgtacttctcgacgaactcgattgccgactgacggctcaccgcactctcaagaacgatctcatctaggaagaagggaactccattgcggatgaccacaatagccgagctcagcggggtgaagttctggtcgtgcgtccagtgcagcgcttcgtgagggaggatccgctcggttgtgaaattctccttggagtagtcctcatagatacgaccgctggcggtctcgaagctcgctcgatattcctgattgtactgcttccgcgacatggtgcgcttcgcagcttcaatgacgtctggcgggagaatctcttccgacgtccagtggaacagcgcccagtcggggtcgttggcggtgcgtgcatattccgccatgtcataatagtggttcagaccgtcgggcacgccaatgaaccagcaccaggcccgatagtacgggcgcgtcggattcacggtgttgagcgcgggcatgatgttcgcttgcagcgcctcacccttcacgtccgcaatttcgtcgatcacaccgcctgtccagttgataccttcaatccgctggggctggtccagaccgatgatgtgaatctcggttccgttgggcaggtagatcttgagttcggactcgctaggcttcttggggtgcatgcacgacagcgtcagcgccttgaggtcgtcccaccagatcttcttggcctggttgtatgtgggcgcggctgcgaaatacttctcgcccggataccacatcgcctgacgtgacagaaaacgcttggcgcgttccgtcttgcctgagcgtcgtcctgcgggcacaatggggaagcgcacaccgtcttcaacggcacgcaacagccgaagctgaacctcgtggtccttcagctgataccagcgcgccatctggcgttctagaatgatcttgctcatacaggcgccctcgtcgcaaactcgcggaaggcgtcaatgagagcttgctcaccttcttcaccgccgtcaggacggtcaaggccgtatatgctggccagcttggcggcagcttgtacgcgggaagcgtaggggccattctgtgcagcctggcgcagcacgctcaggatcagggcacggtcttccttagcttgggcgtcttcgttttcaggggtcgcgcgttgcagttcagtgatccggcgttggacataagcctcgcccatgaacttcttcgcgtactccacggcgaaagcagcctgaaaccctacgcgaaggcaagcctggaaaggatcgaaatcctttatgtactcctgaacgaatagatcacgaagggccttttcttgaccggacggttccggctccatgagccgaggatccagatatagacccgatgtgttctcagccatgtgggaactccaatcggatagttaaggcggatcacccgcccaatttgatcggagtatagcgattctgaggccggatacgcaaccagaatatcagggcgagattttgcggcaagccggcaattctgcaggcttttggccggtgttccactcaataaggcgggccattttggacgcgcattcgcagaaggacgttatccagtcctgacgcgaatcaatgaggtcttttgtcactaccagctgacgatccgctgcctgctggcactgctgcaccagcccctcgggaggtactgcccgttccacctttgtcactacccgaatttccggtgtcgcaggtgttgttgagcaagcaggcaagatcaggagggatgcgctgattaagataattccgaacagtttcatttgacttctccaaggttgcgagacggttacgcgcgcgagcatcgttgtccgccagcaccttgtaatcggtcagcagccccgtgagggcctgtgcatcctggagacgaagttctttcagctcgccgatggtttcctgctgctgctgattgaccgattccactgcgcccaggcgctgctgaactgtctgaagctcgttctgtgtggtcagcagcgatttctccgtgcgttccttggataaccacatgctgaaggtgaagccggccgcagccactatcaccgcgatcaagacatactcgatgacgagcctggtcttgttcttgaagaagcccaaggcacttgcgagccagggcagcttagtcagcagaagggtgatcatcggcgcgctcccggatgggttcggagggttgcttctcgataccgagcttcttcagcacgatggactcgagcatgcggatcgtggcgttagcccccagccaacctgacacgccaacgatcacacccgtccattgctcggacaggttcatcgcctggcacaccagcaacatcagcaggccaacgaaaccagccgcgccaccctccagagctgcgcgactccacttgattttctgacggctgtcgatggttcgcatgagatgccccatcatacctccgaacatggcgaagagcccgtaggccaacgccttaatccaccagctattccacggatcttccggcaacatatttggacccctattcgattgatttcgacagaggcccatgccctgtttcgcggatagtaccacatgcgaaacgcatcaagctacaggaatcaaactacagctcaagcgcgaaccgatccagcatgcctttatcaaacttggcgcggaccttgctcgctgcttcagccttcgtgatcttcccgtcgcgattcgcatccagaccagcgttctggcggtaactgatcttcggatccaggaacagaacggaatcctctgcctgccccacgaacttgggcatcaggatcgccatatacatgtcgctgagcgtaccgatgcgggaagcataggggcggaaatacttctgaacgtaatccagctgatccacagcgctcatggctgccagctccgtggtactggtgcccaggccttgcgcagtgctgggcatgaattggatgagtccggtggcgccgctgcctgctgcattgcgcacgctggggctgaaggtctcgccggattcgaacgccatgcaggacatgagccagctggcatgcgtttcacggttccacttgaagccatcgcagatggcaaacactttgtcacggaaggcctgatcgacctttttgccccaggcaagtttcatatccagctcctgatgaggttgatcgcgaggataatcactgcccagagtggaatgctcagcaagacgccattcactacaccgcgagccgcatcaagatcgtcttccatttgtcagaccctcacgaaaactggcccgagtgtagcaggctcgggccagtaatagcaagttgatcagcttagtgggtgagccaataccccagcgcagcggcagcagccagcacacacagcgcgatcgcatgcgcgccaatacccatgggccaccgccagtacgcgcgcggctgctgcggcccctgctcgtcgcgcagtgctgcctccagttccttggccagcaacttagctcgcttgcgctcctcccgcgccttgaggcgacgctcgtgctcctccataattgccttagcggtctctggtgacattggaaatcgtggaatcactttgcgtctcctattggcgcgctagtgcctacgcgcagatggttcttcatatccacaggaatcacatcgaaccccatgtacttccttgagtccggtccggttacttgcagatctgcctggtgtgcgttggcgcgaatgagggcccattcctcccgacccacatacagcaggtcaggccaattgttcccgtcacgcccgagcatcttttcctgggctgtagcctggcgccacacctcgttttgaatgtcttgatatttcatgctgccctcaccactacgcccgaaccgacgtaaccgacgcggatcttaacaggtccgcgctccatgacgatgtggggctctcgctgcacaatctcgaaaccctcacgcttctttgcctccactgcttcgcggagctcactctgcaatcgcttttccataatgatcaaccttcttgccgaagaaataggtgcccacacgcagacgaccgtcgtccagcttcacgatgtttgtgtagtagtcgcctccaagacgaatccactgattggaatcatcgatcttggtctgaacctcgatgcgacaggaggtggcctggagcttcacgcgcatacgacgcgaggtgatctccttggtgaccggattgcggcgttgaacgtctttctggtagtgcccgaagcggtcggcttcccatccgcattccttgagcacatcgatcagctcttgctgtttcttcgccattgtggtcttgccgcaacgacgcccgaacatcacgatttccatggtgttctcctttggaattgagtacatgggcacagtataaacgggcgttacaggatgcgcaagcccgtttatatggtttccctagtcccggagaagcatgagctggcgctggagcatctgcaccgacgccaggctgtcgagcatcagatccagcagtgcatggaggttctgccggttgaggtcggcttcctgcccgtggttatcgagacaggcggcctggtacatgtgcagcgctgcatcgtagcgtcgctgatatacggtgttcttcaggacttcttcctgcatcgcctgcagaagctgtgctcgatccatcatttcgccaccttacgaatgatctcgaccttgccatgcactgtctcagtctcgaccttgccagtcttgtggttcttgaccggaatcccgaagactgcctgcttatagcgaatgacgtagccatgttcgacgtccgccacagtgcaacgggtctgacgcttaccatccaacagcacgtcgaacatcttgcaataatccatcgagttctcgctgatggacaagcgcttcgggtgcatgttcatcatgcctccacaggtttccaggcacccgtctggagcatgcgacgcatccagttataggcgaaggtctcgaagtcctcgtggctgatttcacagcgcataggggagtgagcctgaccacactgataggccacgttcgcctcgatcaggatgcgccacttgcgcttgccattctggcggaacacgacgatcgggcgcccgccgaactgctgcgcagcggtgacgcactgcttccaccatgcgttcagatccagttgctcctgacgcttgacttccaggcacatgagcacggggttcgtgatgtcgctgccgccgactgcggactggttctggttgcgctggaagatcggcttggtgggatagggcaagccctcgtccttgagcgcacggtaggcaatgccgttgagccagtcgcagacctcacgctccccgctttgccccttctgtctgatgtttatcgacatctagttttcctcgttattgaacaggcgtacagtaaaacagggctcacccgttcatacaagatgagccctgcaagttatcacggaatctcgcaggcgccggacgtgcaggccaaggtctgcatcgccacggtgttgtccgtcttctcgtaggtggccagatcacgccaatcgacttccggaacagggtgttccttctgccactgagcgaactcttcaggcgtcatgtcctgatagggcgcctgctgataggtgtgatcggtatgtggaaggaagctgatgcccgacacctcgtcgaagtgctcatagacccaggcgcctaccgacagccattcctcgtcacgcacggtgacagtgacggaaggcttgtgctcacaccactcacgttgatacagtaaccacagttccagggcctgcatcgcagtcacctgatcacgggtcacagcaccatctggcgcggacatggcgaagctcacgacggccgtgctgtccggacgcatgacatcgtcttcggtgacgaagcccttgtccttcatgaactggtagagcggatccttcttatcgacgcgcaccgtgcggatatagttccgattgtggcgtgcgtggataccgctggcggtgttgcagagctggctcacggtgcccgacggcttgacgcaagtgatggccgcagaaggcttgatgcccagagcttccgcccactcggcattcacgagacgtgcgtggtcacgcatgctgttcagggtgtgcgtgagcttgtcggcgcccagctggccggaggtcagcgcgttgtccatgatgcccgtcaagctgacgcccagcagagcttcctcggcagtgttgcgcgcccaggcttccgacacgaacttgaagtcagtgagggtggcttgcagggtgcccaggatggtggcgatctcgaccttctccatcaacgtgaccatcgtgtcgtcttcacggatcacgacttcggacaggttgcagagttgcttgtcgcgcaggatgatctcggagcacgggttgcagccgtaggacagttccttggagcggcgaccccagcgcgaagcctgtgcagcagcggcgcgacggttgaagataccgcgctcaccggacttggacttcacgagcgacagccactcctccatgaagatctcggcactcggcttctcggtgtaggccacggagttgttcgccaggccgcgttgcgggttgtcgttccaccactggccagcctttgcgtcacgcatgcgctgatccgacaggttcgacagactgatgagcgcactgcgacgcacaccgcccaccacgacgatctcaccgatcatgcacagcaggtcatgaacctcgatgctgttcagcttgcgacccttcgcgcgctggaaggtatcgacggtgaatttgaacagacgcttgagcggatccgggccggacgcacgaccgccgaagatcttgaggcgggcaccagcgggccggaccttgctgtaatcgatcttcgggatgtcaccgttccacagatgcccgaggagcgcatggtaggccttcgcccagccttccttcgagtccgccacgacgatggtgtcgtcggtgttgagcagttcgtcaggtacggcgggcagcttggtgacttcctggcgctcgcagctgaacccgacaccagtgccgcacatgaggatatagagggcctcagcgaacgaacgcttcgtgttgatcgccagataggaacagttgaacccagcgaggttctcacgctccagcgcctcaccggcagtcatcagggcacgcatagaaggcatgaccttgagctcgaggatcgcgttcttcaccttgccctggagcacctcgctgaactggtgcttcgtgcgcttgtcgaagaagtcgatatagcgctggactgtttcctcccaagtctcgcgccgccccaagtcatcgcgccaacgtgaatagcgcgagatgtgaatgtattgttgatagagatccatcaaggttttcctcttgcggttgtgaaagcggtatggtacgcgatcgatctgcgctgtcacaattcctatttgccgcccagctcacgagtgatcgcgtactccttggcgctcctgcacccgccatgatgacagatgcttccaccctgccccatctgcgagccacagcagcacaggtcagaatcgatcttgcgatagcgccacagtgcaagccagcgcctccagaacttcgccttgtagagggcagtcgatgccgctgtgctaccggacaccgccaggaacacttcgaggacgagccatgcagcctgtgcccaagacagattcaccccatgtaaccacacagctaggcccacagccgacgcaatgcaggtcagcgccactaccgcactgatggcgaacaacggcgcgacgctgcgctcctgctgcgcctctacccatggacactccgactgatcgtgccctacccctccgcacaggatgcacatcttcattcttcgtcccctgcggatgccagctcgatcatgaggcggcgggtgacgtgcttgcccacagtgaggccactgaacttaggctgcatctcaatatccacgagcagcttgtggcgctgccagttgaagggcacgcgcccgtccatgaggtagtcccacaggtcgcagcacttctcagggtcgaacagatccgtgtgaggcacatgaaggcccatcacggactcgagcttgttctgggcgtccaggaggtcgagctcgggcagtccgatctgtcgcatagagtctgcgatcgctgcgccgtcacggtgcagaagcaccttccgagcggggtgcttgttcagccagtccgtccagcgccagatgccagtgcaggacacgcccacgggcacagaggccttgagcttctcgtcccattcggaatagtgagtgtgatagagcgggtcgtggtggcacagcaccgcatccgtcgtgaataggttggccgcccaggttgtaccagaccggggcaagccgataatcatgaagtcgagcatggcgtgtccttcctgttgaagtatcgacgaatgacgtagctccgggcaacggacagcgcggtcatccacgccgtgatcttgaagttattctcccacagcatcggaatgtcgtggaaccagcagatcgcagcagtggcaagcatagcgatgaccaggccaaccagtgtattgacgacagcctcgatgaacgaacttcgctttgattgtccgttccacgggcagttcggcgcggtgtgaccttcggcaccgcatagcgtgcagaccttcttcatatgatgggctttccgttgtggcgataccagtgcggtttcagagcgatcttctcttggatacgttgtcgcaccagtgcaagcgcttcgggcgtcggatcgtagtccttgcggaagcgctcgtccagcgcatcgaacacaccgtcaggatcgagcagactgtcgcggttgaagttgatgccccgacgctccagctccgccctcagcagggcatagcgctttcgcagatacagggctttgtcgtagaagaagctgacgtgtccggtgttgagcgtgtaggcctggggcacagcttcgagcacaatagcctgacccataagggcctggacgtatgcgtcgcggtagccgtgcgccttaacgtcacgcgcctctgctgcccgcagactgcggcgcaagctcttgggcaccatcttaatttcgcggaactccgcgaacaggtgctgatccatcagttcttcgggtggaacaaggttaattcgagtcatcgccaatccactttcttcaatctagttgaggggttcggaatcgtcattgcgtagtccaggcacaccagccgcccgtcgagcatgccgaagttctcaggcttcaggtcactcaggaacgctggcacttgctcaggtagcaccgaccgatctactataggcgaagccttgcgctgtagcaagatgcgcccgtctggtgacaggtattcacacggagcgagccagtccgccaccttcttgtagtgctcgtgatcgttccagaatcgcatctcgagcacgttggcgaagtaacgccagttctcttcaggctccaccttcacgactagatcgtcgcgcaggcgacattcgaaaaccttccgatggataccctcgccgagcagcttgccacacagcaggttgaaggcgtcttcgtatgtcgcaccgttcatcagctgcccgcctgcttgcgcatcacgacacggaactcttcctccgcatcggaattgacccaggcttcctcagggctgcgccacgcgcacccgttcggactggcgccgtccgcttcaccgcgcatctggaacccttccaggaacgccttgcggatgcggtgctcttcggattcgatgttcgccttcaaggcttgcaggtagttggcgaggtcaagaacttcttcgatggcatgctgcacccattgcccgaggttcagatcttcgcgttcagtcgtgacaccatacttcttgagtccgacgacgctgcgatccaggagcatccggcggttacgctcgacgttggcatcgggtgaggcggtgaccacagtgacgcccttcagcagctcttccagcttggtggcggtcaccggagtgatatcaccgctcgtcactgcatcctgaaggtactccaggaacgacagcacgcctgcgcactgcacaccgacgcgcacggacagacttccgacttgttgattcatgcttactccttgaacgggttggcgcccgacactgcgatgggcggatgggtagtgccccaggcgtggagccagacgtgtccggttctcatgacctctgcgagctcgtctgtgctgagtttccacttggagatgacgtgaggcttgccttcggcgtcctcatagcgatggatgggcaggtcaatgaccttgcctgatgcgcggtcctcgggcgtgccgaacagcaccgcattcgcttccggaaaggacacaggccaagtcggatccgattccagcatggcatccagcgcctgaatctcttcggtgatggagtcgtccttgtcgggcaggttctcggaatgccacttcaggaactgccgatacttctgaatctcgcgttggatatagacagggttgccgtcgaacccgttgagctgaaagaaggcgcgtgctgctgcgaacaggtcgcacagctccagagcgatacgctcgtccagatcacctttgccatcccaatgctgcaccgcgccaccagtgcccatgatcttgcccgcgatttgcaagacctcaccacattcttcgactagcttactcagtccaggccacgtgcgtgatccaaggctgaagctaccgtcgccaggcgttctgaaatcgttcatacgattctccaatagtcaagaggaaacgcggcccaggcaccagtcccaggccgcgcaccatattcgtaggcgtgtggggcctacccgcttgcccgcccacccacatgggcacgcacacggtttcgcttcgctctatcgtccttgcgggtaaggcccatatccgggctccgacagagctaggctcggcggtttctgttgcgtccggtgaattatgtggtctcctgccccgccggaaggggagtcccaggcctcgcagattcatccaccgtgtatagtggagctcactgctgcgccgtgggctgttactcgctgcatactataacgcccaccgtgccggagcacaagcgggcgttttggatatcttgcaagcgctgagcaccgtgatgaccacagtgccacgctcgtcagtaggtgaagaagtctttgcagaagccgaggtatccgcccgtcgagttgctgcggcgcaggagctcggacaggttaatgcagcccacccagcgaccccaggcttccacgtagaacaccacatagtcagccgacggagcgtcttcccgaccttgcttgtcgaagtaggtcgcagcagcctgggccatcttagcggtagccttctccgctgctgcctgggtgccgtagttcttgcacgggttcttattggtcgagcgatagtcttcgatgcgtgcggtcagttcggtgatgatatttgccatgtcagttctcctagtgcgttgcggtatggtgttaatgtaggacgaacttcagacctatgcaagcgacttttgcaaatcttttggacctaaccgaacacattaacacgcaagccgtgagccatagcttataggtcggcgtttcagcaaacaggtctggctgatcgcgcacgcgcccgcattatgcgggattgctctatacaatataacaaataaacatattaacacttatatagagtaggcttatctaaaggagggggatcctcacccccggctgcgcgtattgtatgccacccgaggttgtttcgccgccccgctaagcccctggcctcctttatttcttgcaatacaaggccccatgccttagcttatgcactgttcaattcattccaggagtttttatcatggctcaacttgattttgacgctaccgcgttcccccagcctgcgcagcaagacccgctcagtttcttcaaccagattgacaacaatgatccggatccgtcgctggtgctgcaatacctgcacgcgctacacacgcaagcgctggcgcagggcatggagtgcgtatcggtggaacagttctacaccgaccaggccatggagcagtggcgcatcctttgggcagagcgtccgaaagacgttcaattccctgcccatgtggatctgcttcagatcaagagcattctgttcaatgcgctgacgccgttcaagtgcaatgcgacaggcatggaatgcttcagcatgcttgaccgtgtgaagcgcgctcaccagattcagtccgtgtggttagctgagcagaatcaccaggaggagacaccagcgcaaaagcgcgcacgtcagaaccgtgaagctcagcgtcgcttggcattgcgttcgaaggacgatggaagcccggagtcggagcacgccaaagcgctcaaggctgcctatgacgcttacctgctcgcgtgcaggcagcgcaaggaagcggaagcgcagtgggctcagtacgttgcaaccaagaaagcggagtacgaagctatcaaggcgcagaaaccgctcaactaaacatgtgttgcgataacacagcgaacgcgctacactgctgagccattcgggtgtcgctttcgcgctcctagtttgccggggaatcaataatgacggaagttgagaagactgctcagcaggagtttgacgagatctatatcacgtcaagcgaaatcggccaagagcttggtgtgtgccgagccactctagttaatgcgcgccgtcggggcctgctgcccgatccgattgtcgttaatggcgcgcagatctttgtctggaagcgtgatgtcgttcgcccttaccttgacgcatggaagctcatgctccaagcgcggaggggcgagctggtatgaccacacgcgctcaagcatgggcgcgccttccagctgagctcaagtacctgcgccagtggtgtgttgctggtgctaacaaggctccgctgtcggtcggccctgacggaaaactattcaacgcctctgtgactcaaccgtcgcagtggatggacttcaatacggctgcccaggtcgcattcgctaacgggtacgacatcggcttcgttctgcatgagtcggacccttactcgtgcatcgacttggacgtcaaggacgctcagaactgcgcagataagcccgagctctggacgacccccgaacagttcgatctgttctatcgcattatgctgggcttcgacagctatgcggaagcgtcgcgcagcgggaagggcttgcatatatgggtccggggcaacatcgggaagggtgtgcgccgcgatggggtggagatctactcgcaagagcggtttatcatctgcaccggcagcgtcgtccaggacaagcccgttcgcgactgtcagcctatgctgctcaatatggcgtcgcagatgcggcccaaggaacaggcggttgatttcgcgctgcaagagctggaacaggacgaagacgactggtcggttctggtgcgcgctgtcaatgcaggtaatgcggacaagttctgcgggctgtggctggggcaatgggaaatgatgggattcccgagccagtctgaagctgacctcgcgctcatgtccatgctcacgttctacagcccatcgaatgcacagtgcaggcgcttgttccgtgactcggcgctgggtaagcgggagaaggcagtcaaggacgatcgctacatcaaccgcacgctggccacaatccgatctcgtgaagcacgcgagaaggcagtcgatgccagcgcactggtacaggcggccgataccctgctggaagcgcgccaggctgctatgcaagagattcagcgcttgcaagggggtatgcccgcggctggtgccccacagcagcgcacagcggtcccgctgcacgtacaggggcacggtgatccggttcagctaccccagcccacagcggtcgccgctacgctggcaggccccgtgtccgctaccgtcgttgaagctggaacaaagggtctgccttggccgcctgggttcgctgggcgaattgcgcagtacatctatcagagcgcaccgcgtccagtcaaggaggtggcgatcgttgcatcgcttgggctgctggcgggcttgtgtggtaaagcctggcacattccgcagtccggtctgaacatgtatatcattctcgtcgcacgttctgctatcgggaaggaggcgatgcacagcgggatcagttcgttgatccgctcctgcaccgccagcatgcctacgttccacaatttcattgacttcacggactttgcttcgggccctgctcttatcaaggcatgtgccaacaatccgtcgttcgtgaatgtgtctggtgaatgggggcgcaagctcaaacgcttggcgcatgacgaccgagatgggccgctcagcacactgcgcacgcagatgacgaacctctaccagaagtcgggccctcagtccatcgttggcggtatcggctactcgaacaaggacaacaatatcgcatcgatcagcggtgtcgcctacagtatgatcggcgagaccacaccgagcacgttctacgaagcactcaccgaatcgatgatggaggacgggttcctgtcccgctttctgatcatcgagtacgacggtgacaggcctgctttgaacacgtcgcaggtgatgcaccctgacgcggcgctccaggacgcactcgtcaagctcgcattccaggcgcagaacttgatcggcgggcagacgtcccagccgcttgggcgcaccgaggaagctgctcagatcatgtgggcgttcgagcaagagtgcgacaaggaaatcaacagcaccgacgacgagtcccgacgacagatgtggaaccgagctgcgctcaaggtgctgcgaattgcgggcttgcttgcggtagccgacaactggatcaacccgtgtgtcacgaaggagcacctggactgggcactggacgtgattcgcagggacatccagatcatgagtaggcgcttggatactggtgacgtcggtacaggtgacacagcgcgcgaacgcaagctcatgtctctgctgcgcgactaccttgcgaacccgcttgcagccagttacaaggtgcctgaggagatgcgacagaatagcatcgttccgcggagctatctgcagatccgcacagcgcgcgtggcgtcgtattacaaccatcgcgcagggcagaacgcggcgctagaccttgctatccaatccgctgtgaataacggctacctcatggaagtggataaggcgaaggtcgcagaggcctacaactatcatggcaaggcgtaccgcgtgatcaagctgcccgactacgctgctcaagcgaagaaatcctaagccgatgcaaaatatccagaaaatgggcttgccggctcgcgtgtgttgcgttacattaacgctcatgcagttcaaccagtagatggaggtaagatgaaactcaatgtgaaagctcttcacccggatgccatcgtgccgcagtatgcgaccgtcggcgccgcgtgcttcgacttgcatgcgctcatggagaagccttggaaagagggcgaacaatcctatgcgcaagtcaatccgggtacgcccaccgtgatccgtactgggctggcgtttgagattcccgacggttacgtgatgctgattttcagccgcagcggccacgggttcaagaacgacattcgcctcgccaactgtgtcggtgtcatcgacagcgactaccggggcgaggtgcaggtcaagctcaccaatgacaacagcgacggcaatttcctcacggtgaagcatggtgaccgcattgcgcaagcgatgatcgtccctgtggagcgtgtggagctggtgcaagtcgatgagctgtcttccaccgagcgaggtgaaggcgggttcggcagcactggcaccgagcgcaagttcttcggcatgcctcaggagtaaccacagccatgacgctcattcccgaaaaccaagtcagccaggccgatctggccgagtggtataagctccaagaggagctgaagaaggtcaaggcgcgcgagatgcttctccgcaccaagatcttcgggtacttcttcacctcccccgtggaagggacgaacagctatgatcttccggacggctatgtgctcaagggtaagcacacgatcaaccgtgaagtggatcctggtgcgttccaggcgatgcgcgaacagttctcccaggccggcatccaccccgacgccatggtgcagtggaagccttcgctcaagctcaaggaataccgcgagctgaccgccgagcagatccagctcttcgaccagtgcctgatcgtgaagcccggttcgcctgcgctggaaatcgtgctcccgaagaaacgtgcggcagcgggggcacaaaatgcgggtgacaatcatagctgatgcgtcgttctgtcctgacacgaacgtcgccggttatggatattggattgcatccgaacgtggcaaacaaggtggaggcggtgaaatgaagtgccgtgtggagggtaacatcgcagcagagatgcaagcggtagtgaatgccctctacatcgcgcaccgcctccagcttgtgcaggcagaggacgaagttcttatccagactgactgcatggctgcaattgatgcgttcgagggtaagcggaggaatctgcctgcccaggaatgggaagcggtgaaggtacttcgccgcctgcgttccgaccatagcctgagagtcgtgttccggcatgtaaaggggcacacaggcaagaaggaggcgcggttcgttacgaaccatctctgtgacaagcgcgccaaagaagcaatgcgccgagctagggctcgggttcaacttggagaagtgcaatgaatcagaaacatctgttggcgctgctgcaaagcggctacaccacgatcgaagtcgtgttcaacgacagcatgcaagacagcctgggctcgggtcgtaccaagtccaaggcctacacctacaaggcccgcctggatgacaacatcgaagtcggcgatcatgtggtcgtggatagcccgagcaagggcctcaccgttgtcgaggtgactgctgttcataaaacggcgaagatcgacctggatgcccccttcacttacaagtggatcgtccagaaggttgatcgcacccgttacgacgagaccaaggccaaggaagacgaattcctggaaaccatgatggaagtcgagcgtgtgcatcagcgcgagctgttgctggccaagttcaaagatcacctgccggaaggtagcgaggcgcgcaagctgttcgagaacgccacgcagaaggttctggaggtgtccaagtgatcccgaactacagtggcaagggcgctatcgctctggacgtgctggatcacgggttcgtggccctgcgcaacatgtcgggcccgaaccgtcgtccggatgcaccgttcgacgcagacgatatcgatccggcacagtccgctcgcatgtcgtttgaccagatggacagcgaccgcacccgcgacgcggatctgaagctggcggactacctgatgcgcaactggcacaccagcccgttcgagatggtggaaatctggctggaaatgaagatgcccatcttcgtcgctcggcagttcgtgcgccaccgcaccgctaccatcaacgaggtcagcggtcgctatgtgcagcttccggcggagtggtacatccctgaagtcgtgggcggtaaggctgccaacaagaagcaggggcaggaagacaacctggacaagcctactcaggaatggttccgtcgcgtgctggatagtcagtgccgcctgtcctatgacctgtatcaagaagctctggagcgcggtgtcgctgctgagcatgcgcggacgctgctgcacctcaaccactacacgcactggctctggaagcaagacctgcataacatgctgaacttcctgcgcttgcgcgaccacagccacgcacagatcgaggcgcagcgctacgcccaggcagttgatcagctgctgcgccagtacctgccgaacagcatggcgctctatgacaagtatcgtcgtctcggaggttaagatgaagcccatgctcgcggtggaagcaccgaaagaaatcaagttccctgtctatgccagcgccaagctggacggcattcgctccgtcatcaatgaagacatggcaatgtcgcgcaccatgaagcccatcccgaacgggttcgtccaggactacctcgggcaagccctgttcaacgggctggacggtgagctcacggtgggccctgcaaacgacaagaacgtgatgcaggcaacgaccagcggcgtcatgtcccgcgacggagaaccagatttcaccttttgggtgttcgacttcttcacggatgccaagatgccctacggcgagcgcttgcgcctgatggagcgtgctttcaaagacggcgcgctgggtaactaccctcggatccgtttgctgaagcagacgctcgttcataacgagcaagagctccgcgcattcgagaccatcactctggagcagggcttcgaaggtgtgatgatccgcgatccgaaaggcatctacaagttcggtcgcagtaccgcgcgcgaaggctatctgctcaaggtgaagcgctttgccgactcggaagctgtggtcatcggtgtggaagagctcatgcacaatgccaacgaggcaaccctcgatgagcttggatatacgaagcgcagttcgcatcaggacggcaaggtgcctatgggcacgctaggcgcgttgaaggtgcgtgacgtgaccacaggtatcgagttcaatatcggtactggctacacggcagcgcagcgcgcggaactgtgggcgatgtggcaggctggtacgctggctggcaagattgccaagtacaagcatttcgaggttggcgtgaaggaagccccgcgctttcccgtgtttctgggcttccgcaaccctcttgacatgggagaagcgaaatgaaaatcaagtccgctgctcaagtgccgcccatcattggcaatttctctgacgaggaattgatccggcacgttgagcactactatccgaatctgaacggcccgctgcgcacgctgctcacccgcttcgaatcccgcgtgtatggtacgccggagcaagtgcagctcgagcaccaggccggccaactgcaagacttgcaggaaggcgacaacgaagtgagctgcccgcattgcggttccgtgctccagattgacttggagatcgaatcgtgaaggaagcctacatcgacgctccgcggtttcacaaggcgtcgctcaagctgattgcactctgcgacgagatcgtcacggactacaatgggcagggctaccgactgacgatccgccagctttactaccagctcgtggcgcgtgggcatatcgagaacacagtccgcagctatgacaacatcgtcgcgctgatgacgaatgctcgactcgccggtcttatcgactgggacgctatcgaagaccgcacgcgcggcattctggagcgctcgcactggtccagcggtagtgacattctgcaagcgtgcgcgcagagttatcacgaagatctgtggtcggatcaaccgaaccgtgtcatcgtcgtagttgagaaggaagcgctggcaggcgtgctggagcgcacttgcaaggaatgggatgttccgctccttcctgctcgcggatatcctagcgccaccacgttgcgcgagctggccaagacccgtataatgcgggcaagccaggaaattgtggtcttgcaccttggagaccatgacccgagcggcatcgacatgtcgcgcgacctgcacgaacgcctagagctgttcagcaggcaccgcgtgagcattgacttccgcaggctggccttgaacatggatcaggttgaggagcagaaccctccgccgaaccctgccaaggtcactgacagccgttatgagtcctatcgggcgcagtacggtgaggaaagctgggagctcgatgcgctcagcccgcaatacctgcatcgtctcgtgagcaaagaagttgaaagtctggtagagttcagcctttggaacgaacgctgcaaggaagttgaagaagtacggggtcggctgcaaaagctcgccgacgagtttgacaaaggagaaggctgatggctttgcaattcaccacagctgagcaggcgtcacagctctccggagtgaaagcgctggtctatggtggcgcgggtatgggtaagacggttctgtccgccaccctgcctgcccccgtgctgatcagcgccgagtccggtgtgctgtcgctccgcaaggctaacctggagcgcctgtttggtgtgggcaatccgaacatctgttacaacatgcccatcatcaccgtgacgaacgtgcaagacctgacggacgcctatgagtggtgtgctcgaagcgcggaagcgaagcaattcgcaagcgtcggtctggacagcatttccgagatcgctgaggtcgtgctcaacaatgccaagcggcaggtcaaagacccgcgccaggcctacggtgagctgatcgagaagatggagacgctgatccgcctgttccgtgacctgcccgggaagaacgtctatgtggctgcgaagatggagcccatgaaggacgagatgaccggtgtggtgaagtacggcccgtcgatgcccggttccaagctgggttcgaagatcccgtacttctttgatgaagtattccgcctcggtgtcaataagacgccgcagggcgaaacctatcgattcttgcagactcaacccgatctgcagttcgaagcaaaggatcggagtggcgcactcgctccgttggaacctcctttcctcagtgcgtgttttgccaaaatcctaggagcttaaaagccatggcacaattgaactttgatgcaacccaagtcgccccggatctcggtttcgagaccgtccccgcgggctggtataacgcgatgatcgacgagtcggaaatgaagccgaccaaggacggctccggtgcttacctccagacccgtttcaacatcatcgacggccagtacgccaaccgcaagatctacatgcgcctgaacctgcgcaacaccaatccggtggcccaggaaatcgcctacaagcaactgtcggcgatcgcgcacgctgtcggcgttctgcacgtccaggattccagccagctgcacggcctgcccatgaagatcaaggtgaagctccgcaaggacacctccggccagtacgaggactccaacgagatcagctcgatcaagaacatcaacgagcaggtcgatatgggctcccaggctggtgccgccccggcgggcttcggcggtgcgccgtctggcggcatgcctccgggcttcggtgctccgcagcaagctccggttcagcagcctcagcaacagtggcagcagccgcagaacttcggccaggcgccccagcaggctcccgcaccgcaagccgctccgcagcagccgtggcagcaagcaccggcccagcaaccggcaccccagccgcaacaggccccggcgcaagctgcaccggcccagcagccctggcagc

SEQ ID NO: 4 - DNA, 46249 bp, Bacteriophage
tggtcaccaatcggcgggttatcctgagagttagttagaccctagagactcggttgttgaatggtcacagcaaactatcgagccattcccaatgcctgccctaccaggggcttgtatctcaaccccatcagatggcagggacgtgcctatgttagtagcaaggcggcatccagtggtccgtctgtatttacgtggtggaccaatcctatcgtaggtacagctttgtagttggaaggctgcgacaaggcgccctatctacaccgccccggaccatcacgtccgcttactgtcgaggctacgctaatcccgaagtcatgcgttatgccgttgacttggggggccatcttacccttccctatcccttgtcaacccccgatgcctgccggtcttatacttgggtgacaaggcattccccttggtggcagccccgttagtgtccgtagactcggggatgagtggcccctacgtggaacgtggtagccgataggccaggttcctggggttgtcaagctagggagtttcccgttgccctatcgaggacacctacatagaaacggcgccattaggccatattctttggggttgtctactggttttcatacagtcttaaggactatcggtccccagcaaacccccggatatagacagtctttgattaacatagggtatcgtgggatgtcaataggggatcaaggggttatcaagggatattccccgatccacccctgaataccctaagatttttcttatgaataccctagggtctatccgatgaacggtagctcaggggttgaccctggactaaccttatggtatccctagggaggctaggaggctataccctgaggataggccaccccactgtctggggggactccctggggggatattccccagatacaccggagggataaaatagacctttggggtatccccggttataggccctggatccaaaggcaaccccgatacctgttggtatattactggataaagggcaataggccaggacatagcaaacagaggtagtctagggtatacctatggaacaacctcagggagtacctatagaacctggatcaagggaaccctatgccatcacttaccccttaccagcaacctacgaagggtagtcttagggtatatctatagaaccctatcataccgttcgtcgggtaaatcatgtgattatcaaagaaatatcaaaaaagtacttgacaaggtatcgaaatggggtataatagacccataggctcttaagatctttcttcctttgacttacctcttactaagaaggttaccttaaggttatcttaagatagtcttagcgaactcttccattccagcaaaacccctatcaaatccgggtcttgcgaccaaaaataaaaaaaaagatgaaaatttgacaaaatagaaaaaagtgtgatataatagtattataaggttggagaaattaaccttaagggtgctttagaattaattgggatgtagctcagttggtagagcagggagccgataactctcaggtcgtaggttcgagccctaccgtcccaaccattatggcccattaactcagcggttagagtgcctcccctgtctagggagaagccgtcggttcgaatccgacatgggtcgccattaactcctcgtagctcagttggttagagtgcctgtcttggacacaggaggtcgtaggttcgagtcctaccgggtgaccatttagagagatcggagcagtgtatgtcagacgaaaaggttgtctcgattagctgccctttctgctaaagaaaagctagacctctattgtgaggctctggcagatggcagggcgaataaaacccaagcgtatagccgctgggttctcctaatcacgctcaacgcaacgttgctgcataccatcgaaagcatgccgaatacatcaacgcctttatctctgagcgcatcgggagtcatgtccccatggcgcttcgtgtggttgtagagattgctagcaacccagaagagaaaggtggattctcaaggcagcccaggatatcctgaccgtggaggcttctggagctaagcagaaactgagctactactaagaatggggaagatatgtccgcagaggatctaatcagtgaagttcgacgaattcctcgacgaagagccagagttggctaaagtcatttcttttcccaaccttaagtacctttgatctaatcaagcgaagagaggggttggttctagcgggtacaaagactctcgggaagataatccggcggttatggccacttgcaactccctgggaagacggaccgattaattctagcacgagcagagacttggctagagaaagatagtaaggcagcctatgatgcaagcctccgctagtattatctcagctgccttttttgcactccagagctattcgatgccctctagttagcgtcaacttccagctgggtacagcgtggacgaagaagttccccgggcgacgtggagccttctgagccgggagttcgacagagcagcttgggaggccgaggatagtgcctgggctaaacagaaacccagtgcgcgtaagggaccctccaacggcccctgtggcgtgcatcaacagtaggtggttggcggtggtctaatggatacccaagagcggctacggaatctagtcagggagcggctgagcggcagaagtattcgcatgaaccagtataattcttatgggtggcaagagaagtttatcgcagcctcgaactgcgcccagttgccggctatgactggtaaccgctgtggtaaaacctacaccgggcctttatcatggctcgccacctcaccggtcgccaccccggagtggtggactggtagagtatgcatcgtccagtgaactggcggggatctccacggataccactcgggatattcttcagtccgaactactaggtgactggaaccctgaggctttcggaacggggatgatccccaaggaagatatcgtagagacgattcgtagggaaggtaaacccggatgtgtgcaagcagtagttgttaagcatgcctccggggcctctcgtcccttatcttcaagtcctacgaaatgtcccaggacaaattcatgggtactgccatcgacgttatctggctcgatgaggaatgccccaaagatatttatacccagtgtgtaacccgaacggctactactggggtattgtatatctgacgtttaccccagagcatggcctcacggagatcgtgaaggacttcctccaggatcttaaacctggtcagttccttgtccatgcaagctgggaagacgccccacacctcagtccagaagttaaagagcagctactcggtatacctccagcagaacgcaggatgagggccgagggtgttcctatgctcggatctggtgtagtcttccccattctggaagagaagtttgtatgtgagccttccagatccccgatcacttccacaggatcatcggtatcgaccttgggtttgaccaccctaacgctatcgcctgtgttgcttgggaccctgagaaagacaagtattacctctatgatgagaggagtgagagtggtgagacccttgggatgcacgctgatgctatctacctgaagggtggtcaccagatcccggtagttgtccccacgatgcctttaagcacgatggagcaacctctggtcgtagattcgtagaccttcttaaagatgaccacaacctcaatgtagtgtatgagcccttcagtaacccaccgggtcctgatggtaaacacggggtaactctgtagagttcggcgttaactggatgttgacccgtatggagaatggtgatctgaaggtgtttaatacgtgtacgaacttcctaaaagaaatgaaaatgtaccaccgaaaggacggaaagattatcgacagaaacgacgatatgatctccgctacccggtatgccctgttgatggcttcccggcatgcacgtcctggtgctgtacgaaacagtggatactacaggagtgatactgcaaagttgacccctgattggtttgggagtattgtctaatggctaagcgtcgtcgcaagattaagcctatggatgatgaacaggtacttcgtcatctagaccaacttgttaacgacgcccttgatttcaactcttcggaactttcaagcagcgttctgaggccctgaagtattacttcggagagcccttcggtaacgagcgccctgggaagtccgcgattgtatctagggacgttcaagagactgtagactggattatgccttcttatgaaggtattcacgtcaggcggtcaagtagttaagtatgaacctcagactgccgaagatgttgaacaggcagagcaagagactgagtatgtgaactacctcttcatgcgtaagaacgaggggttcaaggtaatgttcgactggttccaagacactctgatgatgaagaccggtgttgtaaaggtctatgtagaagaggtcctgaaccctaccttcgaacgattctctggtctctgaggaaatggtagcggatatcctggctgatccagacactgagattctagcacagagtgtggacgaggatggaacctacagtattaaaattcgcaaggacaagaagaagcgagagattaaagtcacctgtatcaagcctgagaacttcctggttgatcggttggctacctgcattgatgatgcacgcttcctctgtcaccgtgagaagtataccgtaagtgacctgaggctcttgggtgttcccgaggatgtactagatgagcttccatacgatgagtatgaattctctgatagtcagccagaaaggttggtacgtgataacttcgatatgactggccaactccagtacaactctggggatgatgctgaagccaaccgtgaggtatgggcctctgagtgctacacccttctggacgtagatggggatggtatctctgagttgcgccgtatcctgtatgtgggcgactacatcatcagcaacgagccttgggattgccgtcccttcgctgacctgaatgcctatcgaattgcccataagttccacggtatgagtgtctacgataagatccgagacattcaagagatccgttcggtgctcatgcgcaacatcatggataatatctaccggactaaccaagggcgctctgtagtcctgatggtcaggttaacctcgaagacttgctgaccaatgaggcagcgggtatcgttcgggttaaggccatgaactctatcatgcctctagagactcctcagctgtctggggaagtctacggtatgctagataggctagaggcggataggggtaagcggacaggcatcactgaccgtacccgaggtctagatcaaaacaccctgcactctaaccaagcggctatgagtgtaaaccagttgatgactgctgctgagcaacagattgacctgattgcccggatgtttgcagagactggtgttaagcgtttgttccaacttctgcatgaccatgccatcaagtaccagaatcaggaagaggtcttccagctacgaggcaagtgggttgctattaaccctgccaactggcgagagagatccgacctgacggttaccgttggtatcggcaacatgaacaaagaccagcagatgctccaccttatgcgtatctgggaaatggcccaggctgtagtagggtggtggtcttggggtcctagtctctgagcagaacctttacaatatccttaaggaagtcacagagaacgctgggtataaagacccggatcgcttctggactaacccggattctcctgaagctcaacaggctaaggccatcagggagcagaaggaagcacaacctaagcctgaagacatcaaagcccaagctgatgcccaacgtgcccaatcggacgccttggctaagcaagcggaggcccagatgaagcaggtagaggctcagatccgactggttgagatcgaactgaagaagcaagaggctgtccttcagcagagagaaatggcccttaaggaagcggaactacaacttgagcgtgatcgtttcacttgggaacgggctcgtaacgaagcggagtatcatcttgaggcaactcaggctcgggctgcttatatcggagacggtaaggtacctgagactaagaagccatctaaggcagtgaggaaataatcttgggagaacgttttggctatagtctagtgctgactgatgcggcacaacagatggtacgtgagaacgttcttcctgagcttttccgtattgtccaagaagagatcgagggagagtggaagtccacggcacctaaggattcagaatccaggaggccatctaccacgaactacatgccctcaaccgcaaagccaacttcgtattcaggtcctggatctgatcactctaaaggagtataagtaatggaccttgagaatcaaggcattgatggctctgaggcagcggaagctcgagatttgctaggtgatgacctcctggccccggtgatgaaaccgtgatggtaaagtcaggggaagaagaggaggaagaggtagtagacgaaggtactccagaggacaccgaagaggttgaatctgaggaggaagaagagggtactgaggaagaaccagaggttgagtccgaggaagatcctgaggataaactcttcgagatcccgattggggatgaagtctacgaggttaacttcgaggaactcaaaagtggctaccttcggaatgaagagtttgtcacccgacaggctgaactggaagaccagtatgcagctaagttcgaggagcttgatgcagagcgctctaatctactggccgagcttgagcagtatgctgttaccgctatcgctggtgctaatcagtatgacaatgtaaactgggagcagcttaaggcccaggatccagagaagtatcaaacccttcgactggaagccctggaagcccgagaccgagcccaggtttcatcaaacgtcgtaacgacattaaggctatgcaagagaagcgagccgagattgtccactctgcctacgttaagcgtcagacagagctagccaagaaactcatccctgaaatgactacggatgaatcttggggtgacaagattgtgtcttatggcaaatcgattgatactccgaggatgagatccgagggatatctgatgcccgccaactggctgtactcgatgcagcacgtaagtgggctgaatctcaggtccgtcgcaaggctgccctagagaagaaggagactgagctacctgccgcagttaagcctgctgctcgtagggcaagcctcagaaggggttcctaagcgggttaaagctgcccgcgctactgaaaggaaagaccagtcggttgaagccgctgctgctctcttctcctctctcgatattttctaatagaaggaaacggtaacttatggcaactcaactaatgccgtctcgactgtagagtcaacggtagcgcgaagaccttatcgatatcatcacaacatcgcgcctatgacaccccgttcgcggttgcgctatcggcaagggcgtagctaccttatcaccacgaggtggcgaagctgatgaactccgccagccggtagaacttacccgagtggaaggtgaggatgcaacttcatcaaaggctggtagcttcaccaccatgctgaacaacttctgccaaatctccggacgagaccctgcaagtcaccggtaccgcagataaggtcaagaaggctggtcgtaagaacgaactggcgtatcagctggctaagaagtcgaaggaactgaagctggacatggaatacgccatggtcggtgcccctcaggctaagatccagcgtaacaccactactccgggtcagatggcaaacatctttgcctactacaagacaaacggttcggtaggtgctaacggtaccctgccaactggtgatggttccgacactggtaccgctggtgacctccgtcttctgaccgaagacatgctcctgaatgcctctgaggctatctggcgcaacggtggtcaggctaactcgatccagacttcgagctcgatcaagaaggccatcagcaagaacatgaagggtcgtgcaactgagatcaccctggatgcctcggataaccgcattgcgcagaccgtggatgtctacgagagtgacttcggtaagtacaccattcgtgccaaccgctggttccacgaaaacaccatgttcatctttgatccgaagatgcacgccctctgctacctgcgtccgttcttccagcacgaactggctaagaccggtgacagcgagaagcgccaactgctggttgaatacaccctgcgtgttaacaacgagaagtccggtgctctgatccgtgacgtcgtagcccaggtctaacccaacggccctggggccctttgtttccttagaggtacatcatgagtatccaatcgacttatgcaattgacgaagaccttgggctctttatccgaaaggatactcaagatgttgagtcaatcctgtccgctaacgccgaagagcgacactggtgtcaatagcaaccgcaaggataatatgcgcaaggtagcaagtatccccttggttgtcgtagaggcactacggaatcgtcccatggctgaaggtggtcctatcgatctaaacctgattggttgtgacccagatcatgccgcaagatttacccgttggcttaatgaccgagataactatcggatgcggacctctgaggcacgggtgtaatgaatggctacgatcaataacgtaactgatctcgctattgctgctatccagtggtctgaccgtcaggatcttacccaagaacttctgatgttgttcattgggaacactactgaccgtcttaaccgattgctacgagtgagggagaacgaacacttcgaaactctcatggccttcggtggtggcattgagatccctgagcactttgttgctctccggtctatcacgggtgattctcttatcggtggtcgtactctccagtacatcacacaagatatcttcacccactatgttaactacaactaccaacctcagggtgtaacctactacactcggttgggtaacttctggcgagtattccccgttgttcctgacggtgccccgttcattgtgaactactggactgtactcccagagctaagcctcgctaacccaacgacttgggctctgacgaagtatccgcagatttatctctatggtgtccttgagcagatttatctgtacaccatggatgaagctcggtcccagttctggggtcagaaactcgaacgggctgttatggaactccagaacgaggagaatgccgctgacttcgctagcactcgactggcgatcaaagacattgaacgttaaggagcttcagatgcctatctttctaaaaccctcgcaatcaaccttctggctaccctcttcccaaccaaggtaatcgctaagtccatcgtgactggtgctaaggctttggcggagaagactaactctaaggttgacgacgagttcgtaaagtcctggaagacaaccttaaggagaagacggaggatgcaacttctaactgataacctgggcagcatcgtcagtgccctggtcgtatcctcggtagtgacggtaggttcctcggttgtcggtcagaatgttcatcaggctctgcttgaaagaaacatccaggccacggagaagctcacccaagcggtgagcgatctccagatttctatggcaatctttggggagcggtatgtcacccgaaaagaaatgaaagaagagataaaggaggccaagaatgggtcttgaggtcgcaacttatattaaccagttggtgcctacgaaccctaccggctctgatctgaagtcctttggggatgaccatctgcgactcattaagagtgctattaagaacaccttccccaatatttctcaggctgtcactgtaacggcagcccagctaaacgcagtcgctgatacaacccagtatgttaagcctgggatgatcgtcatgtggactggtgccctagctcagatcccagcaggttggaagctttgtaacggcgtaggtactacctctaatggtatcccgatccctaacctgattggggcattcccctggggtatcgacggatcttcccaggctgtaggtactagaggcggtagcgctaacattgtatgggatgggttcactgaagggactgcccttaccctagcccaaatcccatcacacacccacacttggagaactagggtgctactacccgcatcggttctgcgggtgactctggtgctctgacgggaggctctggtaacgcagccaataccaaccttgagactggccctgctggtcaaagtcagactcacaaccatgcagtaaagatcaacatgccgttgggtaatatcccaccgttctgttctgtgttcttcatcattaagaactgaggtatacaatggccctagagagacaagaggtcaagaaccctacggggattgtgaccgatatcgcccccgctgacctgccactggagaaatggtccttcgggaacaacgtccggtttaagaacggcaaggctcagaaggctctgggccatacgcctatctttgatacagcccaggccccaatcttggatatgttccctttcatccggaataacatcccatactggctcttgtgctcagaaaagaggctttacctggcagatgggactaccatcattgatgtgtccccaggaccttacgctgctagtataactaataggtggtctgtaggatcgttcaatggagttatctttgctaacgatggggttaaccctcccaccacctaccaccaactgagagtgtgtttagggttctacctaacttcccagcgaatacaacctttagacgtcttaagtccttcaagaacttcttgattggattgaatgtaacgtctaactctattgaaatgccccagatggtctggtggagtacctcagctgatgctggtggtgtcccggcctcttgggacccaacggaccctactaaggatgctggtcagaacactttggctgataccaatggtgctatcgtggatggtgtgaagcttcgtgactccttcatcatctacaaggaagactctgtatactccatgcggtatatcggtggattgtatatcttccaattccagcaattgtttaacgacgttggtatcctcgggcccaactgtgcagtagagttcgatggtaaccatttcgttgtaggccatggtgacgtctatgtccacaacggtgtacagaaacagtccgtgattgatgctcaggtccgtaagttcttcttctctgatatcaacccggataactaccaacgaacctttgtgctagctgaccatgtgaatactgaaatgtgggtatgctactcctcgactcgatctgagcctgggaagcattgcgatagggctatcatttggaactggaaggagaacacttggagtatccgagacctccctaacgtcctcagtggagcctatggcatcattgaccctaagacttctaacctctgggatgacgactccaaccctgggataccgatacgtcggtctggggtgaaggttcgtataacccagcgaagtctagtatgatcttcacgtccttccaggatgctaaactcttcctcttcggggagacttctacgttctctggacaatcattcactagtacccttgagagatccgatatctatctcggggatgatcgaatgatgaagacagtgaagtgccatcattccacacattactggtaacggtacttgcttaacatctgggtgggtaacgctcaggtacaaggttctggtattcgatggaaaggcccttacccataccggattggtcaggactataagattgacactaaacatgtgggccggtacatagccttgaagttcgacttctcttcggagggattggtacttcaatggatacactattgaaatggccccgaaggcaggtatgcgatgagtcaaaagtacagcccttcgattccaccacaggaagaggaggaactgctgcccttccttaatgaagaattcgttagggttggacagactcttaatgacctagctgacggctactggggaactctatggagcccctaaaattcaagccagggacagtaaagtattttgccccaggtggtaggtcagtatccggcatctatcattacgacttggataaccaatggagactcgcaggtactaaacccaaggacctgccggggattttatcctatttaccccacagaacaaccatcagccgatgggtacctgtgcctataggatgaacactgctaaggatgaagtatggataaccatgctcatgtctggtggtaactacactaatggagctactgtcctggatcttccccaggcgtattggcctcctgctgagttgtttatcccggcctattccagcatcatcccagcgcagagcactattacttatccacctccgtctgaccctaacgcacctccgttggatcaagtctttgatgttctcaacagggctactattcagactggggtggttaaccaagcaatgtttaagatcacagctaatggccgtgttctaatccaaggaattccccaaggagcagtcttcggggtacattcacattcccctggtggtgactccatgattcatttgattactcgtgagaatatcgatctgcttcctaccgtagtccctgctctggcccgagccttcaacaggacggacctcggtaagttttgtagacttcgaacacttggttcaattcctggttaattatgaggcctatgtcttctaccaggaagagagcggctacgctggtgtaattcaagtgtcccaagcaccctgggtaacatccttcacttcttctggagtggtaagatgcctgggaatgaaaccccggtaattactcggaggtagacgacttcctcgacagttcgcccaacgagttaatccgtcggtttatccaatgcgaaggtcgtcggggctgaagcctacccagagaaactcgggtacaccgaagactccgtatccttctatcgtgaggtaactccagatgaacttcctccaatttaatgtaaagcgtctgatggggttcgatgtaggggatgcctagattctccgggcttacaagggtggtagtaaacaagactctgtctctacacctatcagcaaggtaactataatgaactactctcgggtgccagtgattggctacatagcagggctttgactaattacgagagcgatcgaactttgaccagtggctgaccaaaatgctctccaacttgagtatcagcgaaggggcacaggtggtctcggggtgcccttcagtctctcctgggtagctcaggtgttagctctctggctgattaccttggtccttacgatcccaacaaaactggcttggcgaacgccattggtgcagccaacgagcagatgcaatgggacttcgacactacggtacgtccagacctgcgagcaggggccactaatgctggtcagtatgggagttcccgagcgggtgtagcagaaggtattgctaccgctagattgctccagaatcaacagaataacgcctcccagttggctttccaagaccagcaggcttacaaccagaataggttgaataccctgggtaacctgtcggctattgctaagggcctcggctctggtaatgccatgcaggtagatgctggtagcatgcttcagaaccaggagcagcaggaaatcaacggggctctacagaagtgggcctatgagaataacgtcagccttaacgacctactcgcctacaaggagcttatctccggcgacatgggtggaaccaatgttactacctcctcgggtggtggcggtggtggtggcctcaggtctgccctgggtgctctcggtggtgcttccctgggtgctctcttcggtggcccagcgggtgcttctgttggtatgaatgctggtggtagggtcgggggccttctgttctaatggcctcccttcctcagaaactgttcgctataggacagaacataggtggtggcaggagcgggttcagttgagtcgttgggggctcctaccgcccaacccaccttgggacaatgcaatcgggagagtggacaatcaaacccttttggcgcaatgggcggagcagcactcgcggctctcctcgggaaagagtggaagtcttcttcagaagcagtaccaagctttttctgtcgaaggggctcggggagcaagcgagcgaggcgcagcggaagttgcagcaagtatggggcaggtggaatcgcttctagcgcaagagaactcggtttcggacagcagccaaagtctggaatcctaagtaaactatttggaggttaatcctatggccagcatggcttatgaagggtccccaattcgccctagcatcctccgggctgctcagaatgaactggacatggcgcgaatcgcaaggaacaaactgccgctggctgtagagggctcaggaatccctgatcgtgtccgccgggctgctctcaggctgccctagagaaccctaatcgttggtctcgggttgccaagaggtggcccctgcggctgaggctacgggtcgtggagccttgggccgtatcgcaggtatcctcggtggtccagaagtgtctgttggtgcccaactggctgtaagcccaggagaactttgggatgcagagcggactcgtgctgaagaaatggctcaggctagtcaggttgtagagaacaagggtcccgggaggttgctcaagaggcaaaccactggcctatagggtagggccaacgtgcagcccagaacgccacaggggttctacggggctgaactcctgtcccatggggtaaatccctaaccaacccctctatcggttcgagatcactccagaggtggctctgaggctggtgctgctgtagcagatgaggaggaggctaatcgtcaggttatccaacagggtgcagctgagggtcttcgtactggtgctgtaagtcgtcctgaaatggcccaagctgtagttgaggctgatgcccagcgagaaggtgtagagcttaaaccccaagagcttaagaaccgggtgaacgaagagttgacccagatgaggactatggacaatgatgacctgtctcgttatgtatcttatgctctcattggtactggtcttctggcttcggccctagacaagactggtaaagctggggatatgttcgctgcttcctacgagcgtcagcttgatcgtaatctacaggctgggatcaaccagcagaagatggctgccgcagctgctgatcgtcagatcaaggaaaggatctggagcgtaaggtggctaaggatgctgctgatgtacgtctcggggaaggaaacctggaggtcaagaagggcacccttgagaaacctctcgtagaaacactggtcttctggatcggtgggctgaggaggctgcctcggggagagccaaccttgccctaacccagcgtggacaggatctggcgctaatcagcaggccaactacgggctgaaacaacccgtcgtggccaggatatgtctcaagagaatccaacgaaagttctgctgtacgtctgaagactgctaagatcagcgctcaggcacggcggcagctaagagcagccgaggtgaaactgttactactaggacgcccttggtatcctgagtgaagtcaatgggttctcaggctctgggtggtaagaagctgagtaagactgcccaacaggctattgccactgtcgaaatgaacttcgggctaatccggggggggctaatattacttgggtgttattatccagcgggaggctgctaagcttcaacctacgggaactggtttggtgctgatctggactatcctgctaacccgataaaggtacttgacaaagtatccaaaatgtttataatgaacctaggctcttaagattcgcttcttccttttgacttgccttactaagaggttagtatcctaagatacatcttaagagcctattctcttccacaaataaaaaggtgactatggctctttctccagaactgaaagccgctattgatgcggaactggctgaggtcaagggcctcgacgtagccgctgaattggcttccttgaatgagccagaggttatcgaagaggcaccccaggaagtagcatgcctgagcctaccccagacctgagtgcccctagtaactccggctgaccctaattctattagctctgcgattggtcgcggggttgataccatgcagtctaacatcggtggtaccattgctacccttggtgaactgactggcagtgactacctgaaagactacggcacacagatggccgaggagaatgctcaggaagcgtcccagtacggaacccctaatgttcggtctttcgctgatatccaagatatcccatccttcggttcgttcctaaagaataacattgtagaggctctcccttcgatggcccctgtacttgctggtggtgccgcaggtgctaaggctggctctgtctttggggccccaggtcgtatgggtggagcgctcattggttccttcctgagttccatgggtatcaacgtaggtgccctgagtaaccagatgaaggaactagaccccgatcaaagcaacccatggaccgcagtcctaggtggtgctggtctgtctgccctggataccgcaggggctggggttatcgctggtcccctgttgaagcaccttgggaaagacgggggggcgccaccatatgctggtacagtccggtctacccaaacaaaccgctatcgaggctgttacccaggctggtaaacacgctgtagtctctggtgtagctgaaggtgttacctctggtgcccagcaggccctccaggacactatcgcgtatgatgccgttgggcagacccaatccctgagcagttcatggataacctcctgactgctgcattcactggtaccgctatgggtactgccggtggtgctgtatcctcggggatggacaccctgggtcgtcatcaggactccgctggatctgccgtggttgaccctaacgcccctgcggcctcctaaggcttctgagtttcaggcctgggggtacgatcaagaaggcttaaggatgccctggaaacgaagctacgtcccctccctagagccactcgccaaggcctcccctatcgctcgtgagttctctgagaccttccgtgctgatatgagtggtaagcgggcctctggtaagactatctttgaggaccaggaactacaggcaggtaagtggaactctgaactagataacatctttgagggtaagtcttccaaagagatcgataggattatcgctgatacatccgctggtgtcaacaccctgaggctacccgtctgcgttctttgatggatgacgtaaggaatgaggctgttaaccgtggtggcatgtctgttgggaccatccccaactatatgccctttgggctgtctcctgagaaggttcaatccccagagttcctgaacgacattactccgtacttccagaaccgacaagctgctgaagatgctgtagctaactggctggttgaagtctcggatgatactcgtggtaacactgccctgaggttaaccgattggttactcagaaccagcagaccggggcttgggaagtagaccctcgctaccgtatccagggtgatccagatactctacgtggacggtttgcccagagtgatgcagtacctaagtatggtcaactggaagagagtcgggcctttggatctgtacctcaggagatactcaataagtattctcttaatgatactcctaagcgtctccaagagattcgggactacttcgagggcttccaccggattgcctttaccgaacggtttggtatcaacggggagaaggctaacgctaagattgcatctgctgtagctgaggctcaacgggctggtaagcgggttaccaaggaagaggtggatcggatgtatgacctagtggatgcctataatggtatgcacggtcgtatcaaagatctaatatcaagctggcggctgttacgtcgagattgccctcgtgctctccaggcttccctcgccggcttctcgacctaaccgagttcagcctaccattcgctaaggctggggttatgcctacccttggggctgtactcccaaccatgggtgaggtagtaaggcaagcagcccgcaggatctacagtgggattccgaagtctgagaccggtcggttttatgagtgatatgaaccacaccctggcctctgctacctctctgatggctgatcgggttggtgctgaggtgtttaactctactatcaaagacgatccgtggtcagttcctcattaacggcttgtccatcctaacccatgttaaccgagtgtttgcaacagagactgccaagcgggtctatcagaacaacctgatggatctagccgcagggctccccttcagttctgccaatggtgctctaaaggttgctcagcttcgggaaatgggggttaacatcagtaaccagcaggatatctcaagctaatctccccagctactccatctgaagtcctgatggctaacaacgtcaagactttggccatgcgtcggtttgtagatcaggtagtcctcgaccccaccttcgctgataagcctatgtggatgagcaacggaaacgttcagatgttctccctcttgaagggttacccagcagcctatggtaacatcatcctaccgatgttccgtagacgaatgagcccacacttcgctggttcctgaccaacgctggtatgggtgccgcaggtgtagccttcactctggtctgatgatgagttccatccaggtatctccagatgaaagcttcgtcaatcattaagttcggtggtctagccgagagataccgcagtccgaacaacggatgatggacggtgatgcaacagatgccacccaggcttcgcgatttacgacatgctgacgggttactgtcgagggactacccccgcagaggtagtcttgggtccagtagctggggccgcaaactgagggtgctatggctgttggtaaaactatcgcttcgtttggggacgacccatccgcaggtgaaatctggaagtttcttgtataagaactccagcacgtcctttctgtttccggtatggaagcgatggaagatgctctggatctttatgagaagtaatatggcaacttatagaaactgatgccgctggtcctggtggccgtgcctacggttgatgtgctaaagtcttccgacgtaatgccgatggggatctcattgagattacctcggatgccggtcgggtgaatacttcaacatcgttaccgctacagagttcctccctgactattatgcagttaaggagaacgcagccctggtagtagagaacgttacagcctccttcccggagaacccctcagaggccgttatcccctctgtcctggtcaataccctcgtgggtgctcctggggaaacctcgggtggcaaccgtgaccctggccacgtgattggtctgttctctgagaccatgattgaggcaccttgcggtactgcattcggtagtgaattccgagtagaccctcgtcgggaacacctgggtgtttacgtggctattaagcacgtgattggcccggatgaccaaaacggtggtaccatcggggattacattatcgagcagtttgatgacatgcgtggtcctgtgaagaacattggttctctccaacagaactacctggatccccgccttgtgactactcaccttggtggtaatgtcgtcaacacccagcagcttactcagaacattaccctgactaagcagcagtctggttggttcttcatgtctctagggaccacggatatcaccgtgacccttggcggatgtaacccaggttgtcacttccactttatccagggatcggcagctaagatcaagtttgctgtatctccggataaggcttggtacgctaagggtaaccagacggaaactgatggtcaattcgggaatgcactgtccgtgtatatcccttcggtggtaccgtgggtacctttaaatcggcagcaattaggagttaggttatggcaggttatatcgctgacaacgacggcaatagtgtattcgttattcaatcgaaggctattgctgtacgtaatgaagatgggacctttcgacaagtcattggcccgaaagactttgagccagtgaaatgggaggatattgagggaagcctgagcttctggaggtgggtgctaaggctagcgaggctaaaccaggtaactggaagcccaaggctagcgaagtgagtggcctagatgcagccgcggcttacgtccagggtaaaggtcgctgagatcccgtggcttccctatacggacactcacgaggccctcgtggataagttcaacacactgctgaacgcctctcggagctaaagataaggccccttgggatgatacccttggggcctttttttttcgagacctcgatggatacctacagtgaacctgcccaagataatacatcgatgaggagtctggatatttctcccagggtcaggagtaacatcagtcagctatatcctacataaaccagcagggcaaacaaggctgctaccgcaatgtaggtccaaagggaatccacccttacccttttgatcttcgcgcatagcctccagtctttatagaagacgtttgaccgttgatctacgatatccagcatcgagctaaggaagagatattcttccgtaatctctcggactttatcagaagcaagctccagttccgcttggaccttcgcaagattgctctccgcctcttcaagtgccttctccagttcagcctttgtcatagtacaccaccttgtcactacccttacgacatactcaggtcaatggtccaactcatggtcgggcacttgatccgaatcatcttggggagccatcaactgttccaatagctaggtgggaagaggtcttctgtgtaccagaaagactaccttgtcttctcccacctctaagttcacgatcctacacgatgctttcatagttacccaagatatcggaaggtgaacactggggatgtacaggatctccaggacctcgatggaataccatccaccttaagcccctcctctgcacctttcccaagcttcatatcagccagagttctgcggagatcggcgtcttaaacatcaacccgttgaccgaagtcatactcagacttaatgtagtaccaggtctaagagcttttcacaggaattctccacactcatcagcttgaggtcatactctccgtccttgtggttccggagaagggctaccacctcgccagtggtcgttaccctggggccctttgtaggactcatcatgggtgtgccaaagctaccgactacaagcccgtggattcgcttcttgcccttctgctgcctcgatgtggtgcttggatcctgttcattggccttggacgggaagctgcgcttgcgtcttattgagggcgtgtaaactccgccgtatggccgaccactgttgggattgtagaagtagttagtgggccggcgacaccttcgacttaccacgtcgaggaaatcatggacaatccaatcggacaatcaaaatgatcgtgcccaataaggcaacccaggcagggttgatttttcatgtgcaagcgatacgctcttcgtggtttccgatgaagaagtgatttctggtcggtgaatgcgcttcttacaacccgcttggtgttgctgtaggcggcggcgaagaggatcgaggcagaactcgcatcgcatcattaccagcttgtatgtcagcgaggactcgacggccttcgatcttagcggtaccacggtcgtagcttgacagactgggcatgtcccaatggtccccaatatgaacaattcgcttggggcggttacgtgcgatccactccccaaggttccgaggtgatcgatgttgacctcggatcgagcagatttcaatggcgagtgtcttcattatacttcttactcattagggaaggactccttgaaagtctctagagtaaaccagcggaagccgttacgctcggcccattccgccatggattgctttgtgccatctttacgcttggaaagccaatggcaagcttgtgttagggcgctcgtaaacacaagttcagtatctgggggagagcttccctcacccagatattgccagatgcctctgaagcttcctggagaattgcccttgacctcacgaccaacaggttcttcgtcgatccacagggttgtattgtcgataccttgaagtccggcgtagcgatgacgtatggcaccggctccggcgaactgcatccaaggcatcgtctcgtggacgatcctctcggtttcgctgtcgtacttcgtcccaatcaatgacttcagtttgggtctgggcctcctgctttgccaatgagccctccttcttgaagcttacggacaaccgatagcgtcccctcagtgaggacagagttagaccggatcagcaatgaagccaatccccaggcacacccggaactccggatacttaagtttgatacgttggatgagacaacgcgcacccaacttgattgtcagttaggggttgagaatgatccagaaggggtctaggactcggttaagagtaatgcacttccttgctttatcaaactcataacccttgaacggtagacttgagatttcagtccacggacacttatgggccagcatgcaatctcacacagtcctacatcgaactctgctggatgggagtgggtactcacgacaaggttgacgggtaggtcaacaccaatggattcccacacatcaaaccccgcaggatacccatcaggcttatccccagtcctacaccggaccttcttgtggcccagcttgttgtagaatcgagtgacctctacctctagggtatcgtcatcacaggggatcaaccgcggtccaaagcgactacgccgagtatcagtggggtcctccacatggcctacggacatagaggtcgatatccttaggtgcaacccgttgtctgcatcgaaggaaataccagcgaccttgtagtcgaacccaagaccttcgagggatctcaaagagaccttccacagatcctctgtgcttcatcaatagaatatttcttcatcgtcatgaagtctcccaatgtgtttcttcagtgagcagtgatactcgttaccggactgctgaatatcaaataaagagcggtcccgaatgaggtaggggtgaaaattctccagaaggtattgctctttccaattatccgtactgcttctgttggtaggcgtagcgcaagctgcgaagagatctctcgctaagctccccaagcaaatctgccgctgtctttggtccgtccctgggaggcctggtatgttatccacggagtcaccaacaggagttgcccgtagaggaatgccgtaccgttgccctcaagcttccatgatttctgcggcttcttaacgccatacattctccaagaagcggagacccttccaagaccatcaacttgaaacggtcccaactccggctgggaatctccacagggccaactgtaatggtagcatcctgggacttggcggatatccttgtctctagaacacgctgtaaagttatctccctcttcgatccctcgaattccgagccagtcatcaacctcgataccgtggaaagtgattgctccccacttgtcataagtctggccgacacggtttcccagtgatgaggcttctcaagaccgattcgatacccttatattgcttgattttcgcaagctccagcctaaaatttccttggccagtaaggtagatttcacactcatctgcatttacccttttgataatttgttcgactttatcatcgacgagcttatggacctcttcctcaggccatggcttctccacctggatatcgaagatgtgttccttcgacatagccacgtgtcccaattcgtagcgaagctaaagtacgtcgccatcaattcctgcgatcatactacttaccctccttacgctggactactcccagcattgagcccacgctctgccgtaccttatgttctgaacagcattatatgggaaccctagtttagagatttctgtattccctagaccacttttgattaatcggatgatctctttggcaacgccctcgtctatagtggcagctgggttcttgctacctctaaagtctgcgtttctccctttccttgatctatccgtgttgttgtcacccttagttccaaggaataggtgatctggtcttacacaagatgggttatcgcactcgtgaagtacatatagtccttctggaatccctcgaagtgcaactcccaggaaaacctagggcgtacccaactcgtttgttccacttgaagcgacttctaccgaacttatcagtagatgctgtccagttccagcaaccctcagttttatcaaccttggaccagaacctctcttcaatcatcacgttacctcttctacgacctgagactcttttagcttctcttcccagaagacacgaagggcaaaggcttcacccttggctcgatactctgggtgctctaccaccgggttaaccagtgcctcgtagcccttccagtcgtaatattcactctcttgacgcttggccttgtccatagcttcctccgttaggctgtagcctggggaagccccaggtctatcgacgccaatcacagagtagttgctaggaacagtcttagcccttgggtccaacagaagttccattggattcctcctcttgctgaatgacgagttcagggatgctagggcgttcccacacttcgtgataccagtcagggtagtttactttggggggtccaaagcttcacccttgtgtcgctcaaggaggtgtctcccgaaggcagcgtcatatcgctggactgttatagaacagacctcaaccccactgactatatttgctggctccgaagttagcagcggtgcccactgcatatagagccctcgggaacgcttcgaagatgattccaacatccaccttaccgctatcaagtttagcgcccggctcaccggattgattccattaggatcgatactctacttgttaagattgtatggaactcaccgctggcgcactttactctcgatttcgaattaagcagtaggggcagcctgaccgaaaataccccgactcatgatccgctaggcccttagataggagcgtcttcgtcatcgaatacctcgaatacgtcctcaggctcttcctcggtgttgaaggcaccaccggaacagcggatcgtcatcaccgtcgccaccggatacgatctcgtggagtcgtacaccgcttttgatcatagggccgtcatagtacccgcctcgtgggcgcttttgggtctcgatcaggatgccaacttcaccagtagagccaccccacgggttggggccatcatacggcttgttgtccgaggtcagaaccaccggcttcattacagcagacttgcgctcaccatcttgcatcaatccacgtgcttcttctgcttgaccttgaacaggtactcgccatcacgctcttggtatttgatggtacccttcagacgggcatctttagttccatctgctgtaccagcttgtcggcctcttccttggtcggaatgcagatggttacttggtagacctcaccgtactcggtatccggagttacgatgtagggaagatcagcttcgctaccgggaaggtgaatcgttgggaaactttcttagacatatcttaaacctctcgtagggaagaaggtattataccacaaggggctgaaagtcagcccccagatgtatcagtgtgtgtcataccatgagcgaccagcgatagaatcactagccaaaggacagttaaccccgaggagttccctcagcatcccgaacgcagacttccatctgctcacgtagcgcctttgagatcctctgggtggcattcccactggccttcgtcgtggatatccaagactttccaagccctcaggtttaacctacgaacccgctcgtctaggagcaccatggcccacttcatgacaatagcacctgctgcttgtaggagggtgttcaatgccttatggatcatcacgtcgccagactcagaacgtcgcatggttagcttttcgtccgtctagcccttcgagataacctctctcggcttcctgcttagccactctcaatcagtgcagcttaaggtcagggttagcctcaaggaactgggcggagtctagcccgtctgccctggtgcctcaatgatagtcccgatcttggcatccccagcaccgtagatgaacgcatcaaagttcaaccagtgtcgctactactggcccgcctctcggctgccccaaggtttcccctggggatcggactatatcatcaccctgtcttccaggggctgggcgcttcgaacccgcttgggtcctacataatagtctctgcacctttacacttgaagatactcagcagccttccgaagaagctctggagaatctttcatcagtcccaatactctgttacagttgtgacacaagagtccacgaacctttactacagttgcatggcagggtcaacgaccaagaatgcaatgtgcttagaggggtccatcaggaatccttctccccgcagatatcacacttgtggtctcgttcatcagccatagcccttacttcatcatacgtgagtccatagactctggtgtagtaggcattgatcctaccctccttgcactcgtctgagcagtagtggtggctagggggggcgtaggctggaactccgaggagcactttctacagttcttaatcttaaaccatccatttgggtacttcataaacacctcccataaaatattagtataacacattctacgggaaatgtcaagtgtcttggctcaggattcccatattaaagggttccctgagttcacccagttttaatcgagggtttccccaagtcatccatatctcacagatgaaggtcttagcatcgtcccgtgtgggaagccctgcggctatctggttggccgtgtgtacatcaccctcgaccacctctttggtgtactctgggttgttgatgtaggatgcaagcatcgaagctctagaccaacaccatcgtagcccacgaataccaattgattcgctgggacgtatgccagtactttcctacagtcttccacttacccttcttgagttcctccacgatgttagtgaagggcctaaccctttcgttctccccaagatcacggcggaggacagtccatttccattcaccagcctcaggtgtcccctggaacaacccacggatttcaggtccgaaaggagaacgagcagcggggatattgactactacggtgcctcatgcggcccgtaggtgttactgaggggttagcactccctctaggcgtccatcaggcctcacctgatctaccatgcaagggaccgacggtgggcccaaaccattcgctgcatcaccagctttccaaggtcgccctggacggtatccatcgactcttccgtcatcttcggagtcgttgggaccttacgttgctttcgagctttctcttgtttccccaatggtagtttcccagggatgattccctgggcttcgtcggagtcgtccagatttgctctgtcgaggatccctcaatgtacttattcagattcattaaggtcagatcacgtagcttcttgccatcagtgccgacagtaatatccttgatgttccattggtcaggtatccatccctgatccagcatccagtccttgaacttggcagtcttaccaaggtcgaagggtacatactgattgcagagaagggaccagatacctcgaagtgcccaagacgttgccacagggactggagtctttggttcggcttaccactctttaggaatggcttgctgaaggccccagcccttacgatcatcatgggcatctggggacagcctcaaggtcaatcttgaggattcgttcgctaagcacatggatcagccacttggcccgctgagtctggaagtagactccacgtttactctggcggctgatgatatcagctaccttgtgctcaacgaacagtgactttctccaatccacttaatccccttaagacgctccgccagattctctacaactgtctccacagcttcgtgggatacaccctccaggtaggcgaggtagtccacggtaccactgcggtccagcttccattgctgctccaggaaggccacagcaacttgcttgagcaggaagtcatctacccgctccatgaggatactcttgatcttgctcatgtaatcaccagtcgaaaatgaagtaggaacacccacgttcacaggccaggtctaccaggtaccaggacaggtcgatcttgcgctggatatccttaatgtcgctcagttcttcatcggatggcagattcactacccttctccttcatggatcaaaactccatttcttctcttcttgagaagtaaacaagaaggtctccgcggatctagctgggtattcctgtcgatgtagaatcgtcgtacgagctcagatccttctcccgtacggctttattgcgtttaaggcggtaggaactccagatccaggtgagacctggtagctcaccaggaatcagcggggctgtacccttctcccgaagaagggtaatttggggactgctgaggaacttccggatgttagtcctttgtatctccatgctcttatggagggcagaggccatattacacaggtacttaccacggacatgtttggaatagcttacatggtcactcatttgtatctcctataggggtaaagcaaccccggacaccttaaggttattataccacacttttctggatttgtcaagccttcttgtggaatactttatcgtaccacttgtagaagtattgagcagaagtaataccaagggcacctccccacccggacacgaagataaaccatccgatatcaaattctggaagatcccacgtgatgtaaagcaaactgagccagcgtgatacaccaagatactacaaacccagccttgatcttatcatcccgaaggagtttagagttcagacccaggagaaatacctggaagaatgcactcagaagatgactaggacttgtagggttattgacatgactcacacacctcggggtctaggccgcaggcactacccaaggggaagtcatcagcgtcgatctcagggccacccagctaccaggaattccttctccagggcgatctccttaagcgcctgctcttccaggctttccttcttactggtcatcattgatctcctctacagaaacccatccacggacagcaccgatctcgttagctcggacggtcatggggttggcatcggaatcaccagcgaagaatctgatgatatccaactctatgcggtagaagtctgcgttgaacaccttggtgtcctggaatcccacgttaactcgatacttcttcactcttacctcccagcagttcttccagattagccagtaccttctgggccttcagattgtcctgcatgacctgggtacgctccgccttcagaggagactgatctcgttggccagatccgttcagattcctccgaagactcttggatgaaggtcttcaggttaacaacttttaacgatagagggctgaggattgctgatagcagctttcgattgaacataatgagtcctcggggcccgagcccctcttcattacttttcttgcgaatgcctttggccttacgatcgcccacccgataccatcggcggcgttgaaggaacgtacggacgcgaaggttagaatccccgtttatacaccatctttaacacgtttgatatgatcgacaacctctgggttcgagcttccctgccaagacgctttccacctttcaggcgggctcggtgccgctgagcatctcctgacttagagcccacgcgcccgtttcgccgcgtcgaatagccagttctctcacgcttgtagttcctcactcgcttttttagccaatctacagtcctccattcaacaagctcttgccagaatcatgccagtacccggaggaggtagttgaacagtcgtgacagccactccatcctgaagggtatgctcaaacatttcctcacagaacttggagaagtcgttgaagtcaccttgtgacacttcaggaacttacccaggctccgggaatgaccctggggcctatctgtagaatcaacctcgatgcaaccaaggtatcatagcttcggccggggggggtatgataatcccatgaagtttctcaaggacccggttgtcgtagtcaaggatgttgtgaccgactacgaactttgcatgggcgatgatcctgtagaaaacatccatttcctcgggccggaatccccggactaccccagtcggaatgtctacaacaacagcgcaccaaagccttgtgaccgtattgaagaggccgtcccctctaggtcatagataacgtaatcaaattggggtgtcatcgtcagcaggtacctcgtcgtagctgccctcacgttcaaccaagcgacccgtctctgggttatacttggtaaacactaggccagtgttaccgtagttcctgtccttgattacacggattctgctctcgtgcttctcttccccgtcagcctgcttgttccgctcgaagcctatcataagctgacaccaacgctgcatagctcgggagccggtgaactggctttcctttacctcagcgccctcctcgtgggtacgattacccttgggcgggttaaggtgggagaagatgaagatccgaagacccagctcatcggccatacctgcaagctctgtacagatacgggcgatctccgtgttcatttcggaaggactaaggtggttggtcatggcggtcatgttatccagcaggatagtcttcacatccatggctactgcccagaagcgaatacattccttgatatgatcccaatcgttctgacccttgttcttccacatgaagagcttgccacggagtttacccgcagcatctttaaaggcttgctcatcccactcgatatccggtcggtggaagggaacattagctaccttcccgcgatattcttcagtgtcatggctacctgctcttccaacaggaatgtccctacgttctccccgtgctcaatgcaattccaggcagcaatctcgtgggccaacagggtcttaccgataccagtacctccacctaccccgatgatctcaccatcacgctgaccataggtaaggttggttagaccttccagggatagctcttaccccacttaggtggttctagcgcctcagcgtatacctcatcgacagttacggaacagtccggagacttaaccttgctaccgaatcggatcatctggtagacctcatccccgattacgcataagcatgtcgttagcatccttcaggggaagctctacaaacttacactcggggtacagggcacgtaccttctctactgacttacgaccctcgtcatcagcatcatggcaatagatgacctcgttgaaccgttcgagtacaccagattcctttaggaatgcgatatctcgtccagcggaaccaacaccagaggaccagctaatggctgcctgacgcagatgcttccacttctcgggcagcttcgactccatgatctgagccacagacattgccgacagttcatcctcgcagatgactaaccgcaggtggcccatatccttatgccgaagagtgttataaccgaaggggtcaacaccacccttgggactaccacgatagtagaaagccttggggtctgggattcggacgttaaacgctcggtactccccatcgcggaatggatagtaatgctcgataacgtcctcaccatttttcttgtgatgaaccaacacgtacccgtatcgttcggcgattacgtttgcttgatcttccggtatcgagactttagttgaatactcaaggacttcgttgactaaagatggatgatatctcttcagtttctccttcgttcagaaccttgaatccttcttcgaacttcatagtggccgcaacagtttaactaccgaagcgggtacctttctcgctgtctacgacaagatgaggtgattacctgttttatccccacctttagctcggcaacccggacaaagccgtatcaccgataatctgcttcacttattcctccatctggctcttgagtaccaagctcggtacagcattgacgttacccggcaggggtcttgaggagttgttacgaaagtaccgtagaccttctccagttcacgagtcgatcctccgatcttcttcagtcgctccacatgaagcgaataccaacagactcgtcacgtaatttgccatggctggtctccgggttatccgagggactccggaatcttggagacctcgatggagatcttggagtgtcgttggggcgacaaggcccaggatctccttgagggagcatcttctggagcatgtagctcttaagtcgaagttgttcggggcaataaggtagacttctactgctgtctacggtcatttcattcattatactgctccttgtcgttttgccaggtgtgccttcagtcgccatcttggacgatatccatcgccatatggctatcctgatggtacaccagaatgattcgttccccgatccggaaatccttgagggtacgatcataccaacccggataacctcagaacgtcaagttctccaacatttcctcccccttctcaccttcggagttgccagatttccccactacgatgagatcgcgcgggaggcaaaggagaggatggggaagcctccagcggagtacacatcagacccgctcgcaggatacagcattgccgacaaactcggccccttccagaagagtggatggttggtacaaaccagacggggaaattaccataaacgaaaacacgaacaaccattagatagtctcctcgaagattttgttggaagcccttgacgtaggcctccagggcgctgccttctgcatcaggcccggcgcggtgttgttccaggacaaacgcccggctagtagcgtgctacggtgatgatatccctccagcgccggggggccaggctatacaacggatggcttctgccgccgccggcatagcctgctccagcttcatcgatccattgcatcgttgacgccatagacccaaccgcccgctacgttacgtgatgctttggccttcgttggtcaccatatcgttggcaacggcggagcttgacctggagcagggcaactggatcatggactccggaactcggtacgcttacctgacgatgccctgggtgaacagttgggcgttctcgacgacctccggaatggtatgttggatgtgtaccgaggtagttacccctggcgacgaagggcgtaaatggcctgcacctctgcgtcgttgatgctacagatcagatgaataccctgccgctatgaccattgaggtcggtacgagcgtacatccgaccacaggagtccaggatcgggtggacattggcccaggaatccgtccagcggggatcagatgtggggcgttggcctcgaagtggcggaagaagtccagcttgttggtgcagcgagcaaccatggcgggtcattgaggaagaccggggcgataccctggaaggcgtcattgcctctgaacctacagtaccccagttgattaccgcagtacccgcggcgttggggtgagcccctcggaccgaaggattcgggcaccagaacgttgcaatttacggcaccggaagctcgggaacgctggcagatgtagagcatggcatatctccctgtttctgttggggtagtagtgaagccagcaatagcccctgaggttaagttgaacccatgtacatcgccaggaaccggcatgggtcggccaggggctattactaacgcactacttttactcagtaatcttcgaagagtcgatcacgatggcctcggcaattaccaccagggcaggtacaaggaataccctcgtcggattggcatcgttgagctcctgtactcgccgagctcgacggatcgactggatcttgtccagggtgtcgcgggagaaaaggatacttacgagttgcgtcggtttcctccctggatcactacttgacgcttgagagttacttgggtgaacggcctcctatttattcgattacgcattcgccgcagatgaactcacactcatccaggctaccgcaatgaacagcaccctcgtaccgtcagatgacgttacgctggtcatacgcggtagggatcttaccacgggatgcacccgcttaaggacatgaacaacgttgttgaacgtgtgtccctgaaccttcaagggtagcgatgttggccggagggtattccccaggtgccgccgacttgaaccctgggtttagaatgggatttcgtctccgatgagatcgttcaatcctcaaaaccggggtagtctccccaggagtcggccgatgctttgggtccaggcaacttaccgccagatcctcgacagtaaccttgagatcacggtcttggccgatgaagtaggcgttggagatacttcctcgtaggacggtgtagccgtggactttggcgacattgatgccatgagcttcgatgagaaggttttcttcacgctcgattccagtgatagttccgtactcgctgccgtttgcgtaggcctcgatcttgacaacatcgaaggtgacgagctgccggtgcttgaaggtgctacctgctgcatcgagattgttgttgatccggagggtgttccttgcgtacgcatcgccagacgttccatacgacgagcccgctttgctgcctttcgttcccgcttggctgccttggctgcattttatggccctcgtagtcggagacaccgacgtaacgacccaccatgccgctgcttgcctttcgctttcggggatgggaaggtcgaaatgtaaccgagtggtctggggttctgcctactcctccggcctccgtgaacgggatagttaccaggacttcagccttcagttcagcgatgggagaacgaaggcggatcttaacgttaaggacgctccaggaaaaccttgaggcataccaggctccggatgcccacacgatggtaccagtggtggtcaccgccatgaacaacggacgctcatcgttgcggatgaagttcagggtacgttccttgagtcccaccagacaaccgcagcagcaccagaacttctctcgaacgtcttcttaaccgtggttggcaatggtggcgcgcacagcatgttcgaatccacgttgtacttatcattgccatccagcaggtgcaggccccaggtatctacggtgccgttatgtaccatggtgatgtggtctacctggaagggtgggcattcccatggtccgtcttgtcgcccatcgtggcgtaacggttgtgacccatgtagatgcgagcccgacccttgtccaggaactccttggtttcaggatcagccaggaagtcgtaggcatctactgcccgcttgtgaattcctacctcgttcttaaccgggtcgatcttggccaaaccggtggcgtgagcaccacggacaatatccacggcaggaggatttgagaaaaggcgatttcgttatcactcgcgttagttgtggcgcaagcctaccaatccacacattgtatttctccttagtacatatctggttcgattgttacgccggtatggcgctgaagattgagggttatccataaggcgctacgaaatcttgaagagcctcttggtcactccagaaggtctcgtacacgcggtgaccaatacgacgcagaggataccgcagtgatcgctgtatcagtcgaacctgggtacctggcaccgtgccaagtgtacccgctctgctgcaccatcgagtagtctggtggtcgagctagcagcaataccgatcaaaaccctctgacgctcacgttcctatgctccggagacgtcgctgacggttctgttcatcctccagaggatctaccccaggcgaaccaaagcccatggttgccaccgcggtaactggcgatccccatttcacgaccacccggagacatttcatagtccggaatgccccaggaaggcacatcccggagagattcacctcggaagcacggaactcttccagggggtttctgcgtgaagccatggcgaaggcctttagacacaacatacgctgcatcaggcctaccatttcctggcagtagtcatggcgtgaacaccacgagaactcgatggatcgaaagttgtggagttacctggaggttcaaggccgaatacttgggccagggtaagacccaagactttctctcagtctgccttccggggcccgggatacggcgaccgaggtctggagccaaccagtcgttgctgaagaacgggatgcaggggattcactatcccgacgatacggctacagcggtgatcgaaaacatcctcgaatgccatgtaagtcaggaccgttcgttcgtacaccggccactctacgtcccgcatatccatgtgcaggtgggtggagcaacggaaggttggggccggggagtttcctccatcgcactcacaaaggattcaacccgagtgattgccttctggccagaggcgggaccgaatacatgctccataccatccctcagagatcgtcgcccttcagtccacccgtccacttccggccagttgttgaggccttccagttcgacttcgaacccgaaggaagcaaccgcaggcagttcctcgtggtgttccggggaaatgatctggttcttacggaaccctatctgtgtgccaataactgacatagcaagtcctcctggttcttgaattgttcatctgcggacagtcggccatctaccatctgaccaaccttcaccttccagtgaactaccccatccttgatgaagaaatcccggtgggagggcagagatcatttcctcggcctgggtgaagattcggatcatcatttcgccggtgatagcctgttgggcatggttcagcaggatgttcctggggtccacacccttacgctgagtcggttgttcacgaggaaggatacataggtatcacgaacccacggccaagacgtcataggtacccactggaggacacgctctacctcgctgtagacagcccaccgtagtagttaccgccgtcgagggctgatacacgttaccgaggagacagaaacccatcagatcgacggtcgtcaccaatggactcggtatcgtccacgtacactaccaggctcgccgtcccgcggaagagagcatggaattggaggtagtacatgttgaaatctcggacaaccgatggcattcaggtcattcatatttcacccagcgcttgaagttgcagctaccgccgcagcgccgtcgttctcgttgatgattcgctggacttcatcgccagatacgatgaggacgccgctcctccaggaggtgcttggaggtgtaagcctgtactgccattcatagaccgcggtcaggtctgcgaagatcagaagttcgacaggctgcggtataccgccgtagggcttatagcgcattgcaccagccttgccgtacagcttcttacgctgcgttgtctatcgggatgacagacgccagtcccaggaggtagtcacacatctgcatgatgacctcgcgggtgttcgccagcgactcgctcgatgtggctgaagccgatatggacgtggccgccagcggcggtgcgcgcagggtcggaggtgcatccttcggcatcgttctgacgacgagtccagcagttgtagtccggctgcaaccgaaggcaataagcctggggccaacggaggagtttcctcgtcggtacaggtgagacgacggagttaccaaatgatcaattccatgccgaagggttgatcctgggcaccaaaaaagtcggacggaaatgatcgcttgacgaactcttccttggtgctggccgggtcgatgttgtactcagaagaacgttgtcttcttggacggcaccaccggctacaaccaaagagcgcttccttggttccaccgatgaagccgatgacgctctgggggttacggtcgtagccgacgaaaacttcgggatctgcaccgatcaggggattgcgttgttcattgcatgttctccagttttcgaggatttcgggaaggtcgtaataatagtgggtaccgtggggaggaatctcgtccgggatcacctagatcgatagtgatggggagccatgatggaaggattcgatcatcgtgtacctcatcaacccatcgcactcgatcaggtaatcgtccttgagtagcctttcagaggggatcatcatggtgcttgagcttgtccttgaactcttctcgagttcgtccatggatactcttgatatcgaaataggtgatattcttccacccacctgtcaagtggtccatgatctcactgatgtagctatcctctacatcatccccattggcttcgcactgctccttatactcccagcggtcacggggaacatcgccggatagctgtcgcagtggacagtgctaccgacagacacaaccgcgagggtcagaagttctgcgttgaaccccaggactttatcctgagcttccttttgaaaacgacgcatctgatccccgataccccagagacgatcacccatacggagtgcgcagatgattgccgatgcgttcttcttgaggtccacacgaacgtacacagcctgtcggcggccaggggtgctgaagtggttctggtcggagaggttttggtctcgtcagatcctgtccaccacttggttggccagtcctgggaggccgagaggattccgccatcggtgatcctgttgaccagatcactgttcaagaactccaccagcttaccggcagtgttctcatgggtgaataccagaaggtgtccaaccccggtttcccacactacatcggacaggccccgtttcgtctgggaaaatgcgcagaagcagttggtatattcagccattttgttaacgcagcagtgaccaacctcgacatcatgagtacgttatgaatgcatagaacatttgatttctccttggtttgtcagaagttttttctcgatgaagtcttcgagacccaattagagatatcctttatgtcacgactccagccaatctcacccatgatccccagcatgaccactccgtattttttcacaggtatgagaataaaggcggatgaaacctccacctcgctatctacggtcatgtaggttctttccgaaaacggttggctgaggggctatggtaaccacctccaccttgtccaactgaagatcttcaggaattcgaccgccatggtgtactccttacccactcacgtccacctggaacgattggccatccaacgaccgaatcgcatagactcttcagcggattggatgtggatatccccttcttgagatcatcccaatcgctactgaacatgtagttggagagtgggtacccggtgtagccattggctatcagtccgtggaaggacattgcgaggtaggacttccagaagccatacttctcagcaagcttcaggtgaacctcctcttcacgaccttggtagtcgagtccgctggagatcatcttgaagaggaatttcatgatggggtaccaggaatccagggtgtgtaccttggggttgaagtagataccgcagaccccttcttttccgtgatgggtggaaatcacttccgtcccgttagaatacttctcgaaggggaatcctggtcttgctttcgtaagaccaggaagtggaccttcgggattttgaaggccttgccgccgatggtgatggtcttgagttcacctttgggtaacactttgttgagtacatcgatgaacttcttgcttcggcggggagcagatgaaccaaccgtcgagcttctatatccgtgggttaccgaccttccatggtaccgaagcaggaggaagaggtcattaccttgaggtggcttttaccctcgcccttcttgacttcataccgaaggcatactcttgatacgggccatttgttttctccttggttgagttagccagcaataccccaggacaggaaatactaggggtatacagcgacctctaagttacttagaaggtgccacggcgctgttgctgcctttggtcggtgccgacaccttggtggccttgaggttgccgttcagggtcaattcaccgttggagcagagacgctcatagaaaccttacgcttacccattgttcacctccttagcgaacgttgatgaagggcatggcttggccgccggtgacgtaggtaggcagcttgccgtcccacttctcgatggcattcagttctaccacgccggggttctggcggagggcttcaccctggatgcggaggctttcggccttaccttgtgccaccaggatagccgcttgcttctcaccctcggctgccgcgatagccttagctgcctcggcctgggtctgacgcagttcgttctcacgctgcatcgccgtctgagtggccttgatcttggcattgatcgcctcgaccacctgcgccggcagaccgatcataccgttgaggtacaggctttcgacgattatgccacgggtggagaagtgctcacggacggcagcttcgacttccttgacaaaggcttccttgccaggaccatagatggcctcggcggacttcttgctgctggcgttgttcacggcgttacggaccacctgcggcacgttcacgcttacgatctcgttcatgcccttgcggtaggtctggaacagcaggggtgcgctacccggagcagcccggaggtgacgccgatggggagatccagcttcaggccgtccttgtcctggagcgatacagatcgaagttctggttgaagattgagacgaacaactttcctcgttcaggtcaggaacttccagccgacggggttccttcagatcgacgccggtcgcccatcatgttgacgacgacgccgaggcagccagcgggaaccttggagcaacctgcggtgattgcgggcagcttaatggccaggaggccgagttttcttcggttttgctactttagccaagaagaggtgatgtagaccatgcaaagaaatgaacatgacgggctatcaatttacatagaagctatcgtagggaacaccagatcggcagaggccttctatatatgtatgttgtcgtagaggtcagggtatcttctccgatgccctctaaatcctttggattgcctcacggaggcggcctcgcatctgttccgtcatagtacatcagacctccaccgtcaggacttcaccggctggcagtacattgaagaacagggacaactcacttggcgaacacgccatgatcgaaccatcgctgatattaatcatggaaatgaacccacgagcaagggatctttctggccggatgtagacctgggagttcttcttacgttcgaagtacagcgggagggttggcttaacacccctcgttaccttagccatactacaccccttcttgcccgagagtttaccggcgtaggagtacagatggctgacagcccagaggagtacaggatggagaggaccaggaggccagcacccatggcgttcatcagggtgttagccggggacagcatctgggtactacccagaggatgcttacccatgcgatagccagagcattaattcgagtgtagagcttgaggaccattgttcttacctctttcttaagatgaagaagatagtaggttagaaccttaggtatcctagggatatagcaacccccgacaccttttaaggttattataccataccttccagcagaatgtcaaggcctagatgttacagacctttacagcattttgtcgaggtacctgagtgctcgacggtactggtgaagtcctgcaaaccacctaggtggattacggagaaccccatggcgatgaggacttgccgcagccttcacgttgatgacgtgggacccggaccttggtcgagtggttgtcggatgcccagggttgtagtgatgcccatgcggcggaggatggtgtcgagcacacctgctcgctgttcaccgtgaagaccatcgtaccgtggcccttcgttgattcacggatagcgccgatcagttcctttggcgaaaccacgggctgaacccattgattatgccgcgtatcggtcagcggtacccgagggtcccatgccgatgtagattttgcggtacagcaggaaggaaagttctgcggtgcattagtaatctccctttgattaatcgtttggttgataaatctattccgtcaatgccagagccaataagcaccgacacagcgccaggaagcccaggggagtatgatggttagtaataggaaggcgtcatgctttcatcaccttccgcttaacatcaccacagactttacactgaaggtcgtaatagacagacgaggctacttcaccacccctttgtgcatgtacgaaaggaccagtcctgatgatcttgtgaagtcgtggaccctgaagaaacagctgagacgaccgaagatcactcagtcctcgcgcagttgcaacaacgaccatctttggggccgaagaccggcatacagtggggcaaggcctcaccagattgatcatagcctctggcgtggcgcaggtaagccgatcggctggactccatacctacggctgccagggtgaaaccaagctcaccacggggctcctggggccttcctggaggctcatgttgaaccccgcttttctacccgacgcttcatgcggcgctcctgagccattatctggcctatcatgggtttattcttcatacggccccacatgcaggcattcaccgacaaccacttggccgggaatagatcagggtgagtaccgatatccttgcgcgaggatgttgaagccatccttgtgaataatggtcacgagctcgcccttcttgagataaaccaagtctccagacccggaatcacccgaatggacgtaggcaccgtccgccatcttgctgatatgaaactcaaaccttggctttgccaccgctacggtgaaagaggtattggtcatggcgtcacctcattgaacccgatgaacgatgtggtccaccgggattccgagttcgaagaaggtttcggtgatgaactgccgaagttaatgacctttacgtggcgttcaccgtccttgccaccaaccagaaacttggggtttagtggagttcatatagatgataatacctacacgtttgccgaagatagctacccggatgtgggtaacggccagccggggtacatcttggggttaggctggaatcgccggatgctgaccagggactccaaccagaggaacaaatacagggcgggcgtcatagtacacctacctcacgatgcaaagggatgctgtccaaggtcgaggacaggacgaagaaccacccacgctaccagcaacaacccattggaacgtgagcgtatggcggcacatgcaatatacttccattccatcaccgcgccctgttcttaaccaaggatgcccgcttggcacggagcttgttcaactcagggttttaccaaggtggctaccattggtattggtaagctcacgagttaccttggcaatcttgcggtcgatagcttcgatggcttgcatgttgcggcttaccttgcgatagtcgttgcgtttcacgggatagtttcctttgttgatttcccaagactccccagcctgcaaccataggttcggtggggtttcggccaggaatcaccatggcctcatcagttgggtcagttgatacccatctcttccttccagtcacggaagaagaagtatccgatgcctacacaagacaccacgatagcaatagtcatcgcttcaacctcttaatcaattcttgctgttcttgcttccacctgggatcggggtgaacccgcagcatcctcgtgagcttctgcaaccgattaaccatgagtgccctttcgtgggccgcttcgtagggtgacttcatttggtcccaccccgcagaagcccatgggacggccttccacatagacgtctgcaggcgaatttaccatcgacgaaagcccaacggtaaaccacctgttcaaccccgttgctattgtacgaaatgaacgggacaaacgccctttgcacgtaatcgtttgtaacagctaccagtgtcaccaaaaggtccacacggttatatccctcggttagttcatccatacaatacacgacctaccatgtactctagggatataaaccaaggggcgtcatagtacgcccccgggccatcataggtaatgcctttctgcgtatcgctttctgctcctagataccgcccacggctttaccatggacagatactttcggatctgtgccacagctggtgaggggtgctttagtaaccttgggaagaaccgcgccacccactaccgcatcaggccgcctcgccgttgtagaaacatctggcgcagcagggtattcagctggatctcacctggtcagcagtgacctttgactggtccttgaaccgctgtccagttccttgttgcagtcctaaattgttttgcaggagccgtgcttgaagatcgatcggcttgaaattgtcagcggcgcttccgccgggccgcagtcggaccagtaagtgctcagggatgccggagaacaatgccgcgccctcggtttcctcttggcgaacgccccaggcgctgtttgttgccgtcgaacttgaattctttttttcagttccgaccacttgatcggagcgtagcgctcgaagtagcggcgcaggctgttggtcttagcgcccttcggcatcatggccagcatcgcacggatagcccgaacatcaccatgctcgtgagccagtacggtagccgaggccgccagttgttgggtcgcttcattccaagccttgttgaacgacttcagagctaccagaccagcggtgatctgatccttgcccaggattttgtctgcggtgagtacagtttcataagtatttccttttgtttcaggagttgggagaatgtcaaggggttgcccagacgtggagctaccaaagaccgacttccgattgttgcgatggatatcagtcttagcagtcttgcgaccgcctttgtagactgcggtcctttgtttcggtttgcctttcactttaattccctctagaggatacattgcaaagggttagtcctttgtaatatatcctacctaactccgaggttacttgtagagggagccggatggctatcgtagggagtaaccttacctgttaggtagggatgcgtcttacccaggactctcgcataccggatcgataagctggtaattgaggattcggatggctaccctttgaccttgcttttcaatagtctaaccgccgttcctgggtccgcaatcaagcgggttatcctggggggattggttagacctaagaatcggttgttgaatggtctagcttaaactatcggcggcattgcaatgcctgcctaccaggaagcttgtatctcagctatccagcgaagatggctggggacgaatcgctatgttagagccttgggcttggcttgtcaagtggtccgtctgtatttacgtggtggaccaatcctatcggctggagtcacagctttgtagttaggctataaacaaggcgccctatctacaccgcccggaccatcacgtccgcttactgtcaggctacgctaatcccgaggagtcatgcacgttatgccgttgacttggggccatcttaccgcttcccctatcccttgtcagcccccgatgcctgccggtctatgccccaggtgacttaggcattcccccccttggttggcagccccgttagtgtccgtagactcgggggggatggtggcttctggggtggaacgtggtggccgataggccgggttcgcggggttgtcaagcccctaggggtttccccgttgccctatcggttttccctcaaggcggcgccattaggccatattctttacacacagggttgtctactggttttcatacagtcttggactatcggtccccagcaaaccccggatagacggtctttgattaacgcagggtatcgtgggatgtcaatggggatcaaggggttatcagggatattccccgatccaccccctgaatacctaagattttttcttatagaataccctagggtctatccgatgaacggtagctcggggttgaccctgaactaaccttatggtatcctaggggaggggctagggctataccctgaggataggccacccgctatcaggggggc

SEQ ID NO: 5 - DNA, 84679 bp, Bacteriophage
cagccgctctcattttgcaatgagaattcgtacagttcatcatgcgcctccttgaaagtgatttctactttcggtatgcggatgcatgctatatacttgtatagcccgctatcccgttttgcatggcacacgaattgcataagcatgacaagggtaacctcgaaagcggagctttcaaagtggtctgtgaagtggtggctctacctctattatagtatttgcggaccggaagtagtgacactgaaaacattgactctgcagctccagtaaatacgttaaatcgaaaggctgatagctgccgctatcgagtaaccaacattcacaataaggagtgcaatgaatgacaagcaaacaatcatgccaagatccattacgctaagcaaatctactacgccataaaacgtcatcgcaggtatgatgagatatgcaaggaatgggtcacacaggctttgaagcgttctatgattggcggtgaatgtcagggcacgctaccgcctagataagaatatcctcttcccgggaacaagcctattcgcatacgtgcgagttcacgctcacatgcatacactcttcaccaactgtgacaagacagcgaataaccgtgccaatacgtgggatagttatatcccttaggcgtcctgcctagcacgctatgacaagtacgggatgctacacgttgctcagtggtgacactttgaaagaagtctaccctgatcgttcgacgatccgatgtgttttccatggcatggcaacatgccgccattagcagccatccgcgaatggctgatctctatcgatggaggatgtcttcacagtgtgaacgttgttcgctgctgttggagagagcgggatgacttggcgcgacattgcacagggaagagagacaaccctttgcaacaacatttgataagtcgatggtcaacccttcgagagtgcgagaactttgtgtggaactccgatagcgaagcttaataaacgtatatgcatattccatgccaacatgtggaaagatttccccacccggtgggcgggagcccgttggcattagtttgtatagctttagctgtcgcagcggaaagaccacggccaaattcattatggaatttattaggttagagagacagggttcgtggttaagcagctccggaaatagaaccacaactcccgaacaggatacactcggacgtaggccacactacatcactattttctcccagccagagtaaacgcaccttcaagcggtcattatttctggagtggggatttcgtcgtgtgatacaatagcagcttccgcttggtaataggagaatggccaatgcaaatctataggattggtattgggaataagccggacaacagctgtagaccgtaatccgtagattcgctgcccgggcttttgtctctactgattgtattccatgtccctgcttccaagcatccctgcataaccttgcatactcttcgttaatctggtccatgtactgcaacgctcgttctgctctaccgactgaacccgttgtgacggagaatcttggttcaaatttcatcatcccagaagtctctgaccaagcttcccaagccactgcttttcagactctttatgcaatctcgataggctgatgttcaatattgctcagacattagaccctcccgaacgttacgatcacgcctttgctttattagggttgcttgtagctcatccaggagaggggcttactgcccacgatgatgatacttatctgcctctctagagtcatcacacacttagtctgaaggtaggcctatacaaggcgtacatatcgggttgccacttcgcttcgcaggcctgttccagaagctaatgaaccgtcttcgaatgatcccgatgtacaggcaccggggactatcgtctggcccatctacggagatagggtgttccatccactcccctgatcttatcaacgacgcccttcctacttccttcaattgagcgtactggttaaaacgggttaacgcaccaaactgttcggcaagcggaaatgtttatcgatctctttagttttcattctcttcctccatgctccgcaatgattttcaacgcttgaagcgtgtaggttacgaagctctgtgtagaccagtgtcacactcatgaagcgtgtacgcggtcactttcttcagtgacgaaatggaagtctaccccttcgaagtcgtaggtcgatttcgagtatccaatggcctttgagttcttttcctccgtaccacaggaatgtcattggacttccgtcgcttttacgagtgtgtagtccagcagattatctccaacccacagtagcacttttgagccttgtcgtacatgaagccgtttccgccccaaccgataccataagccttaagaggtgctgttgtatcgcaatgttctcttcgtggggggtcttctaacaatagtgtaaacttcaccaaacgctctttcaccctctctcattcctcctgttcgtgctttatgggagtgtaaacgttcccagtcactgtcaagtttctggggatagacccagacgcttcagctttttagaatgatatcccactcatcgccttcttggaccttctacatactttccatcatcaacgcacggtcaatcagaccagccttgtagttatcccggctacgcttatacaacagcttgtcgatgtagtccttcttatctgccaaagcgatagccttcctggccatatacagcgtattcttccgaagtcatccacggcatattggtcagtacgaggtcagcggcgtcccctgaccaaggggatattcctccatagaactttaccggtatcaggttcgattcgcagctctccactgtagcactgttccggtcttagaattggtaatatgcaccttctcatcgatacggtgggccatcatcgaaaattccacgttgcggctccatgatccatcgcttccagtcgaagaatgtagcacaaatagctttccaactggctccgacctgcaaccgtcttcttcagacgttaatctgcttagcgtttatatactttacaggccgggaggtcggatcatagcacctcttacctggaacctcagcccgagaccccaacaacacttaggctcatcgttacttttcctctcgaaccatgcgaacagcttctaaaacatatccagtcctccttcctgtgatacaatttaaatagtctccacacttttctaggagattaacgaggaatagcatattcataaacggtacggcgataggccatcattccagccaaccaccgcttcgggcctcttctacgctctcggtaattttccctccacccaagaagggggcgtagagattcccatacgaacatccctatcacagagtagaacaataggcagaccactccggacgactatgcatggcgagaatgagaagccccacggtctccatggtgcggatccctctctttaagtagtttacggctgttccagatagacagagcccacttaggtaacaacaccactttcaaaacgcgctgctgtatgttgcgtagagtagtgcagttagcacactgcgtatgtattaggccatagcagtcccagtacaatggcaaaagcccgataccctctctgtgatcttttagtcgcactagctgggaagttatctttgaaatactccgtgatacccatgtaggtccattacgaataatttcacgcgagcgagaggacgaatagcattgggattattccattaccctcctttcgaataagtcgaagtaggctcacgtagaagttgcaccacgccccgcctatggcccagccttccaatagtcttcccctgaaaccttgttcggagggttattctcgaacatggataacacgcatgaatcagctacttcgtccaagaggtgcattaccgagttaagcggcccgattccaaaggtcttatctagccaccccttaaatcaaccgcacgtctggagacggtgacgctggagtcactggcacagcgccaatcttccgaatgtagcacacatgtatggttcctcgttctcgaagaatgcccgcatgccctccttgattagaggtgcaatagaattagagttcattgtttttccttcctttgagccccactaggctctaaattttttggttcgacctgtcaacacatcacaacccagttgtacaggtcagcctcgtaagccgatggcagcgattaattcaagaagaacgcatatcaatagctgcgtatttggttgcgaagctgttgatgtacgttataaacccgttgtcgccccggctaaacagggcgtattccctcagtcccatccttgaacgtatctaacgcgataatatacttgtcgaagatcactgcggcttcctcccggctgatgtagtaattgtattcgtcctcttgacgaggaacgcacgatagaagcctttcaaagttccccttgaccagcaccagattgctcctccaccttgcatgtatagatatacatggtgtttgctactggataacaggatcatccctgggacgaacatccagagcagagcatagcctccattggcatgcttaataagtgtgcaactacagcgagcagtattctgcatcgcggccagaacccagacagcaggagcgaccggcacgaatgcagggcgagtgtaaaacgcaatagctacgagtttcttggaaattcggctcaccctccttcttggttcgtctggggaacatccggctcagtagacgaatgtcttggatacttcatgcattcttagctcatcttttgcagaacccgtcaatcaattctcatgtgcgaattccgcagccttgtagtagcgattagcttccgtcttgcctccactccggaaggaggtggctgcccagctgctgatattacgcgactcttgcaaaattgtcaagagcttttgcagagagggattgaccttcgtcaggtctgtaccaatcaagtctacaccttgagaacgtcagtccacccacagagggtagctccccatcaagcttcgaccatgacttcgtacatttgctggaacagcgttgaaagaaaagggcttttcgccctctgctggtatctagaggaggaacaagtctcttcttccaccttgtgaatcaaccgatcagcattcgccctatccgagacttttagctcctcgatctcttcacatgtcaacatacggagggcacaccttagatttcgatagtgacgacgctcttcgcatgtcaggttagcaggtccataccatctgaacatgttgttgatatcgtatcgaatcaactgaacttctgcccgtcgcacatatccacgtcgaaccacgccacgacccatctgacgtaatcttcaggtcgttctcttcgccatctgcactctagatcaacgtgactgcctctagaacgtaaacgtcttcgaaccctgtacctttttttttttttttttttcgttcttaagtcggatgattcgagcgcgaatccattgcatgcacctgcggtttgggtctgtgatatcgcagaccaatgaacctctggaacctcaactggcatacatgattgtacctctatttgttttacaagaacgccatgattctgtctctgtctgcatggcggtacagattgaagcaaggcacgcctctagaggactagctgccaagcggtcctagtcccgcctttctgaatccccgttgtggtctgtcttgttccagcacaccaagaacttcaggcgtgttgagatcgattctcagcacttggaaaacgttccgagtgtgggctcgtcttgcgaatggactcagaacaggctctccatcatttctgacagagttccgtgccgggtgtatccggctacaataccccagccttcccactgcccggccactcttctggaagcgattaggaagctcctagagtctcagcatcacatactgattggacccgcctccgcagatagatttcgtcgtagtccctcctcttttgttattggatatataatcgttgccagcctcgaacgctgaatctgctccctttcgtcctgaccgaagaataaaactcgttccagtttacgactctagctcttcgcgagaatgccccaattcttgttaggcgtgcattctactcacctcgtatatcatctcatcgtctcaccatttgtcccagttctccgtatgtaacccagtggtgacgataactcttcttggttggtgtactccactaacaccggatagaagttgtcttcgtagtctataccaccaccttgcattcacatccttctgggaacagtgtatccatcgccgttcatggttaagagcattccccggtacacgtcttttatcctagctcactctccagactcttcaaacttgagtctcaatttctcgattatttgagcttgcaaatggagaagttcgtacgctgttgttgtccagatcaatagacatgtcacctttccttctagcttttgaattcttttgtccagcttagttagatgcttatccagcttatctagcttttgacctattaaagttgaaagtcgagcccgggccaaccaagtcccctttatacttaattgcaccccgatcatatatcctcctattacagttcgtaaacgtatacctgaactacgagcgtcccctcgatagaggctcgacattgctccagtcctctccggctaaaccgcagccacctcggcagacctacacaactccgaggtaggaatcgcccgagcgtcagcctctgcctgctgaacagagacatagtgtacggcttggcccagtgcgtcgctttttttcgagtgtagactgaccctcttctcggccatattgtatccgcgattataaatcgatccgtactcgttcattagaaggtcagggagcttcgagtttaccgtccctttcaccgttgtttggtctgttcgtaggcctccgggaattgctccgatttgcttttagcaatgttgccgcccatggtgttgaagcaattagcctgatgtgcaatagcgtgcaacttccttttgttttttgaacgcggcgcaggtcgcccttcggtatttaatcatttgaactcttctacactttgtgtatcttgatatccaaaactctcgcatcggctcgatgttatcgtacatcgagtctaatgctgcgaatgtggagacctcagtacccttttcccaaacttgaacaatctatgtccttattctggtcggctcttgctcgcagaaggttgtaaaatagtatttagccaacatcctcacctcctcttatacgccgctcttaatccgataacggatagattccagatcattgttcttcaaatcttccgtgtcccattctgcctttgaagaacgtccgcaaggaaccagtagcctcctcctcttcagatacattatctttcaactggaggaatcgactcattttgcaggtcttcaagtacactttcaggagaccttagcctcgacttcttcttgctgtcagttttcgggtctttgaagattgcaatgccttcaccgttcacttccgtagaagcttaccgcgaatccgaaagtatcctggtgttgcactggtaagtgtaactgccaactcaaacactacagttcagggaagcaaaacctttctccttcgcgccttaagattttagctgctcggcgagtcgtaatggaatccccatagatcaaaccgatatgagaatcgagcatcttataacccgcttcattcacagtgccgaaggtttcccacagaacttgatagctcctttacctgcgctcgcctacttctttctgagtttgtagccaattacatactcgtattgatcccactcagtgggaataacctttgaagtacttatcttcaaagttcagaacaaatgcatcgtttccatttactgcatccatgatatcccagtgttcgagcgactcgacaacttcaatatcacccagtccgcagataacctctacaggatcaccagagtctggacgaataaccagcttgccatcacgctccatgatctgatcctgatggacggcagaatttcagtaaaagcacgccccagaagtcgaaggttcgccacgtacgacagaataccactcgaactgggaacttacccatcagttcgataaggaatcgacgttctgcttcacggccaccttcaccttccccatcctgcatttctcaatacggagatgttgctagtagctacagcgtgttcagtcgcaggtacggagcaagctaccagaccagtgcgctatatagtagtcctttcggcgtagatagccgctgccaaggtgtccgagcctacgaacgaggtcaagaccaacaccgcttcttcgggccgcgtcttcaatcccactcataccccgggcactgaagtcgtgaaactgaacggacagcaggaagtcgtcgtaataacccagtgtggttcgcgtagtaccgggcccatagctgcgtattctgcggcaataggttgcgttggttgcggtcttccaagtcatagccgaaatcagggtctcatggtagttcaccagccagtagaactcaggcagggggtattctgatagctagcaataatgcccataggaacgcgctaacgcccctcggtcaaagacttaacctccagaggcagatagccgagcttgtgaagggcgcgaagttgcccacggcttccatttccccggccaaaatagccagtcaggaacaaccgggaataccgggccaacggcgtttcttcagccgcgaagaagccttcccaagactctacgatctccatccagcggcccgtccgccgaatttgagagtgccgtcgtagaagtcggtggcatgcgtctttcgataaaatcttatcggagcgaggtcaggctgctatagacaagctgagttccttttccgaggcacatggagccgtccaatctttgtacccatcagtggaaagatgcgcaaattttcatgttatttcctcctgttgtgttgaataggcccagactacatctctgggcctcctgtcaatattcgacttcttctactggcagcgtcaaagcattgtggtagatgcatggaaggcggcaatggttgcttcttgctgtggaagtcttccaaaacttatctgcatcgtcttgtaccgagcgtccagttcctccttggtgtcgcgaactccacctgacaaatctcttctctggagccgaacgcttatactctgccaaccagataattaagctcacaggcgttccgccttgagtattcaaaaccggaatgacagtcagcgcttcgtgctcttttgaggagcgtaatccgaggtgtgatgatccgaaggaatccagcaagcagtcgataccctactgaagattccatgagtgacgaacaggtcaggagcactcacactttactgtaattctcttagggccttaggacacgcttcggaatgtagcacctccgtcacagatatcgtcgatcaccagaagcggaagttcaggatcgatatccgaaggatctcagaatttcaaaagccttcgattttaccggtctggagatcgcgcttctattgcaacgaacgaattacagcggctgctccgggcctttcttttgcaaaaaaacttcggtccgctttgtgagcgttcgatatcaggggctacgagttgatattgctcccactctgaacggctcagtaggccaccgaagaccgaagattgacggacaacttcgacgttgttaatcagggtgcagagttgcgtcgctgtgagggtctacaacgataacttcggtcatatccgcagagttcagcatgtttgcaaacactttcaaactgaaggcgtcgcccggattgcaccgacgcggtcttggcggagcatacgggacataacgcagaagagtcatgcggattaatcattttgctcgatcgcctcggtgacgttgaaagagctatgatatcatcaattattctgaatctgagctttaacgtttacgaacgcatggctttcgatgccgcccactattaacgcccacttcgccgcccgggaacgtccacattaatactttgcctcttgccacggacggctcttcataacaccttccatttcccgaaggcaacctacagcataactacatcctcctcacagtttcacagagaagcgattccgcgcattgcttccatcgtgcttccgggaacaccgtgtattgtggacttattcccatgacgattctctacaatcagagagataacagtgtagccaaactcttcagccatgtcaatgtatgtgctacctctcgccctggtactagtattgatacgataaccgcatctagtcctatctccatagaccgggtcgcgctttgtccattaactctttgtgagattcaactaccctcagttttccaataatacttgcgaactccatttggtaatcgtccgtttcgcagatagattctgccggcctgactcccaagttttgttgttatacagaattcgcaagagaggacttcccgattcgggagtcgaacgatatacatgatcttttctgcatacttcctcctttaaattcgagccatatcgaagtaggttcgatcagaagtcgtcgctgcatcggtcatttctgagaaccgagcctcatccacttcatttaccaataagaagttcaacagaggatagaactcttcgtcaagcgtctgcttgaatccagccgggtcttgcacatcgcattgacccttttttttactaccttgcatcctcatgataaacttcttttaagccgaggtagtgagttgacttcagacttcactgtccctagccctgtttgtacccatgtaaccttttcacaagaacctcagaagaccccttgtattgttcctccccagctacactctatgtgctcggacgaagaatctttacagaactgtggtccgttacacctaggcgtgagagtcaagaatatattcctgaaagcggctcccccagtgaagatatcgcggataccgatcaaatatcttcttcttcctcgacaatgtgagggtcgtctggagagcatatctcgaagttatatgaagcctgcgatgtaatcatctggggttattcggacacatttgaccaagggcaacgtaatcgccggtcaatgaccccgtagtaattgaagataagggagccattgtgcttagtcacggagaacaagcgaatccattcactttctcaatcagccgcacacggaatttaggatggaggaaactccccagcaccattctctcccagattaaacaacaccttctcgaagcgggcgtacaccaatcaccggagtgctggtcaaaattacgaccccgtgctccagaaggagcggatgctcattccacaggttccccgtagaccttccgggcatacttttataacgacataccgttgaagtgctttaacagtcaccagccagatagcgatcaggttccgtaccggtaatgttgagattaccttccatcctactcatttcaattcgacaattgggcagaatttagccttctttgcctttagataatgataccagaatccttcatccttttactggacgatttaccgacataagcgagagaatcggtagaaaacccacacgctataaagacgctagatgattccaatccatacgaaaccccacattgtgccagagtcccacctagaacatatatccggtaagtggaccgagagccagagaatacaatacagcctacaacagcagcgaaagcgcgcaaccgttaacgccagccacacgacgaggaataccggtcttcgccagaaataagagcagagggttacaatttgccaaccgcttgagatagccgaatagaccgggtctcgaacgtacgatggagccgcatatgccacgaattttatcaattcatgcttgttcctccgggaagatgttgaagttaagtacgttatgctcttctgctccatggaggctaccatcttataacctccgagcttgtgaacgatctccagtatgtaccaatagagaattttaataacatgctgctcatcagattgagattcggctctgatgggttccacaatcgcctgccacttcccgttgagtcagcccagaccgatggatgtagtgtgcagcaacaaccattacagttttctctttgaaatccttgaccggatcattcatgttagtcctcctattgctcagcgttacttttgccatcgaatactgaattgagcgatctcaaactgatccgtccagcgggtgtcccggaaaagccactcttcaaaaaagtcccgtctttgtttaatatcagaagtcatgagggattatgcgaactccgtcgtcatggatcaaagttccaccagagtgttagctttaggtttaacatccccggtcacgcgaaatcaacacattgaccattttccctccttatttatggtggtctacaaccacaaacttgcttcgcatatattcccctcacttcgtcgtaagagaatacctgatgatctgcggattgtcaatacctacatcaagcaagtgctaccctttgaaggcaggctgccgtgagtgtggccgcaggtgctgcttccatgatgggcagtattccacgtctcgaaaggatagtggcacatgacgatcttaactccgtcaattcgaatctcctgtactcacgaatgtcttctacgagagattgctatcgcagcgatcaacttccacagacgaaagtcgcaatgatttcccttcaggaaggtgtgatacggctattcaactgtttgatgatatccagcacaggctgtagcttgttctttctgcaaatgcgaagtctcccagatggtacacttcgtcaaaaggcctacctggggagttccaccgagaaataagctcctcggtttgctcctcaaaagtccacggcctgttgcaatactcgatcacattcttatggaagaagcgtagatgacgaagagaaaaaatacacattatgcctccatttcaaattcgtaattttgtttaaccgtgatgagtcgcatatggctccctcccagcagatgttcacccggctccatactagccatagccttgaactctgataacatatcccgacgctcggtggaaatctactactccagtaatggtccgcactaatctaccttcggtacagatgctcccgacacccagcgccagcgatccactgtatcttcttcagtagctcttctggagaccacttctgtctacaccccgcaactgaagaaagagtaaggacgagaatagttgttgatggcttcctctacagccgactcagcctgcaatttaatgaactcccatcttgcaagaacttttaatctcggtggtgaccggggtgtagctgtaccgttctttatattcattccacactgtactgttctcccacatagcctttgaatttgtcggaacgagttgtcttctttccgtgccttaagttttccgtggaactgatgcctccccttcgagcatgctcagttggttgctatacttctggatccgctgagttaccactatcacagtattctgtaagacttgcgatagtatgcaaatttcacttctctgcaaccggatgatacggcaagcttcgatatggtaatttacggtagctcagcgaattcttatcgagaatgaccaaagccttctacgatgagtatcacgcccatggactcaagttctcccgtcacccctgtatcctccgtgaacgtcgtgcaggaagcaatgcgagaagagtcctcatgtacgaaggtcgtaagcctgacctggtccacatctgatgctgtacacgcagactgtatgtaaatctttcgattcagatggtaagtacggaagttatctctccgtaccaaggaccttcgtggattttgagcgcatcctcaatagcggcgataccgctgagtgttcatagtctttgtagaataacgtgtggttgctcatcttgattgtgcgcttgtatttcctagcccaccgaggaagctgccattagcccgtctcaccttcctctcgttgaggtagtgatcggctcctctcctgttggatcgacagtatacccatatagggttgtatgcaatatgttttcgctgcctccccaccaccctgtcgttctgacaccttctgccgcataccccatcgcaggaatactggcacggaagcagagcactccggctactgctcggccaattccgtcgtttcattctgttcactattggtatgagctacagcacctgaccgatctccggttctccccggggcctcgaagtatacagcttccagccaacaacctggtatttgtactactggcagtgcgctttgctttctgcgatttgaccgactggcttgaattccaccacaggctccgtgccgtattttagacgagtattccatgtcgaggaacatcccaatgaaggctagaaggactatcaaaaaacgagagcttctaaggtttccataacacctccttaatgttagcccgccttgtaagggctgtatatcactcggctattatacttcagcccaagttgtaacgacggcggtctttgttgggaactcgaccatcatcgactggaatgtgaatgcgttgccgatccttctgattttgcatttttcacaatcttactagcctgcgctcttgccatatagttttcccggacttacaaccagatcggctgaattctgcactcgggatttcggcactgtgccgggcccagaagccgtaccaataccgtcgatgtagtacattaaggtacaggttgcagacgcaccgcagtgttgaaactcagtttactgatgtgcttcgctccccgggtttcagtttcaaacaacctgaagtcatgtaattgaatttgtaagtgagagcatccatgaactgaatgacacttaaatctggatagcagaagtatccaagagctggacttctcagcagatcttcgattgcagtggtcacattgacgcagactcgaagttgaacattctatatctcctattcttcaggacaaatacaccgccgattaccgggtcagcgcgaatagtttaccgttgggaaccgagcacgcaagcgtcttttgaaacgactttgaatttgcacacagtcagccactttaccccggtagttctcgcaaaattatgatctggtctttacgggcttctcaaagtcgccatacgtcaccctcgctatgttctcgaaagggtcgaacaccaccagaacagcgtttccattcttgtcaaccacgtagttcacgatctgcatttgtcgaagaactctttgtactttgagaccgctggaaagcgcttaccagattcgtgtacagttctctattgcgccacatgataccctcataaccgttctgacggtacacatcatgaagacgtttcagttcttcaaaggtggagcagaatacgtactcaacaaaacgaatgcctcccccccagaccactgtgtagtgcagactggaactgaagtctaccagacgctcctaaatgttatctttgctataccagcattacggaacctcgtctgcgccagcactgtaaataaagttgacgtaaggtccacttcaggagcatcgatcataccctcctccgttctctagagggtaagctttcaagagccggcctcatccacttatcgtaagcatcctcgctggaccgccgccgtgagttgatatcctccagcaccaataccgtgacagttcgccgtgtccctaatatcatcacccttgcatgatctcttcgagttcttgatgatgtgcggtacgttgtgcttgcccatacgagacgctacgtcacctgttgccgacctttcttagccatgcatcgcagaccggtccagctagagaaccatagcctgctttatactgcaggatcgagcggcttggcgagcatagccattaccggtgaccgttgagttcttccttggttgcacgataaccctcaaactgcttgctcaccttgactgagcctcagacacggcctcagttctctacagagctgtttctgcttgcccgcacggatgttggtaaccccggagaggtttgcctcctgatgttcttgccgtatttcacgacgatattgaagctaccggtcttcctcctctctccggccaccttctacagtccactccttgaacccgcctttcttgtcgagtccatacagtcgttgaaaataactcattgatcctcctcgtatttgatgacaagaacatcattctccgtaggtgccttcaagaccgtcgagccgatattcgtgccatagtacacaactacttttgatcccgcagccaaaccgcaccgagatagcacagcaagagtgagtgacgaacaggtagccccttgggcacctcagggctgcaagagccctcagtgcgtttctcggcatgcctcacacctctgcctgttaattctgctctttcgtcctccagcgcccgtttaggtgctctggaagggcattatacccgcaaccgatgatacggttggcggcgcttttacttagaacgcaccaaccttgaacgagtcgagtcgtatttctagcgaaggcctcagcggcctccatgttttaattatgcttgacctttcacgactagctccactagaacccgcgatctcctcgtagtaccccctcttcagggcacgcgaattcatgtagtactctcgtcagtgtctgtcaaatagacaacgctaggcgggtaatagctccagtcgggtctccgtgttcaatctccgctaccttcgttgccatacacagtgaagagttcagagccctcgatcacatcgtctatgcgcattacagtgggttcagtcggttcagtcatatctcctccttagttttctactttacaaacggcatcgccccggcgaagggaacacttgcactgatggctttccgtctaatttgtcccacgcttcagctttaacactgacagtctttagattgattgcaaccacctcgcctaccagcatatccattccagttccgctcaggcagaatgctactgcgtcgccgatctcgatatcccttcctgctacgtccttcatttagaaattccatctgcacccttgattaaaaaataacgaagcgtcagagggatcatcatcgctgccgtaggcctttgcccgaaactcctgctcgtatttattcacttccgatggctcgctactaccttcaagggtactgtatagtttgcatgaatttcccaaggtccggtcgtattgttgccgacaggtagccaagaagcgctaccagcatatcaatctctcttcgcttccagctccaacttgtaaccatcgtaatcgtatactttcatatttcctcctatcgcttctgtccgcttacgtcagtacgattttaattctccgaatagttctcacctttatcatcgtagactttatgagcccttctgctgttttatagcaaccgaggtaaattctcttaccttcatacctgatccgggcaacgtacctaaaagataccggatacccgtttgtattacggtagatgggtttattctgctgctgctccggagtccgtcgcccaccggcaattagacttgtacaccctttgtcgagtcctttctatcgagagcgccttttctcgggtcgttctccatgtcctcatagaacccctcgaatgtcttccacttaggatcgatggtaacatccttataatatttgtaactcttttgtgctttgcctcggtgtaatattctgcacgatcattgtcctccacaagaattgtatgtcggagttccgtacattccatggggagtgtgatagtagtttagactgcatgcaccgcaactcttattatctcctaccttgagtgctccagttctaattttcgtactgttctcgcagatgcattctccgcatagccagtttaaactcttgaattacctcgctccagagccccgactaccccggagatatgtgaaatcgccccgtagtggtctttaaccgccatcctacctccttacttgacgagtggttacgccgtaagctggcttgctcctcgcccgttgtgtttcttctgcgctcggctggcattgacgcaaaatgtctcgccatggctctttcgtctatccacgcttacctttagcctcaagttggagacgtgtgtggacaaagatgtagtagccagatgcatcctgataaaatcagcggccgcaaagggtccagcgccgaaaactcttcgaacgataccacagtcaccttcttcgctttgcaacagtgtattgaccaaatacagccctttgttacgtagtttatctagcatctgagtaaagagatcagcgattctcctttcgtggccgtaaacgagttcgctcaaagagtgataggtgttaattccgtagaaatgcttgttgcacagagcgctcactgcttcttcgtactgctcttcttccagctgccacgtcccactaattgcagagagtatcttcccctgctcggcttaagtttccgacccacagtcgtaagcttccgcccctgcagttcgctacatccttcccacacacaagctccccacacttccacttcaatattttcagacattctacctcctctttcctgtatctacagggaatcttatatagacatatttcttttccgccctgatgtcttcaaagaccttccgtcttctgaagattcctttagtgctctatccagcaaagtacatcctttcgaaccctgatgctctttgattaccgtccagttgtgcctcgagggtgatttcgttggcactggcttacgccgagtcgttcatctgccccgtacgccctccagaataagctcccatacttcgatcatcggtaaaacctccttcttccggatattgtgattacccacttcttttccagagactggacacgtaacgtccaccacacccgtgtttaccagagggtcaacatggtccagtgttcctgcatccgggagcaggaagtcccggtaagtcgagatacctttttacggattgtatccgcattagtattgcccaagacacctatgaagtggagatcaaagtccgctgcccagtcatcccactcttgtccaaaagataacccaaacgatctcatacgccctcctcagaatttacataatactcttgaccgtcgatgatctcgtattggaggcccctctcgctcagtaaaacgcgaagtctgattttcaacgccccggtgcacacccttttgcaagtatcgttaacacagtctcagtgttctaaacgcaacttgcaatattacagaacgaaccctccgaactctgcccacaccgacagtagcctatctgcctgcctcagacataaactcaagctgcgggtcatccgccgaagctttgagtctgctcatacacccgtgacctccctttgcatcctttcgagtatcactttccagcatcacagagagtgccagctctctccagagagtgaatgtagtttccaagtaggtcctacccttggagataatcttctgaaggtactactgctttttgctgttgttcggtgtcagtcttcgtcccttcagttcctaatcaattcaaacattcctgtataccctccttagtgtaaaatgcattgtccagcccgataatacgtactctgaattttccccattgcaaggcgtttctatcagaaaatttgaaagctcgggtatccagttcgtctcctccggatgtagagttcttttcaccggctttgactcgctccattttcgctctcagttagaagtcctgcagggaacatgctctgaaatataacggtcgcaattcatattctgttgaatgctgcgttttttaggttgttttttgtagtcagcgggaacgactccgaaaagatgggagtatggatcataaagtatgaatcgatcgatcggacacggaatcacaagcaagtgcaattgccgtcacggtattgtgatgcacactcaccttccagccgagcatgaaccggggtcacattcccctgatcgcaattaatgaggacgtttgcagtctcaacagacccgccacaaccattgatttgtgatgtgcacctcgtcattatgaccttgcgctttcgctatccacagctcttcaaagttaaggtctctagcttatttacgctatagggaagcactgattgttattctgccaacaacgctctgtgtacaagaaacaggcataacacctcctttattgaaaaatggggccataggcccctttggcagctaccttcggtagcagtctttggctgtggttttaacccagcatagcgaagaacggtagaagcacttctctttactcgagttctgcactggatggcctcagctacttcagcgcctgcacgagatacattaatgaactcttcggttcgaacgtacttgtccaattcttcacaagtgtctttgaactctacacgcccaagcatcgccttgcctgcggccttctggtgagtaaggttatgaggttttggcaacctccagcgcacgatctagagcgccttgatcgatctccagaccgttttgagctgccaataatggttgcggtgcttttacgctctgcagcgtaagttcttgaagaatgcacagttgagcttttgttaaatttcaccaattttcctgtgccacgacggcgggttttaggtttttcctctcagagaaacttccgtttcaatctctttcgtatcagtctctcgcctctgctcctctgctcttcgcctcctcggtggtgacccgggtcatctttacggtcttctttatgaagctcatattcgcgaatcctgaggtatcttctttgtcgatcttcggaagcctgatcgaaagcgttctaatgccatcgtgaagactgaaaacatcccattctgcatcaatcaccgcttccgtcgctctttcaatttccgcgttaaaaatgccgtcttggcggaacatttgacttgacagaggttccgtaccggtaaatcttcaatcgaacgcatgactcgaaaccttcttccatgtgagcgtgaacggaccggagccacacgattgggttttcgtactcgacgatattaacaacttcttgcattattcttttaccctttgcggttatgtttacaataccaatcgttttcaggaatgtcaacccattttgttctggtaaaggcttgacatagaggaaattcaggtattatcactgataccagcggagatatgtctttgcgcacttcaccggcccacgcctagcgctcatgaagaggaatccaatagcgcaacctgaactcgaatgctgttaaagggtggagacgatttaaaagcggaatgattagcaaaactgatgcagcctgctgcccttcacccgaactcatctgcatgagtaagaggaattgatagagccataccgttctagggcagataaattcgtgctggcgagccttgggactctaactcttcctagccgaatctatctgcattgggtgttctcctgatacatacacaaatactcaccacagataatccatcaatcaacccataaggaatttctatgagatgggtgttgtgatagcggtaacctcgtttgagactccagtcatcaataaacatactggtaaggaagacgatctatgccctttgccgtaggtttgttctcaatcccacactggatcatgagtattttggtggttggtatccaagcgaaggagttatcgtctctccctaccggggactaacattgtgagggtagagtgcgcgtactctggacaataaggaaatagtagattacggcgaataattctttaagggtttgacaacaggagatttatgctataatcggagtatatggggcttggctaaagcttcagaggatttatgactcaagaagaaacaagggcgtaccgcccttaatagaatgccgagctagcctcggggtatcattcaaacagacctggagcagaccagacttctaaagaagagctttgcagagaacattaggttcctggccaagagcaatctgacaaccgaggtttctacaaatgagaatcaagctcaagaaagagcttgatatgttcgtcgcttactgccgacattgcactcgcgcatttgcaaaagcgaaacagaatcaggagataatgagaattgaagtatatcgctcccggagtagttcctctcgcgttttgattaattcgtcgcttcgttcaatggtagacgccagactttgaatctggagatttatgttcaattccatcagtggctaccaaatgtggtaaagaacattcaccccgacaagcaatgtgtctcgcctcaggacagcgagtaagaaatgtccctccagaattaagggtcggtgatgtaattggcaaccttactggattccgtaaatcctcgtattctctgctattcgaatcggagtcggcctgccaaattatatggaacttgaatcctaacgctcggccggagagctatacgcgctttaatttgatgtctttagagaccggtattcaattggtgttaatggaggaagagtaaggccctgtatagtgacaataaattgctctcgtatagtgtaatggatgcacaacggtcttctagcttcgggtctaggttcagagtcctacgagctacccgagatggacggaagctaaagtggatcagcatctggcttttaaccagacttatagtgagttcgagtctcacccgtccaaccaaatttagtgtgagtaaatcaggataggttcctgaggccccccgctggcgagtacgtctgttaacgcggatgtggatcgagaccactgctcacgccaaaaatcactgccaaaatagcggatttcatgttgacaaaccgaattttcatgttttaacaacactttaccgcattgaagaaatgacgaagagcagtcctgagtggtcgggaactagtctagaaaactaggccgctgtgatgtatccaggagggttcgaccctactgccgccaaattaaggccccttgtgggtggaattggtacacatcagtcttagaaactgacgccgagagggattgagggttcgggtcctccaaataccaaattaagaatctcgttatttggttagttcgagtccccaaataccggtcaccaaggtcggctccatggcggccaagtagtgagagagatagggactgacgaaggtagcgctgcgttttcagacctccccggtgccataaaagctatcatgaagggttgacaaacaagaaattcatgataatataggtacatagagtaccaaatgtaatatagccggatagctcaattggtagagcaccctaatcgataatcggatggttgaaggttcaagtcccttctctggctaccagaactttacagcccatagctcagtctgaccagagcaagcccccgttcaggcaaggtcgtcggttcgaacttacatgggtcgccaacaaggtcgttgtagagatagatggttactatcactgtcgcaaacccggacgccataggttgaggttcaattccttccttcgaccaccaaatagcgagagcgttaagactggctggtgctgtcactggctcgcgcaaccgaacacaagtggttcgattcaatctaccaaattgcaatcacctgagaaccctatggtgggttcagtgtcgctaaattcatctcggtaagggaagcgcctaagctggcacggtgggtaattgagtattgtgaggttactggcagccagtataaatcgtccggctcgggcccgttatagctcctagatttggaattaatagatgctgtggccatagaggtgatccagtatctcccggaggcccgggttaacaacccatgaatttagcccgcgttggccgagaggtttaggcggtggattgcaaatccgtctcaatatcggttcaaactgatacgcggctccgtcatattgggatgtagctcccagttggcggtatatattgttaacttcaggtcgcaggttcgaaccctgctcgtcccgttaatttcaaaagagattctttcgctttgtgaagcagagtcgaacgcccggatacgggcctttattattatctcctcgtagcctcagtctggttagagtgtctgatttggaatcagaaggtcgaaggttcaaatccttccttccgggtgaccacaattagggagtacatagtgtgaagatcaaatcgcgtatgtccagcgaagactggatatcatcgcaaacgaaacaaatgtccttttgctgtacgcggcccaattacgtaatggagttggaggcgtcgtcagaactcaaggaagcgacttcatggtgtctctagtgtaaaaataaaaagcgggtatagctcagttggagcgggcctgccttccaagcagttcgtcgtcattcgagtccgtctatccgctccaaacaatgcatttgaagctaaccaggtagaagcgctattgaaattccgtgaggacttgatcgttaccaagcagatgcaccaaataaagcaagcagctatagattaattggttgaaattcagactttcaatctggtgttccgggttcaactccccggtaaccgcctttaatcaagtccaagccggaacattcctccgtatgctttcagccggcttggcattattcgtgcggagattgtgtagcctcggatgctgccttcggttgtgacccgattgttagttcgagtcccgcctccaaccaatgtcgtgcaatggtcagtgctgacgctttagctctgatcgtgtttctcaaaagttgagaatagcgggctctcgcagcagagcgataggtggttcgattccacaacatgacactctttcctcctcgcctgtgctgctgaacggttttccctccttccgtctcacaggcctcctattcccctgcccttgctatgtttatggtgatgcaccggctttgtaacccggcgaattctgttccgtcaggaatggggcaccactccactatcatcaaagaacctcgcaagctccccgatagggttcacactctataaggttgtagcatggaaaacactaaggttcctgacaaaacttcgaccaatcgcgctagcgacaaagaggccagagagaattctcgatctcagccctcatgttattggtccaaaatctttcaaacagaaagaagttcctcacagacagcgatgcaaagatcaccgtattcggtggtgctgctggtgctggtaagtcttatctcggtgtaattgacttcatgaaataagtatccatgatcctaacttccgaggtgtaatgactcgtcgtaccacctcctcagattagcgctccggcggtctgcttgaaagcaacagacctagcctgggcttcgttgaccctaaagtcggcgcggaaagacaaagacggcaagttttgtgttctcttctggtgcagcgcttccttcgacacttcgaacaagaatctgacaaagaccttccaaggttggttgcaagttcccagtcgacgaaggtcagcagttcacagaaggcatggtgacatacctatctcgtatgcgtaacctcgaaatgctcggttgttcctgcaatacgaagatacatgtaaccccgattacaattcgttcccttcgtaaatggattgaatggtggctagaccccgacacaggaatccccgatccctgagctgcctggcgtaatcctctgctggtttgtacgcaaaggcggtaagatgttctgggagacactgctgaagagtgcattgcctcatggtaatcccagtctagcgcctgacgatgaagatcaggtgaagcccacagcttcaaattcatcgttattaaccgtttcgataacccaatcttgatgctcaacgacccctgagtatgtagctaacctttaaagcccttcctaggtagaacgaaaagctccctagacgaagctggcacgctagagaagaggagctgatacttcacaagggactggtgccggaatcgttccccacccgcctctatggaagcttaaaagggtacgcggggacatcagcggtagcacgaatccgaaaccaacagaaaccccgactgacagccggcgtgctgatgagccgtacaaaagaaggcttgttcactgtcgagatgttgtcagagagcaggttgttcggaggtgtttcgacctcattctagaaacagctgccaaagacggtcaagacgtttgaaattcaaatcccatgtgacccggggctgctggtgctttatgctgcccagctactcaggagacctagcggatcatggattccacgccagaccgaagacaactaacaaatcgaaagctactcgccccgttcgtatctgtagctgaaactaaatcaaaagtcgcaggagattgcaacaaagatttcacttcgcggatgaaacttgagcgattcggacggaagtgggctatcaaagactgctgacgctacatcagatgcatttaatgctctatccctttggcagcttgatcccctgatttcctaccgcctgatatatgactcaaccaacaaatcaccaaaccaattaataggaggcggcgccggccgagactgaaaaagacagcaccggtatcccgcgacttcaggcgagattggtagtacaggccttaaacagtcaatggtactattctggaaagaacgccgaccagaacttcggttccttagggcatgcagaacattccaatgatggcagaagaccctaccatcaaatcagcctttgatctcttcgaaatgatgatgagcagggttgactgggaagttgatctaggagttgaccccccgacgaggctatgaaggcccgtggtaaattcctgaaagagtgcatgcatgacatggagcacagttggtacccttcatcaaagaggttactagcttctacaccctacggattctccgtacatgaaatggtgtttaagctgacgtgaaggataactttgcatcgaagcaataatgacaacaaattcggtgcattaaagttgccaaccgctctcagtctactatcaccaaatggttgtactctgaagacggtagaaacttcctagggtgtgagcaaagtcttgccaatgttatcaatggtgaccgttacgtcaacttaggtaataaggacggaactgtagagattccagctaagaagatgttttttttccgggtcgatgctaaacgtgacaagtccttgaaggtaacagccctccgtgcgtgtttaacgcttgagatatcgagtggagattgaagagcaagtatccgttggcgtaacacgcgatatgaacggtatgcctacgctctatctgcctcctcgatatatgtccgaagatgccacagaagttgagagggcagctccacgaatactggcttaagcgagtaattgcaacattcaaatgaatgaacaatctggacttatccttcctcgctaagctgacccagaaagccgacaaccctgttcaaattcgaactgacttcgcagggcagtaagatgctattacagattttctcattcgtcgctgggacaacaaaattctgcaagccttgtttgctgccgatatgctgaagatgggtcaggaccaagttggttctgctactcttctagctggttgggcatctcaacatcatggctatggcgattgaatcgcggctccgcgaaatcaaagacgtaccagataatataagctcattcctacgctgttcgcactgaacggtgattatagtccagacttcaagctcgaagagctgcaatacggtgagccagatgaaatcgatcttgaagagttctcgaaagggaattcagagaatcggttcttgtcggtggtcttgaacgtgaccgtgaggtttaaacaagattcgaaagctctcaagattaagcctcgaccagacgacgagcctgttgattaatatcatgggtggtcagtctcaagcaggtaaagctggagtaggtaatggcgcatcaacatccgcagccggtagagacaacgccgctgcaaataacgcataaggagcattggtgaatgcgactcttgaaagtgttattgaagctcagtaatgctgggctcctgccacaaggcggaagaagccccggctgtagaggtcacaaagtccctagacaatgaaaagggatggctttgtttgtcgttcttgagccccaagaagcgacccacgactgatctacacgtaacagacacctactccgaagaggaagtagagaaagcttgccatcaacttcaataccattgcaacgtagctaatatcttccacaagattgaaacacaggaagctgagattgtccagtccttcatcgctccatccgcattcacacaactggacgacggagaagagagatcaagaaaggtacatggctccagtggtggcacttccctgaaggctctgaagtagccgatgcaccatgggaaggcgttaaatctggtgaattcacaggcgtctctatcggtgccagagctacagtcgaggatatcgaatgaccgtaaaaaagcaaaacgtaaactgaccgataatcaagttgaacacgaggtgctcatgtcgctctggtcagtaagctccaaggtggtgcagccaacgggcggcacactactctaatcacaaagctaccaatggcgtaactgaagagctttatcgataaagctgctgaagctacagtcacaatgcaaagttctcgagttctctgaagttcttcgatgtattatgaagatgccgaagttctctgctgccatggatatggcagaacggagtatccagaactagatcacaagacttcgaccagcggtcgagtctatgtccattctaagtcggtttataaatcggttgacctgaatcaagccttccgaaagttactccccgagttggcatccctttccttaaaagggatcaggaactgcttgaaaaggctctggaggtaaatctccgagcaaatccaaatgaaaatccatccaaggagataccaacatggaaactatcctgaaatcggcccacctagaagctctagctgacgctattgcagttgaaaagctgctggtggtcgctgctgttgcagaagttcagaagcaaccagacgccgctaatgtagagccgccagctcttcgtgaaatttcaaggctgctgaggcagagaaaaccgctgctatcgctaaagcccgtaaagagcaactggctgaagtccctcccggccgaccgcagaagataactttcgccctggaagttcgacgatcaagcttttaacaaacagtggaacgcccggcattcttaaagctgctgccgaccaaaacgacatgcttgtcgagaaaggtgtatcgggcgctggggaagaagacgacttcgttgtcgccggtgttgccgctatcctgaaagtttccgccactttctgcccaagtaatatttccagccggcccagggaattccaaatggctcaaacattatcgcaaaagatcatcagcgtcttagcaactggctgaaagaagaacaaatgggccaccgtggcctgttctacactcgcgaaactctgcctgtcgccgacattgatgttaaaacaactggttcttgtccctagacagcactggcaagttggtaactaaggctactatcgccgacgctaccagcatcctatttaataccgacctgcacgactatgccaacgctcagatgagccacgctgtcgtccttgctcgcggttgccgtaatcggctccaaggctgttatcttcggtgctgacgttgacgacgctgataaagttaccgtcttttaaagccaagaacatcttcgccgttgaccagatcgaagttggcgcattgagaacgttaccttcgcgtaagccgagggtcgttccagtaaataaatactaggagtaactttaaaaaatggctaacaccccgttctacctaaacgatggtcagttctacattgccgaccagactgaaacctgcttatcatcccgaacacttggaccccgtcgagaacatgggccgtcttcacaagtgaaggtgtgactcagaaaccgtccagttcgaagagatcgaaactcgctacggtctggttaaggatgccatccgtggaaaactcgtcaccaagttgctagcgaccaacgtcgtcaactgcgtgccttcgcgattccgcacttcaaccacatcttaattacatcaattcagaagatattcaagaagcgcgctggtgctgaccgcgaagaaactctgaacgaggttcgtgctcgtaagttgaaaccatccgtcgcaatccgaactggctaacaccgctgaagttgcttccgttagcgctattaacaggtaagagctacgccccatccgaaccatcgagtacgactggtacgacctgatggtaaaactcgtaaggttgtcggcttcgacctgaccaaccctaccacgtttgacgttatgggcaagaccgaagaaatcttcgtccatatgcaagacaacagccaagacggtctgatccgtggtgactcgttgccctgtgctcctggaagttctttcaccgccctctgattaaccatccgagcatcaaagagttctacaaagctaccaaggttagtcctcaatactggcgtgaacgtctaaccgctcgcggtctgaccttcgcttccgtgagtttctacttcgaaacattcacttcatcgaataccgtggtgttgacccgtacggtaaatcgttctgatcccggctggcgatgcttacttcatcccaaccgacagcggtgacctgttcgctcgttacttcgaccgggcagcactttcgatgacctaggaactgtaaagaactgtacgctaccgagcgtatggttgaagaccgtcgttcgatcctgatcgaaaccgagtccaaccatccacgttctgcgtcgtccacagatatcgttcgcggcactgtgaatgcgtaagactttgtgggaggtttcggcctccccttcgtcggggagggtaccaaaatggcttaattggtgatccagcaaacaaccctatcgaccgtctacgagagattgtaggggacgtgggagcctccgctcgatgctttccgacgaaacctatcaatgggtgttggacaagaacgaaggcaacgaaagacgagccgcactttgaacttatgcgtatgatgctcttccgcctgacaagcgaggggaatgagaacgtacaggtgatatcgaagtatatggtgctgagtatttcaacaactacttcgaaagctctagctcattctcaaagaccgaatattacaatttctttggccgtgccatatgctggcggtatctccaaatcggatagctggctaatgacctagaccccgacaacgtaaacacggaattctacatcggttttgcaagacggagaagcttaaccagtgcaaccccggtcctcaagaccttaggcatgggtgtgattatcttggcaagcttcagttttaaaagatcgccgtcgcctcacatccttgattaagagggtggaggctctagacggaacaacggtagaagttggtttcttcccctcgaggaccgatataaacgtctctggaaatgttccaccagttcacaagttgcagcttacaacgaattcggtactactgcaacccaacccggccattcatggctccaaccttgaagaattcacaatctcaattccactacgcaagactaatgaagtctacgtttgaaaacgctatccgcgatggaagacaggttaatactcctgaagcaagaatggttgcagagcagatgcaagttaacattgacgactacccggctctaacagtcccgcgcagcttacaaagggttcaacgatccgttgttccgatactggcaagattttgagtctgtcaagttccaaccatcggaggcaataatgctctatcctacctttccatgaccaactttgtcaagctagatttgattagaagagggcagcccggagacgacggttttggaagacctaccctccagttgagacagtagtgacaatcacagctaacgttcaacctatcgaaaaaatcgacagacactcgtatccttccagaggccgacagaagcaaggctttgcttcaggtaatatctagaggcgaagagattcgccagttaaaggaaggaccggaggtggagcgatagattcatgtggaaggagagttgtattgaagttatgaaagtcatcaactattcgatgggaatcctaaaccattacaaagcaatttgtatgagtagaagaggaatagtacagcatgatccatacagagctagaaactctctctatcttatgataaaagagttgttccctgattggcgtgtcatccaagcatacacaaataatcaggaaccgcaaaaccccttatctggctatcgatattaagaagctagatgaatgggaagggaaaaatgtctccaacatgagcgatcccattaggtcccttcgcatggaactgttcaagttcaacaggacttcgcagccaaggtcgtattcgaactagttggtaagtatggagagacagctgtctctgacatggcaatggcgattaccgggctctgcgtactccagcaggacacgccgcccaaagaaagtttaatctatcccttttcaaactccctagcacaagacgagttcctatgctaagagaaacagatatgtacatgttctatcaagttacatgtgaatttggattcctcttgtgatagaaaccaccctaagagtttgttgttgggctgatattcacggcgtttattacgacgctggtcgcccgggtcacattattgagtcccacatcgacataaacttcgaacactaatagggagacaggaatgaccaactgtctttaccgatgtaattgacattcagatcagccgtgagactgttgctgtcgcacagacaaacttcaacgttctctgttcatcgctttcacacaaacttcgaacgtgccagagtctacaacagcctgaaaggtgtcgttgaagacttcggagaatccggatccaacatatcttgccgccgttcgctacttcggtcaagcttccttaagccacgcagtctagttatcggacgcagacaagttccttctgctaccgtctctgtcagtgctgttcaggaagctgacaaagctacgtcccaataccgttaacggactacctgtcagctatgttagccagcaagcatctatcaattgctactgattacaggcctaaaggcagcttatgacgtacccgcagccggcgtaaccgtcacagacaacgaagacggaactctaaccgtcgcttctaacgaagactgagcctgaaggtttcttcttaacctgaccatattgctgccctactgaaggttacggctgctatcacagcagcagttcaagggagaaaacgacgaatggtatgcgttctgagcattgacagccacgccgatgatgatatcatggcagtagctaccatatcgagggcaatctcaagaaagtgtttatcggagccactgctcagctaacaccaagacttccgcagagaatgacattacttcgtccctggttgctgccgggttccaaacgtacggctctaattcatccaaacgctgacgctcactccctgagtgcttttggtagggtaccaactgcaaagagcaactgcagcaaacacatggacccataaagctctggccgctgtagacgcctaccgtctgactccaaccgagtctaccaacctgaagaacaagaaagttaccacgttcgagcgtgttggtggtgtcaaccgtacatctggtgggctatggccggtggtgaatggattgacgtaatgatcttcgtagattggttggaagcccgcatgaccgagctgtctgtggtcccgcatggccaacctgaaaatccctacgactctgttggtgcaacaattctggaatcggaaatcagagcccagcttaacgaagggaattcgtgttggtggtcttcgccattgaagcccagctcccagtcttcgtaattcgatgttctatccatgtctccgaacatgagagcacagcgtatcttcgaatgagtttgaagcccgtctagcaggcgattcactttgtacacatccgagggaccgtgaccgtataagtctggtccttccccataaggagactcataaatggctgttcaacgtctagctacatcttccagccgatgttaccattgtcatcaccaccctgcaactggtgatattcctcggcggattcagcgaagacagtatcgttaacattgaaagaaaacgccggacactttacgtgatgtataccgagccgacaacacatcgactcgcgtctgtcccggttccaaccacctaatctcaaccagttcggtcttccattcagtataccgcacctccgttccaccgttcttcctgccgttccaaccccaaatgccatcacaacctgcaaactctaatcggcggtaacgccgctgagcccggtgatgcggatactcttcgtaacctaggtgtcacactcagaccagcgctggctgtaatatagcgcttattaatatcgacgggagctgccttaacgggtggctcccttgttgtttctggaggatagaaattgattaccacccactgcgacgtggttgtaactctcgctggtatccattccgtgacagggtacgcagagggagagtttatcaggaattgtaaaagataatagtttcatcaagcacggttcgatggatggtgaaatcgcaagggtctacaacaaagaccaaaggctggcgagtagagttatcaatcatgcaatcctcgccgaccaatgatatcctttcgatgctttacaacgaatattgcaacccagtcgtaccccaccgatgattaaggacacgaagggttcagctctggacagcatgggtggaagacctaccttagggtatctttctcttcttgacaactgcatccgcactttggattctaggttcgaggtcgccatgcgaaattattggcggaaacgtcgatcaaagtttggtcgagcaagctttcatcctgttgggaagctctcttcgccagcccttacgcaattcgctggaggcttctaatggctaacacggtattgacatatatagcccatctgatgttaaaattcgtccttgtgggtatgctcactgtagtttctttcgaaatgtcttggctttcgagacccacaataacaatggttcgaggaatcagagggcaccacacccgtcattgagacctttcttgcgcagattaggaatcgaggttcttcagacttcggtgttcaatgatgcattattctcgctagtagaaagttagcatcgaagaacacaatccgcccgaatcacccttgtctgtcaagattcacggtagcaattcatgatgagcaagcacacaacgcttatgtcaatggccaccctagcataacattcaccgatggaaccggagaacaggtctgaccattgatgttctgactggaccgatggcacggtatggaaaccagcaagtcggcttcgacgtgtttgaactgttcatgctcttagctacccttgcgataaataagtatttatgttcggaaaccaacgtaccgtcatccacaatgggacagaatacactatcaacctttctgccagcaacctcgcggtatcagcgtactgaagcagctaaccagcttgttgggtccatccccgttgggcatcgctgaccacgacttctctggagccatgaaagaactgttcgataacatcgacaaggttcgttgagaatttgatccagaatctggatgccgacagttttcagctgtctgatggcaatcaccttcgacaccgaattcgctggcagtatgacctgctgtacgcactcacaaagacgtgatcgagttcaacttcggctcggtttttctaatcggtttcgcagaggcaccgacggtataaagactgggatggcagtccgagacttcagtcactaccgatcgagttcagagtgatcggagggttagaggctcaacagaagttctcgcagcattgggagatttatgtggctatcactcaccctctctcaagctaacgacgtatgggaactgagtaccagtccctaccacagaagattaaaataacatcctgaggttatagacgttcacgatactatcaccaagtggcaaagaacacgcagaggctgataagaaatgattacaaaaggattgcccagctgggaacttaatttacagtcgattcccggcctcactgcgttttgacaagaagctcgctggggtcgaagcccggctaagagaatttccaagctgacgaacaagcggtttgagttaagctaactctagatacaaaactctgagaggagcttgccaaggcagccactcaaagcggtagtcttgaagaacatcgcggtagatgctgccgctgttcgtcttatctctgagaagcttcaagaaagactgaatgcaacgccgatcaggttgagtctgttaggctagaccttagcggtatccgagatcagaaaaaacttcaaagacggctctcggctgcatctcgtcgatctaccggttgaactgggcttgcctttcaggctttagccacgctgtatgaatggaagaagcgcacagagtcgttttaaaattcatctgaatgtatgacattagccgctctaaattgcccagaacgtactgttcatcacctatggatgcgtattaaacggtcttgttgtcgctacgcctcaaattagctgttcagaccgtgcccattcgtgatcaagatgttctgagcaaatcagacgcgaagtgagaatccgcattgacctagagtcttccatccgaggaggtggtggtggatcgagaggtacttccggccatatccgtcaaggtatgggaatgggattggtaaagagctagccggtgggacgcgggtttacttcgcccttggtggtgcgttcgccattatgcagcttaaccgtaaaaccaagaactgctatcatgcctagcgatgctttcgtcggaggcggagcaataaggtggctttcaagaatcgttaccctccgtgatattcagggtctcgacgacacgagcccttggtagctccttatgttaagacattgatacgctggacaggcatcggatttcagcaggaacaagttgacagcatcttccagttcatggctgaatatggtcgagtgatggccttgacggcgaagcgatgaaaggctccttcctcgagcggttgagcagatgggcaaagggcgattatgtccgaagaattgaaaggtcagttggtcgaaagattcccgctgctgtagctctgatggccaagtctcgccatcatgactatcaaggaactgatgaaaacgatggaagacggaagcttaaaaggatgtctccgattccattttgccagaactcgaagaagcccaggaaaagcgcgctttggatgttgccatgtacgcaccgcagctcagcaaggtcgatcagttcgatggaaccgcactatcgaagcatctactggcggattcgatagaggtatgagtgacttctttaagattgcttcgcctcaagtacgaaagccttccagtaactgcacttggtggcgggtctgaagccttatgagtattcgtcaacgctctggtcggtattgagggagcttggttccccagtaagaacattgccgccagttcaacacgaccggcaatagggctgactctaccacggctcaaagtcctagccttgctgacccctacaaggttgatctcgctattagccagtgcgttggcactgaagacttccattgtctcttgaaggcgtatattcggcgttcggggaccccttgaacaacaacgcaatgcctacattcaaccgaaaccaaataacgaccctgacggtattttctgttgtcccgctagctgaagcgctcaagcacgaagagttcaacaaaatgctggtcgctaatgatgagagaacttgctgccatcatggagttctttcaacagtgttgtagagagattcgcaatagccggcaagtacagggacgctgctaagattggaagccggaggagacagaagtaattataatgtcgaacatcgacacgatgtcgcgttcaatccggaagatgtaaagacaaggccaccttcatcggtgacaggctagtagctcagaacattgacgcgatccagacagagacttatacccgtgcaaccagtccttgactccagaccagtttgggtatatgatgcaacgtggtcaagttagaaacgaaatgaggcgcccctcaagaagagtgcgccattgacattagtttcaacctcacgtttctggtatcatgctcagggtaacgtcatgacaactgaagcgcaagaagcgagtacgagatcgttagtaacgttcttgaggaagaaattcaggacttcggcaagttataaggaatcaaatgacaattgctatcaaaagagagaacggagacctaatctggttcgacgttgttacagagttcggccgtggctctgtgagttccaacccaatcgaaacgggaggaaaaatcacagaccacattactacagaaacccagtcttcactcttacagccgtcaaacttcatcttgaacaggcccgttatcaacgacaacgaggcccagacatacaagatcaacaacaacaaagagctcagaatacgcagccggtcagtgtgccggctgttatcacaacttagatttgatcagccgaattttcccggaagttattaccagtttattcctcctgagattcctgcaactgtcctcctcaaaagggtgataaagtcgcttatgatattgagcgccaactgatcgacatgcagcgtaatgctgaggtcttcagtttgctggactcgagaaggtatcatctgggatcaaatcgaaagatgcatcttcaccgacttgtctttcactgaaaacgttgagacaggtagcagtcttcaacctgtatgacaccgaggggccgtgacattcacagacaccgctacattgaagttaggtgaacaagggaagaaagacagccaagaaggaaagagagacatcaaagatggtgaaggggctaacaacgctactggacaagacctcccacattcaagcgtagccagatgaaagaggctcaaattagaactcgttggcaggtgattaatgagcatgacttacatcgacacatctcctttggtaccaagatagaagtatagatacgtggtagctctgagggcatttcccgtgtcctcaattctactggaacagccgctctaggcagtggcacatggacatattccgacgaggagcttaatccaatcctaacagggttggcattggttccacaatacccgataattgcagattacgccatatacaatatcagtttactggtactttgtcacgccaacctagaacaggtagcacgatgcaaagcgacattgtacctcagttttgaacttctgtatgttaatgttgatttggaggaagatgcagaggagacaatacgacagagtatataaattgacgctcggtaatactgagtctggtcaggagtagagattacaaaccttcatcctgacggaagtgttaacagaaggacttcagttcaggttcgatatctctaaaagctccgataacaaaagagcggcaactcggctactgttgagatatacaatctgtcgattgcaactctaaaccttcttgaaaccgaataccttacttgcagactagaagtggggtataaagaagctggaacttccgttgttctagatggtaatgttgtcgaaacatccacaagaaagagtggaaacgactacgtgactcagcttattcttggtgagggttacactgctctaactggagactaagctgaagggcacagtatctccgggcaaaactgtaaaggatgttatcgaagagattcgtcttcaaatgccggagtggacagaggagcttatacaatttcaattgcacaacccgatcacgtacggctaataacccgtggttcgggctatttctaaacagcgtgtgtgaagcgtaacaatattgaatggaacatcagtggaacgttctaacgtcacagacgttaacggaccaacaacgaagtgttcaaatggctctcgtaaacacgagagaccggtctgatcggatatcccatttctacgccagtgccagcgaacggcacagaagaaagataagcgggagacggagaggcgttcactccaaatgccttctcaatcctgagctaactcccgttcttgtccggtagagtcggatacagattgtcaggaactttcagaatcaacaacgtccgaatctcggtgatacagagacaacgaatggtacactgaatgttggtgttccgattccataaccaagaggatattgaccaatgaggagaacaggcctacaagagcttctgaacctgcactcgtccacggaaggctcgaaacagtatactgccataccttgtgtggtattgcgcgttctggacgattttagacgcctttctgtcgatgttagaccagtggtcaatgacctgtacaaagacggcacatcagaagagcaaccagagattctatctgtccccgtcattatgctgggaacagctaacacccttatcagcttcccattgaatgtcggggatacggtgttgtgtactctcaaagaactatggacgtttaaaggctctgccactggacagccctcacacccaaacgatcttcgtagttcaacatggcggatgccattgccattctcgggttgttcacacttccctaggtcgatgaacgaccctgcaagacatattggccacatgataccgtaaaagaccttactactgcccgctaccaacctgatgacgggacaagaggcggaagttagatcaaagccaatggagatattctaatcaacagccgcaagactataagcattaatgctcaaaatgtcaacgtcatgtgcttcactcactgtcgatgcagcccatacaacatggaacggaacattgcacatacaggtaactacgtgcagactggtggaacttctacattcaacggtatctccattccatacccacaaaacacggtggtgttatgccgggcggtggtgttgattgctgtcccacaagctaaaaggagatcatatggacttgtttgtcaaccccgacacacatgacttggtttttataatggtgaagctccagtcaccaacgaatggttgatattgttgctcagcgactaaagatcaaactgtacacattcctaggtgagtggctcttgatgataggatcggcatccctttacttcgagaggattcttggtaagtctaggagccttccccgctgctgacgcgacatccatctgagattacatccccggcgtcctgagatacacatcttggcagtcggggatcgacccctcaccacgtgaatacccatgagttcacagcccagaaccacagacaatgaaatccttcccatcactttcagaatgataggagtttaatatggctggaattacagcagaaggtctaacgattaaagattctggaccaaatcctgacagactacagaaacgtagcctcaggtcttcgccgacctgtttcaactggcacgaagttgacacgtcttataatcctgctctagccgtctgatcggcgtagttgcccatcgacgaagctatctgggaagttatccagatggtgtataactcctctcaacccgcagccgcaactggcggctctggacaacctagtgtcctcggcaattagccgcagcatgccgcccgtccgacccggctcaggttgttctagagggcaacatcgacaccgttattaactcgcctcccgctaagcatgccgatttccagcagtacaggccgagtgttccacctgctacaaggcgtgatcctcactcctaaagcttgctctggtgttggaatcttccctcagacagtaacgaccttccgacataatgagcttaagatgtacgttgatgacattaacacaacgtctatcaagtacaataataagcccttaccactggtaatagtaacatccgagtccaacttctagcaggactggccgcagacgtagctacaaatcacggaaataccttgacaagctacgaacagaatggcataattttcatagtacccattgacccattcaccaagactttctgaagaagcccaacctgagtatattcagaaggttagaaagcttggtatcgctgttgacgacgttattggcccgtggtgcctcagcagcctagctatcgatacgatctccattcctattgccggatgggacagcgttatcaaccctgttccagctatcactggccgtctgcgcgagaccgacgatgagcttcgcgagattccgaaactctacccgtacaagccaccgattccttggagtccctaatcgacggtctgatgaacgtagaaggggtagaggatgtgcgatttattgaaaataccgacaacccagaccccgttcatggagtcctggacactcgttcccttccaatcgttctgtggtattcccacagaggttgcacagtccatctggctgaacaagccattcgggattggttctgtcggagatacagaggttcaggtagtagacagtctaggctacactcaatagtaactaccagcgacccgtcgaggttcaccgagatcaagatcagtgtaacaaacacaggatcgatgccagagaacattgaagatccacggccaagttgtagcgtacggaccgagaattacaagatcggagacgacgtaatttattctcgattctatgctccaatcatggaagtcccgggcttccaagttaacagcctgacgattgccaagaaaggacagactcaaggcatggcgaacatcgagatcgggttcaaagaagtggctacattcgccgcagcagatatcaccgtaactacggtgtaatgatagaaggagaattccatggctgtcaaccaatttgacagagaagattattatctgaggtggcccgggaacggtcactgaacagtttaaagagaagccgattcatcgcttcctgcgcgttggctgtctggtaagtttgatatccagaatgcactgaagacctccagactccggtctctggacacagccaccggagacattgtaagattaattcacgcggtctagtgtaccaagatattttcaactattttgattcgctggaacggagcgtgcaggttctttcgaagcctgtcggaccctaacggtcggtgctccatggtactcggtgtcggtgcccaactggtaacgccagagagccgagagcgatgaagagtatcggatgatcctgaaaataaagatcatcaagaacagaacaaactcaaccccagagcaagctatcgaagccataaatctgtattcggttcctgaagtattcctagaggagtacgccccgcgccgtccgtatcggtatatcggtaagattctaacgaacgtagagcgtagtcttctattcgacctaggtaggtgcaggtgcattgctctaagactatcgggggttaactacacatacactgagttccaagctggccgggtatttgctacagaaggcttccccggggacaaggcgttggagacctaaaacgatcccactgttggtgaattcgaccaacctagtgacataagagttataaatggctgatatcggtcaactacctattgaaaatattttccacaggcggggatatggtagccccgaccccgcgcagcagcaaggcggatgggtattcagtcttcctcgccaatggtggaactggaagtggaaccttcaccgataatactaaccttagcgtatttgctaccagaagggcatcccagagtggactagcactcaagagtatattactgcaaacaaatcgttctgcacaagaaacggtttcgtctacaaggctgtccaaaattcatattgcggtagcgacccggccaccgttagttctaactgggtccgagctttcgcagacttttaccacagctagctctgcactttggaagcctgactccgagagaaggagggattcctcttcattagcgcatctggtgcaggtgtttgactctctacggcttatggatcggcatgctgaacgtagccaacgcagcggagctagagactacatttcggctcaagagagttctgttgtcctgttcaacctgggttcattgtgatcttcagggctgccaacgcggttccgtacttcaacaccgacacccgatggctaccttcaacattacagcgttcgaagaggcctagtcaacgcgggtgatgcaaccaacgcaaagaacccttcctaggccttccagctaactctgctactatcacggttgatccagccaacagagttatcacacacactctggtctatagagacgctgctggtaacttcaacgctggtgtgattacagccactctttctggtaacgcgactacagccagcaagctcaggctccagttacgattaacggcgtagcgtttcgacgaagccagaacattgttcccggcctaggatacaagctacgccggtgttaggcgaggctccattaatggattaacatgaccgaacagataagactacccagttggctcttagaaataaattgatacagattggattagctcggtggccctggatgacagctcgttggtgcttcacttagagggccagaaggctaacgccacactcgcgggttaatccccaatgttgtgttccacgcggaaaccagtatggactagattaccaaacgcaagccagagagcggccttggttgacagatcaatataaatgcaaccgtcctgtacaacgcagataagagcaggtacttggttgcaaagataacggtgtttcccggtatctgggacgcaacgactaacacccctatggcgttttttctagactactaggccagttctcgactacggaacagtccctgttgcacaaatacaggattggccaacccgcgacaattccggtgatccgcccaaatctgactaatcagattgcgagagcggaaacaggagatatcgcagtgccgctgcgttacagcgtttggcgctgttctgggaacagaccatatgagtaagagccagcactggtaacgctctcacctagtattccagaggaatgatggagcagaggtagggctttatttggggaactggctggccaactctctgaacttcaggatcgcaggcggtgcgacaggcatgtctcaataacaaactctgactgtagttggcagggtgaatgctgcgacactcacccgtctggcaacgtcaactctggcaacagcgtgattgctgccgggaacgtgcaggctgctggccgtgtaccgcggcgatgcttttatgagcagcaacggcgcaacctttactggcgggagctggctctgcgggactcttcttaccaactggtagactctgtacacgctgcaggaaaactgacgtaatgactgatgcccaaatcttggcttcgccacttcagaggtagtgctcaggctgtggggaacatatgtcttgcgattgcagccagcggaagcggggatgttgggaccgtggtagctggtacgtctctgtctgtctccgtcaactaccacggaactacgctatccggtagctgctaggcatgggtaggttcggagccggaggttctaaccagattaccttgttccagaaggttgcagattatcaaataggcccgtaagggcctttataactggaggtgattttaatggaattcagaaacgttgtaaaattaaagcggggttcgaggtgaaataaaccatccagaaattgatggattccttacggcgctgtagagggatgccctacgtctcacccatgtaatgtgaagatcgccggaaagcgattgaagatggctctatggaagtggtagaaaaagagacaaatatgatgactttgaagccagattgtgagagacaacgataacccgggctgaccgtcaagtagagattgctatcgacgatgaagacgataagagagaaggcttggcgtaagtatcgttctgcactacgtaaatggccagagcacaagaacttcccatccgaaaagagcaaacctaaagccctaaagaataaggcgaggtaatatatgccaaacattatgaagcctacgggtattaacgctatctggtctgaaacggccagaaggttgacccgggtgctgtaaaagttgggcttgatggtgtgacagaacactacctccctaccaaactgccaacttcattgaatacaagcaagacttgttcaacgcgcacgttaaccagcacggtattcccgaatgggatagcgtcacagagtatcagggtaacctgagctacactcaaggcgctaacgggatcatctataagtgcctttagaacccattcgcaagattccaactgaccctgaacattacagccggatattggcggtggcgtttgaggatgcgggagagctaaggttcgtcaaccttgatcggggcatgtaacaaactacaacacctcctctctggattggcaacgtagttattgcaagacaaaacctaagtgtgtatagtaagctgaaggcgacgcccggtacgctatgaagcacgggaacggctctactgtgccagcgtcgccacactgccaataatagcccaactctgaccgcgatcccgctgagccagctatcgacttccgttcctcctgctaccgagactgtagccggggttatggcagttgctacgactatcgagacagaagctggagccacgataccaaggctgtgagtccgctcaaggccgcaacaggtgtatctgaagaagaaaagacaacctttccggtctgtctaacgtcactgccgcaagagctaatctagactgccgacggcgactatgccttcttctacattcctgaaggcaggtagcaatctggcagatgcctaacaaggcgctggcaagatcgaatcttggaattacaagtagtgctacccagccggaaacctatttcttgaggagcgctcagaacccctagcagatgtacctaacaaggcacaagctagaagtcaacctaggcctcactgggatggttacaacagaccctgcggtgatgaaggcagacaaccttgctggattggctaacactgctaccgctcggtccaacctagggggctaggcacagcttctactagaaatacaggagacttcctttgtcgtctggggctaacctgtccgacctcacgaacgtccaagcagctaggaaacaacctagggttgaagggagcggctacgctcgatgtatggggtcttcctgcgaaatacaactgctatggacttcagtccagtcagtcggatatttccagaggatgggctcgactaccaaaacggccttctgctacaatggggaactggtccccggtctgtctgatgacacaaggacgaatatccaactcccagcacgaatcttgaacgttcaaagtgaccgtaatggggacgtttaacaacccatcggcccgcgcttcatgacggatatgtggagcaacaccgggtttagagttagctgcaactggggcaactggtcttacccgttcaactggtttgctatcacttccaccctgtaattcaggagtatcaaaatggctctaactgagcaagacttccaatcggctgccgatgatctcgagtcgatgttgccagtgtaaaggccgtcactaaagtagagagtcgggagcggctttctactttctggcgtccctaagattctattcgaaaggcactggatgttcgcttcctcaaaagcggtgctttgtggtcatgaccctgaaataaacgacgcttctgcaaccctaaagctggaggatacctcggcggacaacaagcggagcacgaacgtctagataaagcagtcaaatggatagagactgcgcacttcaaagtgcctcttggggcctattccagattatgggattccattgggaggcactaggttatgcgagtgttcaggcatttgtcaatgcccagtacgccagcgaaggatcgcaactaaacacttttgtacgcttcatcaagatcaatcctgcaatccacaaagctctgaaatccaagaactgggcggaatttgcccggaggtataacgggcctgattacaagaaaaataattacgatgttaagctagcagaagcctacaaatccttcaagtaaatctaggaaggttcctaatgaagaagctattgaaaagctggaagttctgggctgctgtaggctctgcaactttatggctctggaggccatggttcatctttgaggcctatccttcctccggcgtattcgccgcagtaatacactggtagctgtcggtgtaaaatttcggcagtgtttgtaactgctggtaaaagtggaggaagcgatttcggaaaccatagaagatggctcaatagaaaatgatactaactaaactcaaaactacgccctcgtagtagctgccgcaatggcagcagggtttgaatatgtcgttctctttgtacggcggcttagctgttgcgaaaagaatgatatcaatctcttcaagctgcgtctcgacagatggaagagcagttcagaaaaaagagcgagcagggtgtgagatcaccactgggagactagaggcacatatagcccaaatgaagagccgacgacaggagcttctacaaggccacctgtgtgagctagtctctaccagcaacccaaaggggccaagaaatgccacagagacgatctctggaggagccttctactggggatagtctggaccctgctccttacaagcttgctcgacaggctttctgttccacagtaccaaacgatccgctggtattgccccggcaaactgaccgaggagggttaaaggtataccgagtggagcagatacagttaaaggggctcgctagagcattctaaatactaacggtgctgccatgtgcaatagtcaacttcacaaacaataaagctatgggcaagaagagcagagggctctatatggaagtaaagacggcaaaggcctaatcaaggtagctactacacggggagttatctctcataattgctatcctaatatggcttggtctggattctaagttccagtcttcctaagcaggaagaacgtatctttgcgatgcaaagagatatggtatccgaggcgaaacttaacgcactagagtcgagattcaatagcgactgaaagtggggtggtaacgtaagaagagaacaacaagaaaccaaccggtatttgattttgattatgaatgccgtcaggggtcgggatacagaaactcaataactataacccgttgacccacactgggagacaatataatgacgaaacaagactggccgctagtttcaaagcggtcggggctttgttatctccctccttgtctgtatggctattctggctttcacagcgatgactcgaggctcggtttgactctgtacgccagacctacgaggtcgaattagcgaagatctgagcggcagtatgaactcaaactgaacagactacaggatcagataaactcggcctctccgtacacacaggatcccggcaatcccgtttgcaatatagaagaactcacgactcgcttaaaaaggaagattagccgaacttgagctgaggagaataaagaaacaagagtaattaagccccggaagcgaagcttaccggggctggccccctgacctgtaggttacttccacacttcgtcaaacagcttgtcaatttttttcagagataatcttgtttaccttttcttgacgctcattatcttctggatcggaatggataagctcgatgtcggcagcgttacccagtccagctcccgtaatggggccagcaccttgacgttcaggcaggtcgctgatctgtcaacgcctgcgacaacccggtgggcgcgagttgtgttatcgaatgtacttccgatggccggttggtacaagtcgcttacctctaacttgcttcttaacgtcttccagtttccatttcctatgcctcctcaatctagtttcattagcgtattgaactggtgcctcaaagacttgaaagcctgtgggccatcgtccatccgctccttcatggattatgatggtgatcaaattaatatcagtcctcagtctcctagtaacacagagctaggagtctcttttatcaagccacaaagcagcaagtgcagcacctccggcatggaagccttgaagctggaatcgtagcttcgataggcgttcatacgtggctttgaggtcgggataacttaactgatgtaatattggcatcatcgtcagcgtatgctgatcccctctaactacatgccaacagctcatactacacttgcctctatatcgttgcaccattacaccttcttgccgccttctgcaagacattacttactctcgcttaatggtcggaacgggtcatggttgtactcgatcttctcggtaattagcctgcaacatcaaaccccgtacattcgcatagtccatgatgcgaatgatagcgtcagccagttccacctcttccatcttcatctgtggcaagtgatcgtccatcaaatccttacggacgccttcagcttccgcaatttcagtggtaacgagcatcagcatatgcagagcatcacgtttaatcagctcgccaccaatgaccagatcggtgttccacttgcggttaacaacctcaagaccagtcatcattttgttaaaaccgctaacaaactcagacggactctcgttcgaatagttcaccgaacgttggctcttgatgttcggcaattgcgaggtgtggaaggagccactccatccagcgtcatagcacttttgataagctcttgttcatcaatgtacgaggaagacgccctgctcctcaaagctgactaatagcttccagccccccccctcgacccagacgcgcattaccaataagccttggatcgattctcagagaagtcttgtggagcttctttccacgacctccatcctaccctaccattgccaaaatacacaaggagtggcacatagccttctcgctttcatatccggcgtttctataactacaacaagcgccggaactttctcccatctggacgttcagttagtacgaagtctccccaagttgatattctccgactagctgggcgagagattcctcgatatggtctttaactttgctcattaacttcttcactcctcacagaacatttcaaaatggcaatcacagcataccaacatgccgccgtcatttacaatttcttcgaccggagagatgcttccacagcattcacccagccgttcgacagcatctgcacaggcccaatagtcatcttcaccctccttcctcctccttcagaaggtactcgttgctaataaccttgaaactaaagtctcggctcttatgcttttgaacgcgaaaccttccgaacaccgttcaacgcagactctccatctagccatttcaattacatctgcatgtcttttggaacgccacgatcccacatgtacaccggcacatgtttaacatcctcttcgccgtcatcagctagcgcgttcaggattcccagagtggccagtcgctcttctggaagatagtaacgactctccagtatttgtagatatcgtacacatggtattccggtttgtcaactccctcgaagttgccttgaatattcggtgcaaccagttcaccctgaagggcgatatttagaccaaactccggagacgttcgcaagattaagctcttctgccatcgcggtgaagtgattggagtctttcttaatctacacgcttccatacgacccttaaagaagttcttgacagccgtgaagggccgatcttctcgtcttctagacggaaaccgacatttcgagacgccacgcctgcttctccgtccttgtgccagatagtgagagacgaaccgtccagatttgaatgtcgcttcaaacttctcgtccttctgatgagcctgatcgtaagccatctgaatattctgtacgcgagcctgatgatccgtcttcgggatgaagttggggaaccctagcttggaagtgtagtcagctgcccttgttgcctccgttgatggctacctgctcggaaggctttacatacttcaggatgcccattcgatccggtaacatcttcgtctactttcggctctggactgcccacgctgcatgaacaggtacgatcagtccttggctaagctctttgcgaagcttcatggtcttgattcgagaatactcttttccaccttgttcgaccatattacggccgcaggagattcaaagatagggttgtctacagggaccataggtccacttcaatgtagattgccagatcgccagccttatactccgtttgattacgcactgccaacctcaacaagcgccagatcaggctgtcagcgttaggatgggtcttcacatcgtcgatacgcaccactccgggctgagtacgccggtcttgggaattgctcatatttcctcctttatttttaaaattttactagattaattgtcaaatagccgagattaagggcgtgctcaggctgcgaagattctcagcgtccatgcggtcgcttgaattgacgcatggcgccatgtgatgccctctttgtttctagctgcaatataggccgaggaactatcttcctttattaacgagcttgcaaactcagtctttccccgaacactatctcgctaacttttgggacggctctcgaatatcaatcttcatcgatgctctccttgttaaaattgttagatttgatagattacttgttaaaaccaaccgaggtcaatagctcgttctaggctcatgtagcagattctcagcatctagaagatcacggatcggcatcaactccactattccccggtaagccatctgcgatgtacacaggtacgtcagtatactcgctctttaaacccgcaggcacaggctacattgtctccgaagacaaatctcgctgacttcccttgcctcgtctcgaagatatcaatcttcgtatgttttctcctgttgtgttgaagtcgttgtattctgcatggattcatctgcgcctgtgtcaatagccttgacagaaaataatccgtggtaaagtgtaatggagagaaatgtccgtctcaccggccaacggtatagcgtatgaaggaaagctgcaagcgcatcctgagtcgaagatctgagaacagggcagcgacgacccgaaagctcaagaatataaggagcccatgctccccgctcaccgactcatctgcatatgcgtatatctgcatgaggcgaaggagcagaccagaggcatgtcttaggcgaatccgtatggcaagccttgggacggtctgcctccactaccgatctatctgcatacaagaagcttgacagtatcctgtaagccgtgtagagagtaatcaaatcaaccgcagaggtgtataaatgaagcatattttattctgcgtgaagaccttatcgacctactacgtgatcgtatgaagcggctctagaagctggcaggggtggacaactgggactggtatgaggcctcgctaatcgactgcgagatgcttcattgacgatggccggggctagagtcgaaagctcttgcaggtgcttcccaaccgtaggtgcgtgaccgtggagagtcgaaagctaccttcaaagacccttaccctaggttcttcggccttctcgtaggtatagcgaaaccaacgacttctgcatggtggtgagctttgcgtcgtatggaacaccacctatgaaaaggcacaccagcacctgaaagtgaagtgcaagcgcggttaccggcaggggctactcagaagccttcagctacgcagacacttggtgccctaagacccggatgctctaccaccggggagggatactaggataagactcttaggcagtttgctggggagaaaacccacggtggttctggatcgcggcatgctgttgcaatcgtcgacggagtgttgtacgatccacactaatgacaaagagacgtaccatctggcactgctggcaagtgtagtaatggccgggggaggcaccgagaaaatcgagaggaagcctgatcaatctcacctcctgtgaaaggccccggactggtatgtctaaacacaaatctgaagtacaaagaggaggatttatggaaattatttcgagagggacgcttcctccaagggctttgtttactgcaaaggtgtcaccattgccctaagcattctcaggctaagagatcggaacttgggtatgtttcgttctcattctgtcgccccgggagactgggtattatttcgcagagtgccctgtctgtcacgaaaggtgtctgcaggttgcggctcctgtcattcctgtggcaccggccaccacgggtataacaaggagcgtaaataatatggaccagttagcaggattcatgggcgaacctttcgtaattgcgttcgactacgacgagacgtcagtctctaccctcttgccttcgaatcgtcatggataccttccaggggctttggaggcgctttcaatgtgatcgtagtcactgcacgccaccctgacaacagcggaggttagagtggctacgggactacaaggtttacgatctatttcacggcacagaaggcaaaagcgaccattcatggaaaatcttggaataaagtctctgtatgggttgacgacaacccgttcagcgtggataatgatgaccttccctccgtggacagtggagcaatacggtactacatggaggcaaaagcaacaggctatcaacagaggagtaaagcatgagcgagattatgtgaaggttgaagtgggagatcgggtggtccttaaaggctattgcgatacatacactggatgtgcaaagcgatgggcgcaggcgcatggacgtttggatgaactgctggctacgagttcgtagagaagatagctgggtccacaccgacgaactggcggaagcgaaaggcaccgttgtgatgactgaactgggactggaaggaaagagtgctgtgcgagtacgtctggaacgcctacactgaccacagaacagttgttgacactctgatctttacatcgcatgtaaggcagcaaaagctcccgtaagcaccctagacagggccttccggtttgtgaccacgactaccttatggaatctggctgctcagcgactgaataaggtccgtccgagcagctacgaactggccaagtcgtagaagtggacgtgcctgtgagggtgtaaatcaagacgaaacctcgcctatcgtagtgtatgtagtagagaagatttacgataggaaggtagcaatgcacctcattctacagtatgaggtagcaggggcgctaatcaggacggtggtggagcagggagaactcatttcttggatgaaatgcaaggtatgtacttgacagattcaactggaggtgaacaatgggttgtatgaccagtggcgtaagtatatgagcgttgtaatcttaagaagaagaagataatgagcgtcagtgcatgcggctattgaggcagttggcgaactcgatcctatcaagatttcctagattctttctctattaaaactgaaggagttattgtagcatggagtcaggtaacgtgatgaggattgtagttgaagcacgtggagaaacagagctacttcatttccactggaacggctttgggatgtgatggacactgcttgtctcgagttttatatcaaacctggtatgttctttgacggattattcgagagcaggcctgcttggagcttgatttccgaggcgttgccgtttccgattctgggaaatgaagacgaaggcgtggacggcaaactcatggaggggcaagttgcagattatgaccaactccttcgagtacgtcttcttcaaaggagggtttgagtggctagacagacttacgagtctgcatccagataggagcggtcgaggaggccgtccgttctgaaacttgaaggggcgatggaagtgttggcccactatatggattatgggcagcctgccggaatggaaaggttgttagctttgtggagcttaaaaggctcggaataatgaaatgcaagaaatatcccgacttctttgtgtcccagatgaagtggctccatgggatcgaaatgcaaaggggtgtttacgacattccacattccacttgtgtgccaagtggacggactatacaggatatgtcaaaatgacgtaatggcgtcaactacatgaagcatgggtggtagaagttgaccgtggagactggcaagaccaagaagttatggtccatatccgctgaaaagggaacttcacacgtttataggaggacaaatgaagcgactctgctaccggtgtatgcaccttcgagggagcccaccatgcaccgccataagacgggcatttggtataagggttgtagtaaatgtggatcgggagtattctatggctaagaagaaccctgtgtttaagtttctgaagacacagtcaacaaaaccctcggtagagggataaaaaaaccaaatacaggcggaagcctaagcataaacaagaaggagcgattaaatgaagaaggggtgacaaagtgaagatcaatgatgacgctgataccatcttccggggccgtgttgccactatcatcgcagtagacgaagagggttgcgttattggtgtgggcagctacgaagacgaaagcgaggaagcttatcggaagtaccttcacctgttcttcgagcgttctggagttgtcaagcaggtgtaggagggtataatatgaacggacccgaagtgcagatggtgcggagaaaactgaagctgagttcgtagacgttgggcttggatggacgcaacaagtcactggagaatatgtcaccagtgtggaggtacgagaacagttactaccagaacgacggaaggctcacagaggttgagtttgccaccctgcgcaaaggtggtccgttcgaagattatgcgaatttctcgccattcaatcatatgagggaaggcgactcgccatgaaaggctacactgaaaccacaatctactgtacatctacttccacacgttctctcagaaatgaatgagtggttgacagagaacgctgtagatcaatggacagtggaaactctgggctccggctatcaggtggctgttcctatggaccgatactgtacgggaccaatacgtctcggagaggttgacacgaacacaaaggtgatgctaaactccgtggttgtctgagtaaaggttttatgtccaaaatgaccattatttaaaattgcggctatgcacggtatcgatttgtattctgaccacaagaccgcttgtccccaatgccggaagaaaggcgctgacaacagcggagacaacctaaaaggtctatggtactgatcgtaataccggggaagaacacaaaaggtgcctattgttgggcgtgtgggtacacctttgctctctgctgaagagcagggtgcgactggggagaagacgaagcaggagtggaaattgtgggaactgaattaacccgcagagatcacaacgctcaaattaaagagcaatgctcgtatgatccgcgtggttatcgtggcttgtctaaagagactttgccatttcgagtgctacatggtttcgacccgagactggcgagattgcaactcagctatatcctactactactaattacgaactcaccggttacaaacagtgatcatgccgaagaactttcagagcctatcggcgagaccggaaggattgcgagcttttggtcagttcaggttcaagaatagcaacagcaagaaggtgcttattgtaggcggtgaggttgaccagctatcagcattccagatgctctcaaggagtacgcattaacgcgcaggtgcgtgcaagagtgattatgaaccgactccagtggtcagcccctactatcggtgagagtggggcatggaagcagctacaggctcagtatgagtggctagaccggttcgagcaaatcattctctgttcgacagcgatgacgcaggacgagaggcagcagacaaggcagccgataagcctgaagggcgttcatgatggaaatgaaccgtaaaagacccacgagcatttgaaagctgggcgtcaatcgagtttgtcatgcgattctatcgagcccgtacatggacccctggtatattgtagggtctgatgcactcgaacgctcgaatgtatgaagctgtgcaggttgagaagattcctctgccaccgttcgccaagaacagaaggctatggcaggagggcatcccgttgggccggattgtgaatatcggcgctgcatcgggcatgggtaaatctactgtagtggatgagttcactctgttttggatttataaccgcccctcatatgccgggtactgtgactctgaatcggactcggtgagtacgcaatcaagctgctgagccgtaaggtaggtgaagaaggcagacttgcaatgagaccgttgaagaaagcgcggttccttgatcggcaacgacgctcggcacgactttagcaataaggaagacggaagcccacgcttctatctgatcgatgaccgagacggaagcccagcagccctctcgctcaaatcgaacaactgattattcagtttgagttgccgttattattctggacccgcttcaggatattctggacggattgagcaatgaagagcaccggtgttcatgcgctggcagaagggtatgaccaagagcctcaccgtgacgttcatcaacatcaaccacgttcgtaagagtggtggcggtcaaaggctaactcggtgcggaactgtacgaagaagatttccagggtcttcggtccatcttcaaatctggtgcagctaaacattctcctgatgtggcggaacaaggacgcggagaacgagttcgaaaaagaacctgattaacgtgaagctctctaagtgcctggactggccgcactgaatgatgggcaattggtactacgacgttgagactcatacaatctgggacttgacgactatctgaccgataccccgacaagcgccgtgaatacgaggctgatggctcaggaaggaagagtggtcacggaataccaaggttgacagagggcgatgcttatgtatcatccctgtcgctttacaggaggaaagcgaaatgcaacaacgatttgaaacaatcgagcaatacctcgaatggatggaaataacaatttcaccaaaacatgacttgggatatcgaggccacaggcctgttgatttagaaacgtctatcgatacaccgccagcccctacaagattaagcctagctacaaacaccactgcattgtagtggggagcacggtggcaatattctggcagcattctacgataaggccgacctacgtctttgacggcgagagtacactgagagactgccgaaagcgtcttccatgcccacactgaagaagttgtgactctcaaggaacactccggtagagtatattcacccgccgctgaaagagagttcacaactatgtgctcaagcgcaagatcgctgctgcaggctcacaacatgatttaacttcgacctttatgtcgatgaagcttgtggaagatatggacttcactcatcggcgtagagcacaggatggcggtctgactacgtggtctgctgacacctggatggcagttagcgggtattcgacgataccctcgttatctccaagacttgtaaccctgacctgttcggcggccagtccggataagctgtctcgtcgcaggtggtgacaccaagattgacttccgtaagcatttggcaccggatgctcgattcctcgactctcgccgatatgcctcttaccactcgtatctatgacgtaaaaggcgaacaccgccagcatggcataatactggttgcaggaccgacgaagattaccaactgtccgaccgtgacaactacatcaagaattggctattgtccccgattcagttggagaagaaggttgcagagatcatcacctatcaggagcaccgagggtttgtctctgaatgctgatctctgtgaaaagctggtgaaagactttggacgccaagatggaagagcgtcgggcccggtagagcctgtgcttcctcctctctgaccagctaccaagaaattcatggcagactacacccacctgttcgacagttcaagaagaacgggagatcaccactttacctacagaagttcattgaaagatcaagctcaacaattgaaagagggcgatgatcggactatgatcttgagggtaagggagcattgctttcgcctctcctggcagacgtacctctgaaaacggagatgcctgctaagattggagatacaactccatcgggcagtgtatttatggcgagttcggttgattcctctgagtggaaagagacggacctcactgtcgaccgaagaagatcaagctgaagccgatgaaacatcgttgctaagatcgatcgctggctggatgtaacgtatagcacagcgtacaaggaagagcggctgacgggttcagattacatgaagatcaccctcgtagcacccgcgcgtatgtacgtcagaggttgattgatcgtgcaagcggggagctggcactcaccaaccctagcttcacaaagggccaagagaaagaaatgtgtccagactcgaacgcattgcagaacagtttccgtctgaaggatgtgattgagtacctgacctttaagcaccggcgaagcgcaatcctcggtggcggcatggactggggacgaaatggaggatggaggagccgaaaagttaccttgtagcattcgtcagacggcaggattccctaatgcctgctgacacttgcgggctgctactagccggatgaagcaccggaaggttgctaacgttcctcggatcaccctcgttgtacgggctgagctgagagttgtttgggttggagatgggttcttccaattgatacgacttcgattccttagcacgtaaagagtcggcctactgctactccgtagcacgatccgacaaaggaatattgcaaatctctttatgatggagaagccatttgacgttcacacaatgatggctgctgcatttctgagatcattggtcgccaatttaaccgacttgcgaaaacgtaaaatatgggtaagagatcacccatgtaaactgtgtgaattcaggaagactagaacagtcaatcctgacaacgccagagtgatctagaaaggtgcaacgattatcgaaaccacggcggagccggaagggagtagagtagggtcatgacccgaagcgccagggcgcgagagcgtcatgatatagtctggtctgcatggggaacatgcagcggtaacctgagcaaggttacggggatgattaacgaccctcctgaacacaacggtacatacgagctcgctggtaaagtggcgaaaccattggtgctgacttgcaaactggtcaactggtgtttgatgctttcgggatgctgcatctcattgaaaagcctggaaggacgattcgaccaaacagtggtgccaacggtaagaagtatattgttggagtggacggtcgccgggttcctaactgctcggctcacgctatcctgaacagcttgttccagagtggcggtgttatctgtgctaaacgtgctatggtgattcatgaccaaccgctggagaaagaaggtctgaaggttgacttttcaaagaagactggaagaacaagccggaattcgcgccaacaaatgatcgcgtaccacgattgtaccagcaactccgccagcttccaagatgttccttggtcctttgtggtggcagcgccagtaatggcgcgaacaggaggaggcggagaagaagccggaaagctctagcctcaggctttacatgacgaacaactggctagcactggcaaggtgtggagtgcgatatcgctacagcaaaggtgtgaaggcggggtgtttagaagcattgccgcgctggagaacttgctactgaaggccgtgcggagagctgcgggagagttcacttactcctctcgagtcatcgagctgaccgctggctacatcgttggcctatcttgggccgattgccactaaaaaatcagtattgtaagcgagaaagggcttctgacaggcccctccgcctcctgccaatggccaagatagtctgccaaaatagatacaaggagaaacacaatattctggctttcattattcatccggttaatgactgtattccccagccttcgtcggctggtagctttgcccctgttcgtcaccatcatcgcatgggttgcaggagggttcgtttactttggcacggccgagagaatgcggcaaagcaaagctcacacttccaaaaaatcacccacagccctggatactgccgttctcccatcattgtgaagtcggccatctgcgtcctttcacagaccgcatggtggatggttggcggagtacgccgcatcagagcctctatcagacgctactcagcaggttctcagcgaattcaattgaactgggcgtcaaagcctagctacgggctaagcaaagaaactctgaaggctgttgaaggcagcagcgagtgatacggtaatcacagaataggaggtatggtatgaacacggctcgactctacgtctacggcaaatcgtccatggtaggaatcaattgctgacaacaaggccaatcgtataccatacctctaaaggcttctgaggtatcggagacaccgttagcccacaaaagcgtgggctaacaaatacaaacagaaaggaggtaaataatatgtctggtgttattcctgaccatcgtcaaactcactcaagtggatgacgtcactgttggttggccaaagaagcctgagacatggcgcagtcgcagtagatggacgatatcggtctccccggaagggaaatccggttctgctcccttccatcatccattgaccggagacgtcaataatggacttggagattaccagtcgatgccagcgatgcacgaccgcttcgaaattgtagcggtcctggcaagaagtgatatgttaaggctgttgccgcacgccctgacttgatttcccactactggttatttcggaaccagcccagcagtacggaaggcttcgagtcgtggtgttggttgaagagcatgcacgaaggggagcccgttctgcatgattttttaaaggacgcgttgacattggcggtgaaacctctgacgagttgcagttccagactctctatcccgaagtttgtgctggaggagttcaaagaagtgacgaggcagaggttgttgaagcccgggttgacgaagagaagaaagaaaaggttgcagcctgggctgtaatggttaatgctgttctcgatgcagacggagtcctcttaaattctgcctcaacttcgcgaagaagcgcgagccatggtggggtggcaaggctgaggagtctcgattgtaaagtaatcaaaggaggagcactttgaagaccaactggaatgtccggtataatcgtcagtcaagtggctgacacactcgcccagtctagggtacttaaataggagaaataaaatggcttttaaactgaacgtaactaccaacaccaatccggcaacggcggcattcgcaaggaagtcgattgggatgctctggaacaaccatgtcgttgaagctgccggcactgccgctaaggcgcgttcgatcccggttatatctccggtatcatcgatctcggcgagcaagagcagaacgatgcagaggttgtgttcactggcactgccgaagatgaaactaaatcatcaaggaatatccgaacactacttcgctgggatggactggacaagcagactcgcaaaagcctgtacgtctgaagtgttaccgcagcgcgatatgcaacaaatcgcgatcactgtggacttcctcagatcgaggtagacaagagcctgtacctgaccggtaacagcaacaaagctccgcttcgtgtcccaaaataactatgcgactttactctgccgggtcagaagactaagattgttggtcagtccgtttaccaaaggaagtagaagcacctgaacggcaaatgggcgttcgctaagaacccatgctgcacaaactggttagctactggcgtcatcaacgaagacgaactctttcaccaaggaccgcgtaggcggcttaaagcggctcagttccaagttcgagtgtggatgaagccgggcaaaaaacgacatgaaattcctcaccgggatatcatctggtcggtatggtgcctgaaggtgttccggtccctgaactggatgagaagtacatctacggcgtgaacctgtatggtgagaacgacgaagagtaagtagctgctaactggtgtacaacgtcatcatcaagcgagccaagaactacgaaggttctgatatcaaggcgatgacgaagctgttgaaggcacgcggtggtaaccgctccagtggcgacagcgaagagcaagctgaagataagccgcgcagacccaagccaacctaaagtggagccggttcaaaccaacgtagatgatgacattccgttctaaaagacggtggtgtaagacaaggggcttcaaccttttcaaaattcaaaggaggcaacacatgcaaatcaatttttttggtccccatctttccttctggctgctatcgttctgtatcgaaatctgccggagttctcgctaatcttctgactgtggcaatctcatgcccatctggattcctcttgtaattgtattgtcgattctcgcaattgtttcttgtaattgtggtctgatttacgccattcggtgacgtagtaaacgaacttctagcttcttaaaaaagcacttccggaataagtgaggactaatggatgagtagtttgttattgttcgagtacctgagtaagacattctgggtaaaaggtccagtaaacaaccagttcagcgggtgacctgtgggagcgaaatctcttcaaagatttgaagaacgctgcggagtgtatcattaaaaaaggagagccggtggcttatgctgctcttcctaacaaggtaaacccctgacactctacaaacaggaagcgtgggacattcaggttgtacagttctaacctgttggggagcttcgccccttttcattggagataaaatgagtgaaaaggaagaggatattatcgcctatgacctatttcgcctttgcgtgcaagtgtcaacgagacccgctccatcattgtcagaaacaaattgacgggagagaagaggaaactttggaagaatcggacgacttggcgggagaataacaaaagacgaagagggattcaacgcgaagacaacttcgaaattgaggaccatcaagaccccaagcacgtgtcctacggtatctctgttgttaaagaccatgatatcgaccgaatctgccgccaagctgggtgcaagcagttcaaagaattctcctgtccggcctgacaacttccaagggactccattccctcccgaaagagtacgaggagattaagggtaaaaaagaccttcactcgtggcggcaggtacaagggtggtaagcgcgggcagtgatttcatgctcttcagctaggtcagctaaggcagtatatggatcgaagcgtatgacaccatcatccatcccggagaagcggacgacttggatggccgaaatgataaaagcaaagaatgcgtaagctacccagaggggagactactcagcgcgtgatcggggctaccatcgataaagacgcagacggcacctaggggatggctttgtaactacgaacgtgagcctgttcaagtcaagttcatttcaggcctagggatcgctctacagacctctataagggcaaggtgagaggcgagggacgtaagttcttctacttccagagttgccaagttcggtttaatcctgttgactgctacagacccaagccgacctgtgcgtaggaaagactttggagaagtggcggcatggccaacgtcatcatccctgcacaacggacaaggagtgctggcaagcaatctacgacacctaaatcgtggtatccttgagcctgtcactacacagcatggggacgacacagagcacaccaaagatgcaatcgatcatgcaaatgtattgtgactgtgctcacatgcaacgctgggcaggagacagagcgtggactgtagggcggtgatggggaacctggggtgtagacctcttgtggggacggcagagaatgagcgtaaggcctcgccccttgggaagacttccccggcattctgggagactgaagctgcgttcttgaaagcacagaggaggcattcgccgctatctctggtctaagaaacccagtcaagcttgagtttgctaaactcgaaggattagatgtaactaaccccagcgaaaagagcaagctcaggaatcccactgtatggggctatgtgagcagtgtggaaagcgaaacctcaagctaacgtcgagattggaccacaagacaggggaattctccctgaagcgagggaggacatccaatcgttcgtggaaggtgtcagtttgtccgcatgaggattttcagtgctgtgcaaaaccgctatgagatcaagacatgccgagcgctacgggctggaccccgaggaagcagagatatcgtaaaagcaggctattgcaatccagaagcaaaagggatatgataaggtctttgcaggaagtgggaatcaaacccgcatccgcagagctttagaaaagcatggtgatcatcgaagctcatcttaaatcaaagaaggagggtatatgagagagaagtttctaaaatcatgcgcaagctgcccatcaggtggcctttgtcttctggcttgattacctgttcttcttggctccggttgtagcagcattaattgccggagttagacttttgtaccgcaaaggagcagcttggaagagggcaatttgttctgttcacgccactcagggcgcgattcaagctgcattaaaacggggaaggagctggagttatgaccaatctagctacatatgttatccgccacaaaagactaaagagctttgactaattctagcggggaaacgtcaatggaccacgaaaaggaggagcggcccagtttgaggaacgcatatgatagtaccacactgggagcgtactattaaaaaaaaagagatatggaaagtggcccgacctgaacatctttgattgtagagagacgggcatccatcgtctggctagctgggaagcagcatcttttaaaaatcaatctgttttgagattgttgatattgctgaatccttgaagcacgaaagccagttggcgctcgacctactgaaagatgttattagttcgaagtgccagatcacccggagacggatacgtccgactcaccattaaaacgtccacatacgacgacatcaaactactgaaggaggcaaaatgagcatgactgacccctcgacagtatttcatcaaacagagctggaggaagcaacgaagcttctagaaagagccctcaaccttctagataatgtccattgctacgatacagatgtatgaggacattgcagcaattctctacggtcaagcatgaggaataataaggtgcagcgatattagtaaactagcagaacttcgggacttgatcgaagctgttctctattcgacgaggctccttggttatgatgcagaaaaacggactatatggatacggacttgtacaaacgtatcgatgcattttgtattatcaaccaaggaggcgagtggaggaagtagaatgagcagcaagaaaacactttgtaatctctgacaatgcaaaaccgggtatcagtctggattacatggaagccatcgaaaatataagtcaggaagtaaaacgtcccgatgttgtgattcacatcggggaccatttttgacctagctacctgtcatcccacgataaggtagcgccctctgagggccgtaggatagccgaagacgttcaagtcggacgtgagggtctgatcggttgtttaagcctgtgggagctacaggagcgtcaatcgggctaatcggaagaaggtgtaccaacctcggttgattttcacactgggcaaccacgaagaaagcgggctgatcgagcagcgaacgataaccccatattgtgtatggcaccgtgggtagcgatgagctagggatctgtggactacggttttggcggttggtcccgttcctcgcttcattaaagtagatggcatctactacgtccaccatcttcaaaaccactctccccactggcaagcctctaggtggtacagcgaacacgctcaaggctgctggtcattcgtttccagtcatgggccaccgtcagcttcttgactgggcaatccatccgacaatcgacggtaaacaaaggcttaagacagattgagcgtgctatcctcacgacgaggcttacaaaggctatcagggcaacaacaatcacttccaagaaagccatgattcacgaagtgaaggatggttttggcccgctgacgccagtgagtctagactttatgatggagaaaggaggtttcaaacgacagtttataagttctggtgaatgggacatcggtatcaatgaatgttcgtggcgagaccaccacgatggaagaagatgtagctaaagccttgtcagactggtggattgaggataccattgaggaactaggagggcgcaggcctgctcggctcgactctgttaaagtgattggttaataggatgggcatattgagtttttcctttgggcggccccttgcaggcctttgttctttatgtttagtatcactcgcgagctttaccgccgaagatatcgagaaagcacttcaacatgcgagaataacgaaggcgtcaagcattctttcgagttgactttcggagacggtgcgcgacactgcaacagcggcgctgataaaatcgaccgtaaatctaaataatcgaaaaggagatataaaatgacctatttctgggcccacccctgagcaaatggaaggcgaaatgggtatgtgaacccggagcagcgtactctggtagagaaagcctgcaccgaccgtaaatcttgaagattccatcgcaccgaggacggtgaactggactatggcatgcttgcacgacaatatctgcaccagcttgggtgatctgcctctggtaaatgtggccctgacttcctgaagctgatggattttgttgctgctatgctggagaccaaagacgatctcccggattccccgcacatgaacctgtccttcggccctggactgcactgcaatcgattagcgacgagaagtaccaagtggccgaagagattgtaaaagaagacccgaccatgacgattcatgagttgactcagcagggctagataccccatggccttcctagagtcagtttgggtatccataattgaagggatatgtcactatgagagcgatgtgccaagatcggcagcccggacgggtttcaagagttgaaagatatggaggaactggcaacgatatcatcgacgttcatgctgggcaaccgatttctggtaacggtcgcaacctttatcattatcaataatattgggacgctgataccatccctcacggcacagttctcggcttgttactgagaaaagtgcgatatccaaaggagagttggtcgtaaggctggcgagtggtgcagatgacgagcactctgttaaggtatgtagattctctgatttcttcctcctgggagaggttataacccagccagtctcggcgacgttgaacaagcgtatgatgttctctgttcgaagaccctccggcgacggccctttggtgaatctggattggctctcctttaataaacagtgagcgctactaatggacttttctgattgctggcgaccccgcgcgatgccactattcaacatggctgttcttaaaatgttctgtcgcctttacactgccggacgatgaggaactttcagctatgtctgggaatccttgaggcaggagcacaaagaagttatcgaatccatgcagtgacgaggctttagccagaggctgacaggactccaccgaagagcttgttgcactgggtaagaaggttgtgttcaaccctagaagattacctaggcaaagaaaactatgccacattgctacggccaaccacaaggaggctgtaggtagcggaggctcctagttactacactgtcaaggtgaacaaccccactacgaaggctaacatgccgtattttgcagagtgcaacgatatcatcgaaggctgatatgcgattcaggcaacatgttcaaagcgttgtggtaatagtggcagcacagaacccagtattgaaggccggtaacgatgccatccgggaccacgagaagtcatctcttcgctcagttggagatcgatagatttcagagaaaggggttgacattctcccgaggcttgcgacaataggcccgttgaaactagctgaggtgtagatatgatacggcgaaagaaacagaagttctttacggtgcatcctatcctcgctagcgagatcgtctggcctcacctcgcaatgcttcagtaaaacaagggagccggccccttattgtatcaaagatttaataaggagagcttggcaattttaaaagtgattcaacacagttctcggatcggctcttaggtacgaagaatcacagattcatcactacattcgaactggagtatccccggtttattcacagtgaacttatgactcaccgactttagtcgaaatgttgcagtatcgtgccatctctgctgcccatatgatccgacaggtggaagagaatcccgcgatgcccgtccaccggaatgaatcaaccgcgtaagctgagttcgaactgatggcagtgtttgcagcgtagctcaaagtaccgtgaagatacgcttcgcaaagagtgcggctctgatcgctgggcgcaattccagtagactccaataagcaggttaaccgtctcctttgatttcttcggcctccagatgatgaagaccgttgttacagccacggaactaatagataactttcttctacctgcgttgctacaaagacgcacaaactggagatcaaggttcccgctgagaaaatgtatgaggttcttattaaagcgggcctcatagaggctctatatgacggagatacgttccttataaaatcggttccgcattaggatggtaagctgcgtttacgcaggattggtaacgggcaagaactgagcgtagaggatgcttattacaggtcttgctagctgctgtgctcaggttagttagcaggaagaacgacgactctggagaaagtcttttaatctacaaaaccgattggtattatcagctcgtctaccgggttcgaacaggcaacaatcacggatgctccgcatctcgacaaatcaaacggatgcgggagatggtgacgcacttgaatcaatatggtgaccttctggtctggtaacttccgaggtttccatccaacatcgtcaactaattcagcggcacgtataatgatactacggccaagaagaggaaggagtttaaaatggcagaatatatcctgagtctggaagacctcatgctggtcgatggcttcaaagaggcattccaggagtaataatgagaaggtagtgagggagcatctagaccaacggctggatgttaaaccactcgtatgaaatggttttctgtcaacatcgcacactgattggccggatcgtagagggtctggcttgatctctggctttgagcggacagatagcaagtggttggagcctcggttgcgcccctctggaagccttccatattgcagcggtgatgatagtaatctacggttcactcttcaagatgaccagagggatcgacagaggcaacgttccacaaattaatgcagcaggagtagatatggaagctgccagcgctctcgcagatgaggccgatattttcaaataagatcattaaaatcaggactccaatcggagtcctatgcccgaaatatccgtcattgtcgaactagcaaaaccgttaaactcaggaagagaagcggtggccccagcgaaatgaaggtgagctggataagttgaacctgaagtttgaacctcatcagcttcacgctgtacatcgtccttcaactgttcctcaaatacgaactgatcgtagggaggagttttacgggtagtgaagtccgaacgtctcgcccagaggttaaactaacggcttcgatcctgcatgatggaattggcagtccacgctgaatctttacgcaaccagatcaacgtagtgctggatggatacagatgtgaggactcatgtagcttacaaggattaaccgagcttatgggtcgaataccgcctgagccctgtccccaggcgatgaagacgatgttcttcgtaattatcttcagcctaacagagactgcccttctgttcagttctttcacatccgaagacttccagtgcaacgggtataacgatatccctgtggtcatcgcacgcgggctaaccagagtgctgtggatgaagacttgcacggtgtagtttcgctggactatcaaccacatttcacgcagagattgggagcattgtctgaagatactcggcgtgtcgagaagatttctccgacaagctatcgaccatgtatatgctcatgaatgtcgtattgtcgatatggcgatcccgggcggagaacttaatggggagtcggctgaaaactataaagcgtttgttcgttatcgtttgaatgtctggtgccgaagactcggcctagaagatccacttctcaaaaaaacgatgacactgatcaaggattggttcgaaatgaacacttatgcctacaagatgatcgactttcactccgggtatggggcatggaatacgaaccagggtgggataagagaattggcaaaggcttgggaagaggagctgaaatatgagtaagagagacacgttcaactattccgaagctagaagaacagccaagcaaccggcgagactcctctatggtatacgagacggccggctaccagctgttcatgaagaagcattcgaacgagggcgagccctgtacgcctctgcttccaagctgtgtagctcgcgccatggctcagcacgccttctgcgcggtgtatcctgagtggtgggaggagacgaatacactagaggcaaggactgggaacaggtattcttcgacgttatgtgggacggttttgtaagcccatccacccgcttctgtcgaacggtgggcctgcaagaagggcactacggtatcttgtgctggcggtctgatggacaacaacctctatgaccgttaagcaatgtaatgacagagatcgcaggtgcgttaacgaagcacagccatggcaatgctttagcctggaccaactggccatcagaaggagacgcttatccgaggcggtgagtctctgaaggtgtattcattggcccgggacgttatcaacgtcatggaagaggtagtagcacagggttctaggcgtggtagctgcatacagcatcaaccccgccggagatctcttctggaacgttatcgatcacctgtataagcgcacagagtcgaacaacgtcggatggcttcttagacgaccgaacggtaaggatatggccgagaaagacccggagaccttgaagcgatgtggaaggaatgatgttcgtcaagctggccaggaggaaaaggctactcacgtttatcgataagatgaatcggcacctttgcagagccgtttaaacgggcgggtctacgctgtgaaggtccaaccttgtcaagagactgttctcccggcaaatgactggtatacttttagctgggtgttatcctgaactacaacctcgaactctttaccgttcttggcctaagcaccttgtgtttattggtcaggttatgtctgattgcaacatcagcgaatacccagcaaccatgggatgagtgcgtcagcgttcagaccgccgagcaccgggagaagattttaccatccaccatgacttcagggcgcttggcagcggtgttctaggttccacacttctgccagcagagcgattctcggtctggtagtatggatgctgcgttcctgaacaacgccatcttcaagggtatgaaggataagcgaagccgtaacagttgccagctggaggttctagggggagccagagggctgccgtggactagggaagcgtaatgccactacaatgatgatgccgccaactaaatcgacggcagaactcatggctagcttctgagggcatagactgacgtttcgctatgtgcttcaccaagcagagcgctggaggtgaattcttccgtgtcaacaaggtgttgctggagattatccaagagcgaggcctcgattgggaagaggcaaggcagattaacgaacgtaaaggaggttcagcacgtagactggttgactgaccacgaaaaggctgtgttccgtacctcgcctttgaggtgagaatggaagactacctgcgtctgtgctctcagcggcagaagtacatcgaccgctgtcagagcatcaacctgtacttcacgtcgaacgactcgccggcttacatttcgtacatccatcgtctcgccatggaagacccgaacatcctatctttgtactacatctacagtatgagaggagtggagatatctccagaacagaagaatgtgaaatgtgcaaatcattggcccggggcttgacagctttccggcctttgtgtattctgagcacatcaaggaggactaaaatgaacagccctctgaagtgtactacactttgagcgcaaagcgtgcttcctcgtacaaataatatcttgatagataatatgggatggactgccacaatccgtcgagaccactggcgggatcaaccctgtatgggttgtggagttcacgcgatgaacagcaaacccgcaaagagttcgataaatggtggggacaggacgagtaagaagaacttcgtaaactctgcgccaaaggatgggcggaatatatctggatggctatcgaagaaaagtgagtgttgagcttcccgcgccagaaggtggatttatcgacatccaaaagtacacaatcagatcgctgcaaagaagctatccgcgaaacagggactggaggtgttttaatgaaagaatattttaaaaagcgactaatgcagaccagtgaaccgttcgattcagcgacgcaagctatggacgaagcgattgcgggaggggctataccgcgaattcacttgcgtaactgtacccgggagcacaatgacgtagagcccgataaaccggtattcaatggacaggcaacgaatcttagttccaaacttctttgaggagtgggtagtataatggaacaaactattgatgggcccggtatattgtgcttgataacgaaggtcggcacgttctgacctttgtggcgagaaggccgcctataacccgcttagcgttcagtgctgacaagcatggtcaaatccatgtaaatggtgtcacaggcgttgaactcggagttcgtcaaggatcgctgaagtattccttgtatccggctacatcatcccagaagagtaaatacatgcaagttatgaccgacgcttcaaggcgagtcggtgagttagaaagaggtagccgaacccgctaaggtggctatcgctatgtgatatgcgtgtcgtgaaaccctactggaagatatccaatggcggtatcaagacgaagctatctatactctaccggctacgtttgcccttgttgcgggaatctgcaaactatgggcatttccaaggcagcttcgataagagcccccgcctaccagcttcagtaccgagccggagtgaagcatacaggcttccatgttgtagactcctcgctagggcattaacatgtgctacgcctgcggaggtaaactgtacgtccgaggagtatgcactatctactgcccctgactgcgagaaggcagagaaagataaaccgttcgtcaggatgcagcttctacaggatatcgcgacagcaagagggttgacaacgaatagaagtgctagtaagatgggtcaatatcagacagaggaggagccatggctacaacagagaagatcatcgagtatgtctcggcctgtatcgaacgcttcaaaagaggacgtaactgggtactggagaacttccgtgacagggcgttatctaatcgcacagggtatattcacgggcttatcactatggctgaaatgaatgagcaggtgagtatcgaggaccgcgacaagctccgtaaaagtcgtgaagctgctgaggctgtgttggaacgtacctcgactccaaaattaatccagggaggtgctctgatgaataaggaaagagattgtgcaggctttgattgtcgctgtcgctctgacctcgcagcaataggttttgtagtcgggattactgggtgttggccaacaagagcgcgcccgccgaggatattgtcgtgtctaccgaagacggcaccatcaatctcggtcgctccgtgaagagcgagaagccgctgtatagcatgtgcatcaggtagaagaccgcaaacctgctgtgaattcaccaccaaggaccgtgttcttagcgaagtgaaacaggttatgcgcccgggcgaggctacggcccgcgatattaagattggtaaacgcggctgtgacgtataaattggtgagaacgggcaggaagcaactttactaccccgaaaggtaagtatctcccggttggcaccccgtctgaagtacatattcaggtattattgcgaatctgttcgacatgtgtacaatgactggccaaacaaaacttcgtgctaaagatgtgaggaggactcatgagcacagcctaagaagtagaaaccgtccgacaagccccaaggcaggtgatgttgttctcgactgcgatctgatcggtaaaaccttacgatagatatcccacggcaggctggaagcgattcctccgcaacatgtacgacaagactaagaccgtcaccgtcagcatggagtggtgaaatggcaagaaccgtcagcgcgtaaacttcctacctgtcaaattcggacggtcgagtaatcgtccgattcgcaagaagagtattaggctggcttggggaaacagggtaagaagtggcattaccacctacggatgcgaaggcaagatttcaaatcagagggtttaagacacctcgccgagatcaaggcttgattctccggtccgcaagcctgagattaccaattagccgacgaatggcaatggtatgtaggaaattcaccaatataaggaaaactagcaatgactagccgctggaaagaggccgtatcgtaagtactggtgcgtcgttcgcgcaggaactcgaagagttcaagaagctagacgctttgcaccaaatcaacgcatccgtgcatggtttgatgctcatatcgacttctagaacgccacttggctattcggagagtccggccaagctcacccagacgacctttggtaattaggtaattaggtgtgcgttgtaggtagagattcaaatcatggttatggcggggacgttaatatctctcagcccgcccgcaagcgcaagcctttgcctgaaatttgtggttgacaaggttggccggaatataaacttacggcatccaacatcatgaggagggaagaaaatgcattcaatatatcgaagcaactatgggtagctgcgcgagttgaagggcgactataaagggacgcttttggcatacatgtctcaagtggacttcaataaagatgaagcatgccagcttcaagaaaaaagcagcagactggtatgagctgggcaggtaagaatgccgagacttgctcatagacaacatccctatctcggggcattcatcggggacagtaagttggaacgctgggtcactgagaacaaatatttccgtgtgacgaccctaggggctttgttctagaggttcctaccgaatatctcgaccttgctctacaaccgcacagtaatcaagggagttattcaagagccttgcgtgtgggttcgatgggctctcagcacgttctactgccggaaggctcctctcacaaagaagcttttcgtaagtttctgtagagcgaaagaggcggccaaaactgttaaagatatggttgcaggatgcaccttcttagctatgggacaacagaggagcaaaactagtattgcccacctcgacaggtgaagatcacttgctaactcctagctaaaagggccggtactctagccgagggtgggcgcggtcggtggggttaccaccatctagagagggaaatcctgtgggatagaaaaagaatctcactggagaaagattcgaagtgggttagtgtgttccgctaagccggtaggaaagcggtggagtatccctgatttatccccaagttccaaaggcaaccgacattcaatctggaagcgtcccggatgaacttcagaatctcgacctagtgaatggtgtaaaatggagtacaacgagaaagacgaccggtcccacctcctattacctgtgccggagagggtagttaaggtattagtgtagatgatcctctatgataatctgcacagctcggaggtgcggtggacccgcggaatggaccgtggtcggagtagagtggcgaaaataagccaccattatttaggaatcgttcggcgagtacgggcttttcatggcaggttattttcaaattattttttgtgatttcgggagtttcggccaatatgggcaatatgaaattagaaaggcctcagaatgctcgcataagagccgttcgagtgtaggtatggtgagctaccacttagccgtagaaggacagtgtaacgcttaatatatgctaaatgaagattgacaacggtagcgcgtatgcgtattggctagcggatatgaaagagtttgtttctcagatggatgccacagagattgagaagagtgggcttgcatagcatacctctaattagctggtatcagcgaagaaagcaattcgcacagaattaaacggaggaatacgaggcgatctaagccagggaccgacagattttagggactggataccacaggctgcaaaattagaactgggcagatttttgtggaactggacagttttttcacagaagtacagaggaatttcccgaaatttagccggatttcagaagggcggatcgttagcaggctatttctccactggttagcacctttaatcgttagcacaccaactaaaaattctaggacggaccctcagctggcacgaacgttgcaagcccgcaccagtttcccggcaggcgtagccccgactacccgtcgtgccaagtgatatgtagttggggactcgcaccccgcgtttaagatgcgcccattctctaccatgacaaacccctttgtcaacataattttggcggcacgtctttgcaattgcattagcgtgccaattccaaacttcagttccctcggtgtttatctccggtgctcggcctccgcctgtgttgcccgcccgcctgtcatcattacaataataagccatcacaagcaagaaaattatagagaaaatctacataaaacaggttgacaggcctttatatatgcacacgaccacattcaacggaacggcaggtgttgcgccatgctacatagtgaagcctcgggcgatggtggccccacaagagatggacaagtgggagcctcctcgaataaggttgcaccagtttcaacgcaggatgaaacgacgcgaaatgctgtaatcgccgctaaaagctcatatagagctaggttacagctacgtattcgccaatggagtgcctgtggtatagataccatccgccatgaaatagctcacgctaaggcgggaccgatcatggtcatgattccgtatggaaagagtggtgcggattgattggcgctaaacccgagcagtacgccacaataaaaggaaaagtagtcgtctaattgcggcgactggccatccacttgggtggcggccgcttgaactcactcaaccattacggtttcagacggactagcatggcgagaaaacagtgccgaggacggcctgaaacgttggcaggttaatttgggtgaagaacgaaaataaggttgacacagcttgggccatcatgtagaatggccccgctaaaagggaatcaccctgagcacccacgcaggaaagcagatatgaaagctcttgtaatcatcgggcactctacgcggctttggctaatcgtatgtatttgatcgtattgcggtagatttgaaccgctacttccctatcgagaaagcgaatgggaagacggcgtatacatgtatcgtcgccgcacctatctggtgaagcattcgaagggcgctgttccgttggcacagcctttaccgcaatgggaccgtccagtgtcgggttatcttttgatcgaaatcatcgaacctttccgcacagcataagggagagattcagaaatgcaagcttggaacgtataccagaatggccagttgatcgataccgtttcttcgatatcatgtgtgctgccgaagaggtgcggaaatcgttggccaaccatgacgggtatccgtctgatatcaccgtagaggaggccgagtaatggataacctgtccgttaaaatcgttctgtcggaactcagctacgttttgattcaagcctgccttgcttggccgaacgctcgacctagacgagggttggacgatataatttaatcttattgcggatgagatcgctttccgcgacggcctgccgcctttcgcagacgactgcgataaacagaatggatgctccgtcgatgggaatcgctcccggtggtatcgtgtacaatactggcaggacgcaccgattgtcgctccggtctatcgaagtaaaacggcatgaggggaaactgatgaccgtcagagtaggagatatcgtggctatccggggcgacattcgaaagctcgacggaacatgccaatacacgcccgaacaattggtaggtggtaaatctcgctacgccggcatcgggagaaatatggactgccgagtgagtaagatacaaggtgatatggccaaggtggaggggcttggcgcgggatcgaattctatgtgctcattattagtgaaatataaacgcttgacaacctggacccaattagctgcaaaatagcaccccagacaacgaagacgccgatagcgaggagaaagcagatgcaatgtttttcaaacccgtacccaagctccgtgcaatggccaccaatggccgcaaagtggtagacaacggcgctcgctgaaaagcgctgggctgtcaagctgaacaaaaaaggactaagtaatggctaagtctgttagcgtagaccgcagcaagcgatcattctcgacgaagcgaaggatgggagtttcttctgtggagtttatcaggcggacggcaccgttcggaaatgacgtgtaaacgtcagatcaagtcggcgcatgctaaacggccagtttgctacccgcaaagcccaccagcgccggcaagccgcacctgtataccgccgccgaagtgctgaacatggaagagggtaaatccgcattccgcaccatcaaccttgagaccccgatccccagcagtaaatggaatcgaatataattgattaaaagtttgatatttcaggccaccattctgtagaatggccatcaagcaagaatggcttaaacagaaaggagattaaaatggcacgttctatcaaggctttccgacttcgattccgcttaccagttcgaggccgccaaacgttccgaacgtaaagaatccgcaatcgcacagtcgctagccgaggccgcgctttcgacttccgcgacgataaaggtttgtgcctagccggtgggccgattcgccggcaatcctaagcccattgtcgatggttttagattcaacccctgcagcggagataccaaaatggttcgtcaatgcgtaccccgtcccgatgctcgccatgcttgcctgcatggttgttcgccatgccggagttcgccggtctgcccgctcaaggacataaaactctttaagacttcgggacagtggtatgttagttagacgacagcggctcccgtcgggtgcagaccagactgaggatgaattcgctgccgggacaagatagacccctaccttagcaagcttggcgaagtcgataagctagagggccaattgcgacgggtcaaggatgcaacggacccggatgaatacaacgaaatggcaagagtgctgaaagctcgacgccggaaaataatgcggcagagggcccgggcctacggtctaccagaggaagagcctaccaacgtcaaggctacgtcccggcagaagattaccgcagggtgatgaggctgaaatgggtcgagcctccggatgttctgggcagtcctatcttttcgtcattttcgtatggttcatctcaaaaacagttgacacgccacagttactgtagaatgggcggcacgagggataagcccgactgaaaaggaacaacgatataactgttcgcgtgcgttctccattgaaaactggcgatcatcgaaaaagctggcggagtggtctataccgccggctgcctctggcttcctactatgcgaaagaaaagattgtctaaggcttgacaagtctcgcgttatttaaaaccaagaatacatccgctcaccactcacaaggcgaaccaaaatgaatttccatcttaacctcgtctccctattctaaaactggtccgatcctgtcagcacgtctccaccgaagacacttgtcggacgcttgccgctcaggctaaaaggctgctatgcctctgcgattcggttaatctccattggaaaaataagcaatggtgaacgtggcgtagagtggaaagagttccttcagcaggtgcggtcctctcccgtgagtttgtggcgtcataatcaagctggcgatctcgtaaggtcaggatgacggcgttatcgataggatcgccctgatggaactggtgaaggctaacaaaggtcgtgcgcggcttcacctatacgcactacccgatgaacaatttcatgaaccgccagcacggcattgtcggccaatcgtagcagcttcactatcaacctgtcgggcaacaatgtagcgcacgccgatgaactggccgacctgaacatcgccctgtagtgactattctcccgatggacgcggaggagaatggctttacgccgaaaaggacgtaaagtggtaacttgtccggctgaaagcgacaaggtgaattgtaaagtcgtgcggcttgtgccagaagtggccgaccgggagtatattatcggccggtagcacggcacagcaaaaagaaaactgtcgatctcgtactttaagggttaacacaatggacgggcatctgtttacgcaccattcaatcggtagcaagatgatgggcctaagaacgaacgtgcgaattttggcgaccaacggatgcaaaggctgagtcttgtatcaggatcacagaacaggcacaagaattgtcgtatatgacgctctaggggcgggagggtatgtcaggtcatggtgcaaagcggatggagaaattcacaaaggaaactcgcaaaggccagccagggcaccacgacaaggcagctacaagctaaccgcgtggggggtgaaattggtttcctctcagtaccagacgacagcaggctgcttacaaaggaggcaactgatgcgacagcttaataaatcccagctaaaggccttggggcctaagatcgacctaatgtagaggctagcttctactggccgaggaacgatcttatagacgtaacccacagctctacctgctacattacaaacaaagctggacctggcatcttgcccggatcagctatcgcaactcccgattcgttgcatatggttgctgaagtgtccgaggtgactgggaatgtcattgcagcatgggcggaatggaaaggggtcaaccgggccgcaatcaacgctctgagtggtatgggtatcatccctggctgggcatgggcacaacgatgctcttaagactctgcgtgatatcgagcgttaccagtgacggcctcttactcgacagagaagcagggccaggtggagccatcatccgtactgagcccggttatagaggtgaccggtacgtctttaaattctgtatcaatcaaacacttgcagcgctcttaaaacggtagccaaaattccgggcttggcaagcgctttaggctggcctacacactgaaagatgacagaaaaataaatgcttgacagcctaggccatttcatcaccaatagaatggcctcaacaagacaaaccaaccatcaggaggctagaaaaatggaagctgtagctccagttcaaagtgaagattacgcaagcggtgatatacaccgccgccgttacaaagacgtttgcagcgcatacgtagtgaagcgttttcggaactagcctggagcgagctattgcaactccattatggggaccgttcgaggataaaatctgcaatcgatgatgccgctaagtctgctatctaactgaaaaaagaacctgagggtaatctccgctatcctgtatgaaggaccagttggtctagctatcagccgcattcgtttatgtgtgcttgtgttatagaatggacttaggcgggaccaacggtctgtagttatgaaaatttatcaggaattgctcaaccccgaagaacaggacgaatgcttccccacgttacgccaagctcagggcagagcttccggggtttatcataaggaggcgtgggatcccaggaaggtgggatttcttcatttccccatcggcctattatgccgaggtaatatggtggaaactgtcattgcacaactagaggaacagggcaatgactccaagctaactggagcaaaggcgtccgggttgtcggcggaaagcagagtgggtgaatcacactatttaccacgat

SEQ ID NO: 6 - DNA, 105517 bp, Bacteriophage
gtactatatcaatatcaactactgatacagaaaacaacttggagaataaaatggaaaacttaattatcatcgagcaatctttcaacgattatggtatggcttacggttatcgtgcgataatggaagattctcgtggatgtgttatcgatattgctgaatgtaaagatttactgcagcttttgaagattgttcgtaaaaattgggattgtgaaaatattaaagttcgagttgttacagaagaagaaactgtttttcatgatgtaaaattcgccaaaggtgctgctactcttctgaaacgtatcgctccactgttcaattaatgaggaaattgtaatgaaacgtaaaattgttcagaattgcactaatgacgaatttgaagatgtattatttgatccaaatttggtagtagttcaaaaggaacatactagcaagtttactcacttaacttcggtttatgtgtatgagaaagtcggtgataaacagccaatttacggtgtatttcgtgaaattactgaagacggcacaacttactggaaggaaatttattaatggctattaaatttgaagttaataaatggtatcaatttaaaaataaataagctcaagaaaattttattaaagaccatactgataacggaatctatgcgcgacgtttaggtatgtatccttttaaaattttagatgtggatgctcttgggcgtcctattaaaattttgtcatctactggaaatttagtactatcttctggtaaagatgttttggatgaagactttatttggctttcaaaaagtgaagctgggttctttgatgaagtggaaaatccatatcaggcagctgaagagcaagagcaggaagagcaagaacaaatagaagatttcacagaattcccggtaatgaaagttactattgaaaatgatgaacaggcatggtccttgtatcagatgttgaaagctcactttaaggaataattatgccgctttatgattataaatgtcaatccaaagactgcacaaaagaatacgaaaaaatcaagaaaatttctgaaagggatactgatgtatgtcctgattgtcatcggattgctattcggttagtttccgctcctaagcatgtgaatggtggtttttacgacttacttaaagggtgattatgtttaaaatcggtaagaaatatcgtattcgcgaaggtgaagaacagaaatttctactttctgctagtaataggaatagttctattaatgttgtaatattgacaaacgaatttatcgttgaagatatgaaaggtcataatgttacaatgattggtacagcatctggaaatgctggaaaaactcttcatagtctgcaaagtagtgttctaatttatgatgaagaatttgactttttcgaagaagtcacagaagattttgattttgaatgcactattactatgaaatctggcgaccctctttcctttacagttaaagatgaaagaagccgcttgagagttattagtcttcttcaagccattaaatttgagtgaaattatgaaatatgttaatcgttctatcgcagcattagtattagcagtgtctttaataggatgtactgatgctgataatgcaaccaaagttttgtcttcaagtggttttactaatattgaaatcactggatataattggttcggttgctctgaaaatgatttccagcatactggatttcgtgctattggacctactgggcagaaagtagaaggaacagtatgttctggactattcttcaaggattcgactattcgttttaaataaaaggccttcgggcctttagctttatgattaccggagtataatattcccgaaaccaaacgaggataagtgatgattaagaatgaaattaaaattctgagcgatattgaacatatcaaaaagcgtagcggcatgtatattggctcttctgctaatgaaatgcatgagcgctttctgtttggtaaatgggaaagtgttcagtatgtacctggtcttgttaagcttattgatgaaattatcgataactcagtagatgaaggtattcgtactaagtttaaattcgcaaataaaattaatgttactattaaaaacaatcaagtaacagttgaagataacggtcgcggtattccacaagcgatggtcaaaacacctactggtgaagaaattcctggtcctgttgctgcctggactattccaaaagcaggtggtaacttcggtgatgataaagaacgcgtcactggcggtatgaatggtgttggttctagtttgacaaacattttttctgtgatgtttgtcggtgaaactggtgatggtcaaaataatattgtagttcgttgttcaaatggcatggaaaataaatcatgggaaactattcctggaaaatggaaaggaactcgtgttactttcattcctgattttatgtcatttgaaactaatgagctgtcccaagtttatcttgacattacactagatcgtctccagacacttgcagtagtttatcctgatattcaatttacctttaatggtaaaaaggttcagggcaattttaagaaatatgcacgccaatatgatgagcatgctatcgttcaagaacaagaaaattgctctattgcggttggtcgttcaccggatggttttcgtcaattaacttatgtgaataacattcacactaagaatggtggccatcacattgactgtgttatggatgatatttgtgaagaccttattccacaaatcaaacgtaagttcaaaattgatgtgactaaagcacgcgttaaagaatgtttgactatcgttatgtttgtccgtgatatgaaaaacatgcgatttgattctcaaactaaagagcgtttgacttctccatttggtgaaatccgtagtcatattcaacttgatgctaaaaagatttcacgtgctattctaaataatgaagcaattctaatgccgattattgaagctgctttggctcgtaaattggcagcagaaaaagcagctgaaactaaagcagctaaaaaggcttctaaagctaaggttcataaacatattaaagcgaatctttgcggtaaagatgctgacactacattgttcttgactgagggtgattcagctatcggatatcttattgatgttcgcgataaagaacttcatggtggttatccattgcgcggtaaagttcttaatagctggggtatgtcatatgctgatatgcttaaaaacaaagaactatttgatatttgcgcaatcactggattagttctcggtgaaaaagctgaaaacttgaattatcataatattgctattatgactgatgctgaccatgatggtttaggaagcatttatccttctctgctcggattttttagtaattggccagaattgtttgagcaaggacgaattcgctttgtcaaaactcctgtaatcatcgcacagattggtaaaaaacaagaatggttttatacagtcgctgaatatgagagtgctaaagatgctctacctaaacatagcatccgttatattaaaggacttggctctttggaaaaatctgaatatcgtgagatgattcaaaatccagtatatgatgttgttaaacttcctgagaactggaaagagctttttgaaatgctcatgggagataatgctgaccttcgtaaagaatggatgagccagtagtttactttaccacaaggatgtggtataattaattgggcaaatgaggatattgaaatgaaatcatataaagtaaatttagaactttttgataaagcagttcatcgagaatatagaatcattcaacgctttttcgatatgggagaagccgaagaatttaaaaaccgctttaaagatattagagataaaattcaatccgacactgcaactaaagatgaattactagaagttgctgaagttattaagcgtaatatgaattaatgaggaaattatgattatcaccactgaaaaagaaacaattcttggcaatggttctaaatcaaaagcatttagcatcacagcatctcctaaagtatttaaaattctgtcatctgatttgtatacaaacaagattcgtgcagtagtccgtgaattaattactaatatgattgatgcccatgcacttaatggaaatcctgaaaaatttatcatacaagttccaggacgattagatccgcgatttgtttgtcgagattttggtccgggtatgagtgattttgatattcagggtgatgataattctcctgggttatataattcatacttcagttcatctaaggctgaatctaatgactttattggcgggtttggtttaggttctaaatctccgtttagttatactgatacatttagtattacttcgtatcataaaggtgaaattcgtggttatgtagcttacatggatggtgatggtccacagattaaacctacattcgtaaaagaaatgggtccagatgataaaactggtattgaaatcgtagttccagttgaagaaaaagactttagaaactttgcttatgaagtttcttatatcatgcgaccattcaaagatttggctatcattaatggtcttgaccgcgaaattgattattttccggattttgatgactattacggtgtaaatccagaaagatactggcctgatcgtggtggattatatgctatctatggcggtattgtttatcctatcgatggtgttattagagaccgtaactggctaagcattcgcaatgaagtgaattacattaagtttccaatgggttcacttgatattgctccatctcgcgaggctctttcactggatgatcgtactcgtaaaaatattattgaacgagttaaagaactcagtgagaaagcatttaatgaagatgtaaaacgatttaaagaatccacatctccccgtcatacatatcgtgaattgatgaagatggggtattctgctcgagattatatgattagtaattcagtcaaattcacgactaaaaatctgtcatataaaaagatgcagagcatgtttgaacctgacagtaagttatgcaatgcaggagttgtgtatgaagtaaatcttgaccctcgactgaaacgcattaagcaaagtcatgaaacttcagccgttgcatcaagttatcgtctgtttggtattaatacaacaaaaattaatatcgttattgataatattaaaaatcgtgttaatattgttcgtggattagcacatgcgttagatgatagtgaatttaataacactttgaatattcatcacaatgagcgtcttctgtttattaatccagaagtagaatcgcagattgatttacttcctgatattatggcgatgtttgaaagtgatgaagttaacattcattatttgtcagaaattgaagctttagttaaaagctatattccaaaggtagttaaaagtaaagctcctcgtcctaaagctgctacagcatttaagtttgaaattaaagatgggcgatgggaaaaagaggaactgtttacgctcacatcagaagcagatgaaattactggttatgtagcgtatatgcatcgttctgatattttctctatggatggtactacatctctttgtcatccatctatgaatattttgattcgtatggctaatcttattggtattaatgaattttatgttattcgtccgcttttacagaaaaaggtaaaagaactcggtcagtgccaatgtatttttgaagctttgcgtgatttatatgtagatgcttttgatgatgtagattatgataagtacgtaggttattcaagttcagctaaacgatatattgataaaattatcaagtatcctgagctagattttatgatgaagtacttcagtgtagatgaagtttctgaagaatatacacgactcgctaatatggttagttcattacagggtgtatatttcaacggtggaaaagataccatcggtcatgacatctggacagtaactaatctttttgatgaattatcacataatgcttcaaaaaacagtgataaaatggttgctgagtttaccaagaaattccgtattgtttccgacttcatcggatatcgcaactctttaagtgatgatgaagtttctcaaatcgctaaaactatgaaggcccttgcggcctaataaggaaaattatgtacaatattaaatgcctgaccaaaaacgaacaagctgaaattgttaaactgtattcaagtggtaattacactcagcaggaattagcttattggaaggatgtatcggttgacacaatccgtcgtgttttgaaaaatgctgaagaagctaaacgccctaaagttactattagcggtgatattacagttaaagttaatagcgatgcagttattgctccagttgctaaatctgacattatttggaatgcatctaaaaaattcatttcaattactgttgacggtgtaacttataacgcaactcctaatactcattcaaacttccaggaaattcttaatctgcttgtagcggataagctggaagaagctgcgcaaaaaattaacgttcgtcgcgctgttgaaaaatatatttccggtgatgttcgaattgaaggtggaagcctgttctatcaaaatattgaattgcggtctggtttggttgatcgtattctcgattcgatggaaaaaggtgaaaactttgaattttattttccgttcttggaaaatctgttggaaaacccaagccaaaaagcggtatctcgactctttgatttcttggtagcaaacgatattgaaatcaccgaagatggttacttctatgcttggaaagtagttcgtgacaactactttgactgtcactcaaacacctttgataacagtccgggtaaagtagttaaaatgccacgtactcgtgtgaatgacgatgatacacaaacttgttctcgtggtttgcatgtgtgttctaaatcttatattcgtcactttggcagttcaactagtcgagttgtaaaagttaaagtacatccgcgtgatgtagtatcaattccgattgattacaacgatgctaaaatgcgtacctgccaatacgaagtagttgaagacgttactgaacaatttaaataagggcttcggcccttatcgcattaaggaaaattatgttaggttatcaagcacgagtaaaagaagaatacgatcaattaatgctcaaaattaatgcactgagcaaatttttagaaagcacaaagtttctaacggttagtgcagttgagcaagaattactgctttcacagttcatctcaatgaaatcttatgctgaatgtctagagaaaagaattgcacaattcaaataaaataagggcttcggcccttttgttttaagagaaattatgatttatatgaatatcagtgattccgacataaaggaaagtttaaatgcagaaaacgaatcctgggttacagagactatttcagattccgacatttactctatcgaacagcgatttaaccaatgaaatgaaggtcaaaattgctgatacagcaagatactctttaaaacaaaatccgaaccaggataaggctgaggtcatcgaaagatgtcgtatcgcagtgtatgctgagtatgttgtagcagattggttaagtgggtatgttaacaaaggtcaagaagacgtcgatgatccgtacacgtatgcatgggatgttttagcacatccaaaatactgtgggctccgtgtagaagttaagacacatcaaactgactcacgttggatttcggtaacaacaggatgcagcggagagtatccatatggttctggaataaatctagggcccattctaaatcatcaagtcgcggactgtataattatattcaacactaaagaaattcatccaggtgtcatccagtacactccgaagttcatcggtgacagagaagaccttcgtaaggttgtaagaaaaagcaactacaacggatggtatctttccatttaaaaaatttcataaactagtttacataccacaaggaccgtggtactatacaactatcaactacagaggaacaaaaatgaaatttaaattcttttatgttaaacataaaatcacaggtgaatttgttcatgtacaatattctgaaattgacgatgcaacatcatttatttcattgggattgtctaaatatgaatcagaccaaccatatcttactgataaattgcaacaagagcgtttgttgaatggtgatttaaacaattcttgggaagttcttatttacgatgatttagagaaagctattaaagaaaataatcttgaaatcattgagattgaactatgagttcattatggtggtgttttgtttggttaattagtattccagtaatttgtttaacatttacttttgtgatgaggttattattaaaattttgaattctgtacttattgcttgtgcgtggtgggttgtgcaagtttcagcggtagtagttggtattcacatttattacgaatatttttaaaaaagttgtttacaagactgttcctctgtggtactattaccctatcaactacggaggaacagaaaatgaaaaagattgttaaagctatatggaatgtagttataatactaatagttttgagtatattcccaatcgttttaatgattgatgtattaaacgtttactttggatttatgtgaggaaaatatgaagcgtaaacgcagtgcttttacatttattgaatggttttcgataatatttttccggctttattcattttcatgctgatttttgccttaggttcagttgtagttggaatctatttgatgacagtagtcggaattgatattcatcaaaatggtttaaaatccgtagttgaaacaatttggaatggtgtaaaatgatgaatttgctgagcggttggttttatattctcatgttttacattggcgcaaatttcccgtattggatgggatggtcaacaactgcatttggattttatactccttgaggtgaattatgaaaatctttaaagatgtaaaagttggtgaaattttttgtttagataatggtgatcagttaattcgtatttcacctcttaagagcactagcgagaaaccgacagttaacgctactttagcaaataacagtaatgaacgtttctgtattgaaaatgatactgaaacttacaccgtagaagaattctgggaattaagcgtcgcagtcgacgcttaatttatcggccgtatgtattcatgcggccttggagtagaaaataatttagaggaaattaaaatgaaatatatgactgttactgatctgaacaacgcaggcgctactgttattggtacaatcaagggtggtgaatggtttttggtaactccgcataaagatattttatctaaacctggattttactttttagtaagtgaattcgatggttcatgcgtatctgcacgattttatgtaggtaatcagcgttctaagcaaggattcagtgcagttctaagtcatattcgccaacgccggtctcaacttgcgcgtactattgcaaataacaatgttccatacacagtgttttatctgcctgcttctaagatgaaacctctgacaacgggatttggaaaaggtcagttagctttggcgtttactcgtaatcatcattctgagtatcaaacacttgaagaaatgaaccgtatgttggctgataactttaaatttgttttgcaggcatattaatgagtaatttccacaacgaacacgtgatgcagttctatcgtaacaatcttaaaaccaaaggcgtcttcggacgccagtgaggaaaatatgaatatcgcaaaattattaggagttatttcatttatttgttggatagtagcatgtgttttaactatctgtattgatgccagcagtgtgttttcgcaagctttagctcagggtatgtgtgcatatttaacatttgtgttgttatctactaatgattaagaaaatcttgggctattcattagcccttgctattttattgatagcattatattacggaataatgttcggattaattcaagtcgtgcttttcatttctgatgttattatggcactacattcactagtatggtaaatttatgcaactgaataatcgcgatttaaaaagtatcattgataatgaagcattggcttatgctatgtacacggttgaaaatcgtgccattccaaatatgattgatggatttaagccagttcaacgatttgttattgctcgagctcttgatttggcacgaggaaataaagataagtttcacaaactcgcttctattgcaggtggtgtagcggaccttggatatcatcatggtgaaaactctgcgcaagacgcaggtgctttgatggctaatacttggaataataactttcctctattagatggtcaaggaaactttggttctcgtaccgttcaaaaagcagcagcaagtcgttatatttttgctcgtgtaagtaaaaatttctataacgtatataaagatactgaatatgctccggtacatcaagataaagaacacattccgcctgctttctatttgcctattattcctactgttcttcttaatggcgtttccggtattgcaactggttatgcaacttacattcttcctcatagtgtttcttctgtcaagaaagctgtactgcaagctcttcaaggaaagaaagtaactaaaccgaaggtagaattcccagaatttcgcggtgaagtcgttgaaattgatgggcaatatgaaattcgtggaacatataagtttacttcacgaactcaaatgcatatcactgagattccgtataagtatgatcgtgaaacttatgtgagtaaaatcttagacccacttgaagataaaggcttcattacatgggatgatgcttgcggtgagcatggttttggattcaaagttaaattccgcaaagaatattctttgagcgataatgaagaagaacgtcatgcaaaaattatgaaagacttcgggttgattgagcgtcgttctcagaatattacggttattaatgagaaaggaaaactacaagtttacgataacgtagttgatttaattaaagatttcgttgaagttcgtaaaacttatgtccaaaaacgaattgataacaaaattaaagaaactgaatcagcttttcgtttagcctttgccaaggcacatttcattaagaaagtaatttcaggtgaaattgttgttcaaggtaaaactcgtaaagaactgaccgaagaactttctaaaattgagatgtattcttcttatgttgataaactagtcggaatgaatatttttcatatgacttccgacgaagcaaagaaacttgctgaagaagctaaagctaagaaagaagaaaacgaatattggaaaactactgatgtagttaccgaatacactaaagatttagaggaaatcaaatgagtccattcataggtattacaagcgctgcattagtatccggtagcattttactggcgggtttaggtgttgttccagccgtagcaggaggtcttcttgcgttctgcattcaacgtgttatcatgacagttatcacagtcatgcagtaattttagggagagccgaggctctcccttttttatttcaaaaatttttttcacaaaacggtttacaaccaaagcatactgtggtactatacaactatcaactactgatacagaattacggagattagaaaatgtctaaagtaacttacatcatcaaagcttctaatgatgctctgaatgaaaaaactgctgcgattttaattaccattgctaagaaagatttcattacagctgcagaagttcgtgaggtgcatccagatttaggtaacgcagtagttaatagtaatattggggtattgattaaaaaaggcctggtggagaaatctggtgatggattaatcattactggtgaagctcaggatattatttcaaatgcagcaactttatatgcacaggaaaatgctccggaactgctgaaaaaacgagcaactcgtaaagctcgtgagattacttctgatatggaagaagataaagacttcatgttaaaacttttagatgaaaatggatttgttcttaaaaaggttgaaacttatcgtagtaattatctcgctattttagaaaaacgcactcacggaattcgtaattttgaaattaacaataatggaaatatgcgaatttttggatacaaaatgatggaacatcatattcagaaatttactgatatcggaatgtcatgtaaaatcgctaaaaacggtaatgtgtatcttgacattaaacgctcggcagaaaacattgaagctgtaatcactgtagcatctgaactgtgaggaataaataatgaacaagttagaaattgtcaatgaacttcgtcgttgcgcagaacccactcaagagggttgggacatctggtaccatggagcttatcttggaactattgctaaagttagaactgggctatatttcattattcgtgaaaattctgaattacctaacggagtagcttatggcggtgtacgtaaaaacttcatggcagcgattagtacctttgttcaatcggcttacgaaatttaccttgctgattataaagaattccaggaatctcaaccagttattcgctcaattggtgttaacaaagctcaacagaaaactttgtggcagcgtattaaaggatggtttaaatgaacccatttattaatcgtttaaaaatgctgaatgttcctttatctcgtgaaactccagaaagttttgttgaaaaatttaaagcgcatggttataaatgcacagaagaagatattctaaaagaagttcctgaaatatgttggcagactgcatattgggatgaaaaccaaaagtatcaacgacgaattgtctgcgcggccaaccgttttaaattaaaagatggacgaactcttattattccaggtgctcgtcattattctaaagatatggccgaagttttagatgtagttaaacctcaattagttactcaacaagtttgtgatgatgaccaagggtttattgaccaatatagtaattattggacacgtgaagaagcaatgattattgcaacttacgctggacaagtacgtattgaacgcggtggtagtgaaaaagaactttactctgaggacctttactaatgaatattaaaaagtttcaaattgatggaattactaatcaaatccaggcactggaatatgctaataaaatgatgtcaagcaattggggaatttataccaatgagccgggatttaagttctgcgatatggaattcaccaaaaagctcgtaggaaaagattatgtatgcccatttagttctccggtaaatggaatgctaaaacctgctttacgcgatctttatattgcgatgaacgaagaaatgatagaagagctaaaacgtcaactgaaggtgattcaatttggccagggaaattaattcaaaatctgattattttaattctctcaatgataaagataaaaatctaatacggcattttattgttgagatgggatataccgatacacgcgatttaagagaacatatatttgaatgtggtgtagctaaaaagttttcattcacatgcaaatgtttaagagaggtaattcagcactatgaacaatttagtcgcaaaacataattttaataaagcttctgtccataaagataagaagaaagcgtttaaagaatctaatcgcaaacagaaacataaggggaaggtctatgattattgattctcaatccgtggttcaatacacaatcaaaattgatattctagaaaagctatataagtttctaccaaatttataccactcaattgtcaatgaattagttgaagaactacatctcgagaataatgatttcttgattggaacttataaagacctctcaaaagcaggatatttttacgtaattccagctccaggaaaaagtattgatgatatattaaaaactataatgttttatgtccatgattacgaaattgaagattatttcgaatgagtcataatcttgaaaatgtaatcgagcacaatgtagctcaggaacgtgagtcgttcaaggaattcgtagaaaaaatttttgaagaaaataacacagaccggtttacaaatcaagcgtctgatgatattataacaaagtcaactaattgagtggtatagttaatgaataaaaacattgatacagttcgtgaaattattactgttgcgtctattttgattaaattttccagagaagatattgttgagaatcgtgctaattttgttgcatttctgaatgagattggagtaacgcatgaaggtagaaagttaaatcagaattcattccgtaaaattgtttctgaattaactcaggaagataagaaaaccctcatcgacgaattcaacgagggttttgagggtgtatatcgatatctagagatgtatacgaacaaataattatttagcccttcctaatattctggccgcctgagcacatattgattcaagacggtcattacttatatgatcatttctataccagtacatggttatcgttccagcatagatattatccaaattaaaatatggacaactgtacatgtagtttatttcgggagtaggctttttagttggtaaaaaagcaaattttgagtttgaataataatgacgtccatttaaatgaactgcatattcatccatagttttatcaacaggatatcctccaagtgatttttcagttattgttgaaggtaattttccttcgtatgctataatatcaacaaaatagtttaagtttttagggcggaaagaatacaccgcactaaagtctgcctcagatgatatatgaactatctgaagttgttccagggcgacagattcaaagcgtgcatttctttccttttcaataatttcactgtatgtttcatactttgattgcttatagtactcaaagaaactatctcccctataccaaacaatcgccattataaacaaaagaattacgacagctacccgggaagcaagaactttcccggtagcattatctttgaacaagcgatctagaacacccaacagaatatcagagggcgaaaatgatattctaggtgctgccatagaccctccttttaaggatatttattcaaattatactcttggtccgtaaattgttccaacagcaccccaagttggagaagatccaaacactgcatgaccagacgcaccaccaacaccaactttaagaactttaccgccgtcagaccatgcattctgaccagcagcaccagcattaccacctgcgccggagtgtgcgttaccatagtcataaccaccacccggaccttcatacgaagcagcaccaccggaataaccgccgccgccagcaccaccgaaaggtcgaccgccgccgccaccgatatcttgccagtttgcccctgagtgtggacgatatgcaataccaccgccgccgccaccgccagcagctataacaccgtagttccaaatacgaagccgtccaccgatatcattttgaataacatgaccgccttgtgtaccgttaccgtcgcctcctgagtgagtgtatccaccattaccaccacgaccccacatatgaacaccaccatgaatattaagaacaacatattcattaggcgtatccccatacataaagaaaagtggcacatctttagaataagaaacgatatcaccaacaatattgaatacaatgggtgcaccgccagcttcaaagcaacggtcgcggaaccattgaccattaaagttatggtttgctgttacggtatgaataatctctcttgagcgtccggcgaattggctcatccagcaaggaacacccaatcttaattgaccagccgcttgactcatccatcgttgtcctgtttcatttacggatgaacttccaatccaaccgggaacaccaactactgccataattttctccaaaggggcaaagccccttgttgttagaatttaaaataattactaattttgcgagcaattttagtgaagaaaggcgttttcaattctttaatttcttcgctcatttcttggatagccttaattaaaagagcattcacagcggagttagaaattgtcagaacatcagatccatcaacttcaactttagacacagcttccggtaattctttttcaagatcctgagcaataataccaacttcacgtttaataacactacgatctttaatagacttaaccttatcgtatgtataaactttcagtcggcatactttttcaagtgctccgttttctagctcttttttattaatcttaagacgaccatcggaacgaatatacacatcgttaaagttaccattaccaggagaatagaaagtaccgtcgtaatgaaattcaaataccgcgttagggtgtccagccgctggcgatgcctccgcagatccaacacgaataattgcttgtccccaactgttattgacacgacgaataccaagatcgacggcagttacaaacccttgattggtgattacacttcttcctttaataattggataataacaatcctgtgaaacataaccatgatcgacgaatattggcgcttccacttgccactgactaccccaatcacctggttgactagcagtccaacgttcaccatgaacatataatcgaacgttattgacatgggccatttcgacgccttttggacttagcgtgatatctcctgcgtttgtaatgtatacaccagcattagtagcataactatataacgctaattcattatcagcaccacccttaccaatataccagttaccagtcccgtctatgtcaccacgaatacgcaaagaattactagcagttgttgataatacaatagaatcacccggacgtttaataaccaatttaccatcggattcaatttcaccaaaaaatttagtcttaattgcaccagtcgctaaagtacgttcagtggaaaaatgagcgcctttgctgtcttctaactgaataatgttatcacgcgcattattactatcaccccaatggttaaatttaaaataatctcgtgatcctaaacgtccggcgtcaaaagtcatcgtgcctttaatgttaatatcaccgccaaaaaatgcggtgagagaatcacgttttaattttaaaacgttagcaccactagcaccacctaaagtaacatcgccagttcttaattcataacggaaaggtctatttgtattaaagtttccatcttgatcattttcgtcggtggaaagaatataaagactctctccatcattacggaaaattgtaccaaattttccgccatacattttaaatgcattcaatgaacgaaatttaacttctgtattaaaagttgtagttgatttaaacgtggttgcagcaccgaagttaactgcgccattaaaatcttgttgagcagtccaagtatgtgatccgtcttcaagaacaacgcgtcgaactgtacatgttctactccctggattaccgaatacacgaacgacaaaataacgatagtttgtctgggatacagttccacgccaaacctgaacagtacgtcctgtgctggtgtgctcgctaggaccaacagaaaacataattaagtttccgtcaatcgtgccccaattcatattagctggcatgttctttattttgttcaaaggaacactaaacatactaccagggacaaaatcaaaggtttgccagtctaactcagctaagttagatttaataccgcccatacccaaagtaattggtagagaataggatgtgtatacttcgttccattcaccccacacaccgccggtatatgcgcgctcaaaaatacgatcgcgggtagttgcacctgttccggcagtagtaaatttttggaaaatagcaccaccagaagcacgctgtttgacttccagcaaaccaacaataacggctggtaaaccttcaccagtaggacaattaataacggcatcagtgcctaaaatattatataacccaggagttttaaaatcattcaggtttccgtcatagaaagtcgctggtgtgacattaccgacttgttgccacggtccccatttaggcgcggaaacatcccacgcggcagcaagacaacgagtatatacaacaccaaatctggttgtatatctttgtgtacgagaatagtttccaccttcatatacttccaaaagaccttgagctgacgacccctcttctgggaaatttctgtcaaaggtagcaatggaatttgaactatttcgccacaaaccaaggtgttcagcgcctcctagatcattaagatcaattgttgttgacagtggacgagtaccggattgaatatttcgccacacactccacggaccatttactccgttccatgtagcagtcaaggaacgaatataaacatttccgtatctagttgtatatctctgagtaccagcaaattgaccggccacaaatacttctagcacacctacagcattttcttctggaaatttatttgctggttgagcgttggttgaagttgctttcgaccaaactccaagatattcttcaacaggcccatacgtatctaaattagcatcagtaggtaattcgccattattttttataaatgttgtgctattgacatttatgtcagatggagttaaggtaatgtcctttgacccatcaaaagatataccattaattttcctaggtgtttgcaatttagtagctgtgctagaatttccaattaaagttccagttatattttctgtaacctctaaagacccatttatagttcctccatattttaaacctaattctataacactacctgagtcatcttttgtgaaaattgttttatcttttaagtttatagccaattcaccttcggctaatactgaagcagcaggacgttgacctgcagttttgcttcttttaaattgtatttgttttaaagtagccataagtcctcttaataatagccgaaatcttgaacagaatccttaattacgatttggtcaaatcgtggaacgtgtgaaggttgagatgcaggattctgtgaaaaaaggtttggcgcagttaaatttcctgtcatagtgtctccagagcgtaataccctagagtttgcatttgctgtaacagtatttattgctccatcaacataatctttgcgagtaacatcagatgctgcggaaggagtagatgtaacagttaccgatggagccgttacagccctggtaaatgttgtcaaaccttctggcgtaatagtaatttgtccagtagtgatttcactacctgcaggtctaaaactaataccaccggaagagccgccaactacaagagtattaccagtgccgccaccagaacgaattcggataggggtttcattattacttaattgaagataactatttaccccgtaattaatagtaattggaccggcgtaagtaccaccattagctttagaaacgaaatcgttatcagctgcctgcggtttattatattctgaatatattttaaatgatttgtagagtacatcgtcaccggctgaattcaatggaaaatttccttgatgccaaatgacagatccacccacagttgaacctacttttaaatcagccattatatgcccctttattttaatattatttataaagaaaaagggagcccgaaggctccctcagtttaaacttctctaaattcttgcccaaacactttgccagttttagaagaggcttgtgtaggaagtaccattatatctggaggtgaagccgattcacagacataattaacgcgaataccgttgacgccaaattcgacaggttttgaaatgccgccatttcttgatacttcagaaaagcttaaattcctcattccgccttgaccagcttgagcagttctctgcgcatatatagtaaatccgactgcattttcaggaacaactacataatcttcctttaattcccaagatccagcttgtccagtaaactcagcttgggtagaggaaatatatccatttgatgcatcataaaaacgaatggatatgtttgtagttccaagatcaagtaaatcagcatcagcatataactgtgctttaagataaagaacatcaccaggaattaaattatagtcagaaagtttacttatagcagctgaagttggcaatcgcgcaatttcgttattagttccaccaaccgctgacataaattgctcgacactttcatatgttcttttaggaaatcccgtagctccgacgtcttctaaactatcaaatacaacatctaaaatagtttgataatcatctgtgctttttctattacttagtttaacatgctctaatgcaatagctcttttagaagaagtataaaaagcagcatatgatacgtcaaatcttgacaatactgaatctgatggaaaaactgaagttcctgctccccttaaccaagataccacttcaggaggaaaattaacctttccgctagttagtatagcaacaagtctattgtttgacaaagaattcatgaaactaacaaaagcagctgatgtagtattatttgaagtagaaaaagcatatgacttactatcaactaatgctcctgttgaagggtcaaaaactcttaaatgaagacctgcgctaaatgtttgatttccgacagggttatcctgaaatttaacatatggtcctgctgtagaaagcgggcaagaacccgctatacttattttgtatcttactgaattactttccgataaaaatggcgtttggacatatccttgtccaaactctgccataaatttttccataatacctcttattcaatccactcaaatttaacagttttattcactgggtcaggaataatgcgaacattaccaattcgcaagaaatcacgaatagtaagattacctattattccattatcagatgggatcgctcctatatctgaaggttgaggagggttacctccgtcaaatacctgaacaaaacttgaccaagagtttttggttttctgccatgtacgtgtccagcgagtggtacgtgcttctggagtcgttggataagtaatccaatcttggtaaagtgaatcaagcgtgttaccaaactgagtcaatgtaccaggagatttaacttcttcgccacgttctaagtatggaagcccagtcacttcattagttttttcaaccatcttaaaataacccgggaactggttataagtggctgaatcattaatatcgattgaccagaatcctacagtatcagatgttggcgcacgggtatataaatcagaggttttagtaccctgagaacgaattctcgagttaacagttaaaccacctgaacttatagtagcacctttggcaatgattaagctttcaccaatcgttacttgaccagatgcattattaatagttaaaggacgtaatccattaaatccaccggtctgatcgccagatgcagtaagcataaaataggtgttagcaccatcattacgaataaagaatccataatcaccgtttattgctctaaaagcattcgatgatttactgataaattcgccattagcagtaactgaactaccgaatgttgcaacgccattcgcattcaatgttcctgaagcattcacatttatcggcgttactgtaccgtttatattaaatgttatattaccagctttattacgctgagaataaaaatgactagaagtttcatcactaacttcaaatacagtagaacgtgttgtgtccgattcaccgctgaattgatttccccacactctgactgtcatcatttgagctgggttcgtcccagtttgaggtcctttctcaaaaatcagacgagttgccgttccagtattagaaatagttaatgtactatttgccgaaactgatccaccaaacgtagcagtactagatgatacaagaggggcactcagattcgtttgttgcgttaaggttagtgaaccattaaccgtctgtgcaatatccctacgaatgaactggagtgaatctaaaccatctaataaattactatctacagcttttgcttttaacggcaaataatttgctaatacgcggtttaattcatatggtgatactgcatagttatttttctcatatagttctaagtcctgtgtagaaccagctgtatcattaccaacgaacgtaattgaaccagatgaggttttaacaaaacctcttatcgcagtagtagctgcccaagtaggttcactctgcacaatccattttaaattttttggagatacagcagtatttgctgacgttccagctacagtttcagaccgagttgcaactttaataacgccttcctgtgcttcagtagatttagtacctaaaagctttttaggagttattagaacattatccaatgttcctgcagcagcttcaacttgtgtagctacacgaagtgtaccacgctgtgtctcatttgcttcaagaatattaagggtataatggtcccagagagttcctgattcaactaatccagatagagcaacaacagaagtacgatcagtactattaaatctggttttaatttttaatggtgtagagatacgagtatcgtcgacgcctgcgtcgaattcaacttgtgtagcaatttcagctataccagttaaactttcagttgctttacggtcatttaaagttttaggagtgactgcacgagtataatcagttcctgtattaacttcactttgtgtagcaatttcaattaaaccaattcttgcatcagttgatgtctttttatgtaacgtttctggcgttacaacagcatttgcccatcctttttgactctgtccagcaattacttcactttcaactgctaaaattactgcaccttgttgcgttggagtagctttatactgatccaaagctttaggcgaaacaactaaattattagtgtttttattataaacgtttgtaccatttaattcacgactagaagctggagtagctcctgcggtagatacaaatgttacaataccggataatgattcagaaccttgacgagcttgaagctttttaggagtgatgattgtagtatcatcagtacctgtattagtttcctgctgcgtagcaatctcagcgacacctctacgagtttctgtagcagttctttcattcagctttttaggagtgatgataatatcatcagcaaaagagaatgtggtgttctgattcacttgagcagtagttgctattcttgcgatacctctacgagtttctgtagcagtacgattagctaatgtttctggtgtaattgctaattctttttgtggagaattttctaaatcagcatttgcttgagcttgtgtagctaaagcaattacgcctaatcttgctctagtagaattatttaaagaatcgactctttcaactgttggaacgttttgctgtacaacccagtattttccatcagaatcttctatataagcaagttgcaaaactggtacataattagtttcaccattaaaaactaattcttgaactgttacccattcagcttcaggcggatattctgaacgttttgggaattgcagcaattgaactgaagaagcaattttatcttcaccggcagctttgattttaactgtttgtccttttctcatgtaattcatggaaattttaacagtatcaccaacagaaatatcagtcggaagctgaagttcaattgtttgggttgttccattattcgcaccaaataccatgacttcttcatttggacgaatatttgaattagttgttataatgcgtaaacgtgctttactatccccgtcaaacaatctccacaatttctcattatcgtcaaacatcaagaaaccgtcaatcgatgtacggccttcaatggaatgagttccaacttcttgcactgacgtcgtttcatcatatgtcgtaacaattgtatgataaagtggatttaatttatctaaatcaacgaaattaatgatatctccatgattggcaaatcttggaagtttaacattaatcggtgcggcagaagtaaatctacgtacgataaaatcattagattgtgcttgatatgcagtcgatggagtaacaattgcagcttctctgctataatcagcaatatacatttgccacaaacgattattaaaaatgaataccatctgtgactttggatgagtcattaaaactgaacgtacctgttcacctctaaaattgacaatactctgatttgaagaatttattttaacctgatttatgccaggttttccaccgatatcttgaattattacggtttctccatcaagcggagaaggtggtaaagtaaactcaatgtcattgccaactgatgtatctactgaaattgcttctccggattttaattgatatggtccagatgatacggttgtatatacggcatcagtacgtaatgctttccaacgaattctattaaaacttccagcaggttttggaatattatccgttgctgcccaaaaacgattattataaatgattacaaaatcttttaaatatccacgagttggatcatattgttgaactgtgttttcttgaattaagtaatcaacgttaacaccgtcagttcctacggtacgatcagctaaagctacgttgattattttatcgccacctgcgtccagaccgtcttctgctctgaactttcttttaatctcggccattctcccgggctcctattgtgttttcaataataagtatttatacttgtttactttaagatttggatagtatataatagaaatctcactaattgaacgaggttcatatggatttagaaatgatgctggatgaagattacaaagaaggaatttgcttaattgactttagtcaaattgcgctttcaactgctttagtaaacttcccagataaagaaaaaattaatttatcaatggttcgtcatttgatattgaactcaattaagtttaatgtcaaaaaagcgaaaactcttggatacactaaaattgtactgtgtatcgataacgcgaaatctggatactggcgtcgtgatttcgcttattactataagaaaaaccgtggaaaagcacgagaagaatctacttgggattgggaaggttattttgaatccagccataaagttatagatgaattgaaagcttatatgccatacattgttatggatattgataagtatgaagcagatgaccacattgctgttcttgttaaaaagttctctttagaaggacataagattttaatcatttcatcggacggtgactttactcaacttcacaaatatccaaatgttaagcaatggtcaccgatgcacaagaaatgggttaaaattaaaagcggttctgctgaaattgattgtatgactaaaattcttaagggtgacaaaaaggataacgttgcttcagttaaagtacgttctgacttttggtttaccagagttgaaggtgaacgaactccttcaatgaaaacttcaatcgttgaagctattgctaatgaccgtgagcaagctaaggtgcttctcacagaatctgaatataatcgttataaagaaaatttagttctaattgattttgattatattcctgataatattgcttcaaacattgtgaattactataattcatataaattaccaccgcgtggcaaaatttattcatattttgtaaaagcgggtctttctaaattaactaatagcattaatgaattttgaggtgaataatggctaaaaaagaaatggttgaatttgatgaagctatccatggcgaagacttggctaaatttattaaagaagcatctgatcataaactgaaaatttccggttataatgaactgattaaagatattcgaattcgtgccaaagatgaacttggcgttgatggtaagatgtttaatcgtctattagctttgtatcataaagataaccgtgatgtgtttgaagctgaaactgaagaggtagttgaactttatgacacagttttctctaaatgatattcgtccggtcgatgagaccggtctttcagaaaaagaactttcaatcaagaaagaaaaggatgaaatagcaaagcttcttgatcgtcaagaaaatggatttattattgaaaaaatggtagaagaatttggaatgagttatcttgaagctacaacagcatttttggaagaaaactctattcctgaaactcaatttgctaaatttattccttcgggtataattgaaaaaattcagtcagaagccattgacgaaaatcttttacgtccttctgttgttcgttgtgaaaaaactaatacattagattttctactatgattaaactccgcatgcctgctgatggtgaaagatacattgatggtaaatcagtttataaattatacttaatgataaaacaacatatgaatggaaagtatgatgttattaagtataattggtgcatgcgggtgtctgatgccgcttatcaaaagcgaagggataagtattttttccaaaagctatcagaaaagtataaattaaaagaattaactttaatttttattagcaatcttgtagctaaccaagatgcttggattggtgatatctctgacgctgatgcattagtattttatcgtgaatatatcggacgcttaaagcaaattaaatttaagtttgaagaagatattaggaatatctattattttagtaaaaaagttgaagtttctgcttttaaagaaatctttgagtataatccaaaagttcagtcgagttatatttttaaactacttcaatcgaatataatttcgtttgagacgtttatcttgcttgattcgtttttaaatataatcgataaacatgatgaacagactgataatttagtttggaacaattattctataaagttaaaagcttatagaaaaattttaaatattgattcacagaaagctaaaaatgttttcattgaaactgtgaaatcttgcaagtattaattgcttattataaatagattataattatctcactgaccagctatgaggtcatacatcgtcatagcaccaactgttaattaaattaaaaaggaaataaaaaatgtttaaacgtaaatctactgctgaactcgctgcacaaatggctaaactggctggaaataaaggtggtttttcttctgaagataaaggcgagtggaaactgaaactcgataatgcgggtaacggtcaagcagtaattcgttttcttccgtctaaaaatgatgaacaagcaccattcgcaattcttgtaaatcacggtttcaagaaaaacggtaaatggtatatcgaaaattgctcatctacccacggtgattacgattcttgcccagtatgtcagtacatcagtaaaaatgatctgtacaacactgacaataaagagtacagtcttgttaaacgtaaaacttcttactgggctaacattcttgttgtaaaagacccagctgctccagaaaacgaaggtaaagtatttaaatatcgtttcggtaagaaaatctgggataaaatcaatgcaatgattgcagttgatgttgaaatgggtgaaactccggttgatgtaacttgcccgtgggaaggtgctaactttgtactgaaagttaaacaagtttctggttttagtaactacgacgaatctaaattcctgaatcaatctgcgattccaaacattgacgatgaatctttccagaaagaactgttcgaacaaatggttgacctttctgaaatgacttctaaagataaattcaaatcgtttgaagaactgaacactaagttcagtcaagttatgggaactgctgctatgggtggtgccgcagcaactgccgctaagaaagctgataaagttgctgatgatttggatgcattcaatgttgatgacttcaaaacaaaaactgaagatgattttatgagctcaagctctggcagttcatctagtgctgatgacacggacctggatgaccttttgaatgacctttaatagattatattactaattaattggggaccctagaggtcccctttttttatttcaaaaattttttcacaaaatggtttacatccctgttcttctatggtactatacaactatcggcaatactgctgacgattaaagaggaaaacaatatggctaaagttgatattgacatcgttgattttgaatatattgaagagattattcgtaatcgttatcctgaacttagtatcacaagcgtgcaagattctaagttttggagtattcaaatcgttattgaaggtcctcttgaagacctcacccgctttatggctaatgaatactgtgatggcatggattctgaagacgcagaattttacatgggactgattgaacaataattatcgaggggctatcaagccccgttaaaatgaggaaaccgtaatgtataccggtaaaaagtatgaacttgttccaagacttattgatacatttattaattatagcccacgttctaattcatcaatagttaaagccattcgagagaatggcggatggtttgaagttaaagaagtttccgtcgctaatggatataaagcagtaaaacacattgaatgcgcaaatggaaaacatttttacctcaaagatagacttttagaaatttgcgaagacgaatttcattgttttcgtgagtataaagaaccgacttctgaaaaagatgaagtcaaagacaaggtttatggcgtaacaaaaattcactgcattgtagacgaaaacaatgtagatgaaatcattgaacttttgcgaaaaactttcaaaaagtagtttacaacagggtagtagtgtgatactattaccctatcaattaaggagaataaaatgagattacaacgccaaagcatcaaagattcagaagttagaggtaaatggtattttaatatcatcggtaaagattctgaacttgttgaaaaagctgaacatcttttacgtgatatgggatgggaagatgaatgcgatggatgtcctctttatgaggatggagaaagcgcaggattctggatttaccattctgacgtcgagcagtttaaagctgattggaaaattgtgaaaaagtctgtttaaggaaaataatatgatttttgtatttgaatttatgaatgatgaattcgattatgcaatttttaacgcattgcataatcctgatttaagtgaatttaatgaaatgttttctgacgctttgagtatgtcagaagaatactgtggagaatgtcaacgtgtttgtgtgacagtttttgaaaacaaagaaaagacatatgaagaattattctttgatgctaataaagccactgaatggtttcttgaaaggggttttgcgtaatgattaaattggtattcgcttattctccaactaaaacggtcgaaggctttaatgaattagcattcggtttaggtgatggtttaccatgggggcgagttaaaaaggacctccagaattttaaagctcgtaccgaaggtacaattatgattatgggtgctaaaacgttccagtcattatctacattgcttcccggtcgtagtcatattgtggtgtgtgaccttgcgcgtgattatcctgtaactaaagacggcgatttagcacatttctatattacttgggagcagtatataacttacatttctggcggcgaaattcaagtgttaagccctaatgcaccatttgagactatgcttgatcagaattccaaagtaagtgtaattggcgggcctgctctgttatatgctgcattaccttatgcggatgaagtagttgtttctcgcatcgttaaaaggcaccgtgttaattcaacagttcaattagatgcaacttttcttgatgatataagcaagcgtgaaatggttgaaacgcattggtataaaatagatgaagtaacaactcttacggaatcagtatataaaaatgaaataccgcggggtggaaaatatgaattttaattattaccctattctattagaaaaagacacgaaacagccaaaatggcaaggtcctcagtttattaaaggtgtctatcaattagtagttcctaaagacaagatttatagcagttgtttcactgaatccgcttgtagtatttttggtaatagttctccgtattggaattttgacataaagctggatagaaatatcgatatttggttgaaagctatggatattggtaatatcacgtttgatgagaataattatcatattattggtcgcttttccaaacgtggcaaagaattatacttcacgcctgaaattgagagaaaatttgatgctaaaccgtattgattattagcttcataaaatgtattataatttatataaggtactaaatgaaacaataccaagatttaattaaagacatttttgaaaatggttatgaaaccgatgaccgaacaggcacaggaacaattgctttgttcggtactaaattgcgttgggatttaaccaaaggttttcctgcagtaacaactaaaaagctcgcttggaaagcttgcattgctgagttaatatggtttttatcaggaagcacaaatgtcaatgatttacgattaattcagcatgattcattaattcaaggcaaaacagtctgggatgaaaattacgaaaatcaagcaaaagatttaggataccatagcggtgaacttggtccaatttatggaaaacagtggcgtgattttggcggtgtagaccaaattgtagaagttattgatcgtattaaaaaattaccaactgatcgacgtcaaatcgtttcagcatggaatccagctgaaatcaagcagatggcattaccgccttgtcatatgttctatcagtttaatgtgcgtaatggctatttggatttgcagtggtatcaacgatcagtagatgttttcttgggttaattgaggcctgagtataaggtgacttatacttgtaatctatctaaacggggaacctctctagtagacaatcccgtgctaaattataggactgccctttaataaatacttctatatttaaagaggtatttatgaaaagcggaatttatcagattaaaaatactttaaacaataaagtatatgtaggaagtgctaaagattttgaaaagagatggaagaggcattttaaagatttagaaaaaggatgccattcttctataaaacttcagaggtcttttaacaaacatggtaatgtgtttgaatgttctattttggaagaaattccatatgagaaagatttgattattgaacgagaaaatttttggattaaagagcttaattctaaaattaatggatacaatattgctgatgcaacgtttggtgatacatgttctacacatccattaaaagaagaaattattaagaaacgttctgaaactgttaaagctaagatgcttaaacttgggcctgatggtcggaaagctctttacagtaaacccggaagtaaaaacgggcgttggaatccagaaacccataagttttgtaagtgcggtgttcgcatacaaacttctgcttatacttgtagtaaatgcagaaatcgttcaggtgaaaataattcattctttaatcataagcattcagacataactaaatctaaaatatcagaaaagatgaaaggtaaaaagcctagtaatattaaaaagatttcatgtgatggggttatttttgattgtgcagcagatgcagctagacattttaaaatttcgtctggattagttacttatcgtgtaaaatctgataaatggaattggttctacataaatgcctaacgactatccctttggggagtagggtcaagtgactcgaaacgatagacaacttgctttaacaagttggagatatagtctgaactgcatggtgacatgcagctggatataattccggggtaagattaacgaccttatctgaacataatgctaccatttaatattgcatcatatgctgcgttagttcatattgtagctaagatgtgtaatcttattcctggagatttgatattttctggcggtaatactcatatctatatgaatcacgtagaacaatgtaaagaaattttgcgtcgtgaacctaaagagctttgtgaactggtaataggcggattgccttataaattccgctatctttctactaaagaacaattggaatacattcttaaactcaggcctaaagatttcgttctcaaagattatcagtcccacggtgtcttgaaaggaaaaatggcggtataattttaatttaattgcgaggatatatgattttacgatttaaagatacttctgacgttgttctttttacacttcctaatccaagtgagctagaagttccaggaccaaatcagcctattatcatttatggcaaaaaatattatactcataaaatgactcgtgagtattttgataataaaatttccacagttaaaacttcttctgactgttactacgatattactgttttaacggaaaaacaatatgccgaattatcaccgcgcgggccgtctatgtcgggtagtgaataaatacaaatccgactttgatgttaatattcaccgtggtacattttggggaaattacgtcggtaaagatgctggcagccgggaggttgccattgaattattcaaaaaagattttatacgtcgaattaaatccggagaaataactaaagcacatttagagcctttacgtggaatgaggctaggatgcacatgtaaaccaaagccgtgtcatggtgatataatagctcatatagttaaccgattgtttaaagacgattttcaagttgaggacttatgcaattaattaatgttatcaaaagtagtggtgtttctcagagctttgacccacaaaaaattattaaagttttatcttgggcagctgagggaacatcagtagatccttatgaattatatgaaaatattaaatcttatctccgtgatggaatgacaactgatgatattcagactattgtcattaaggctgctgcgaattctatttcggttgaagagcctgattatcaatatgtagctgcacgttgtctaatgttcgctcttcgtaagcatgtttatgggcagtatgaaccgcgttcatttattgaccatatttcttactgtgtaaatgaaggtaaatacgaccctgaattgttgtcaaaatattctgcagaagaaattacatttttagaatcaaaaattaagcacgagcgggatatggaatttacttattccggggcgatgcaattaaaagaaaaatatctcgttaaagataaaaccactggtcaaatttatgaaactccacagtttgcatttatgactattggaatggcattgcatcaagatgaacctgttgatagactaaaacacgttatccgtttttatgaagcagtatccactcgacagatttcattgccaactcctattatggctggttgccgtactccaactcggcagtttagttcatgcgttgttattgaggcaggtgattcattaaagtctattaataaggcttctgcttcaattgttgaatatatctccaaacgtgctggaattggtattaacgttggtatgattcgtgccgaaggttctaagattggcatgggtgaagtgcgtcatactggtgttattcctttttggaaacattttcagactgctgttaaatcatgctcacagggcggaattcgtggcggcgctgctactgcttattatcctatttggcatttggaagttgaaaatcttctcgttttgaaaaataacaaaggcgtagaagaaaaccgcattcgtcatatggattatggtgttcaactgaatgatttgatgatggaacgattcggaaagaacgattacattactttgttcagtccacatgaaatgggtggcgagctttattattcttattttaaagaccaaaaccgtttccgtgaattatacgaagcagcagaaaaagaccctaatattcgtaaaaagcgtattaaagcccgtgaactatttgaattgctcatgactgaacgttcaggaaccgcaaggatttatgtgcagttcattgataatacgaataactatactccgtttattcgtgaaaaggcgcctattcgtcagagtaacttgtgctgtgaaattgctattccaacaaatgatgtgaatagtcctgatgctgaaattggcttgtgcacgttatctgcattcgtactagataattttgactggcaagaccaagataaaattaatgaattggcagaagttcaagttcgtgctcttgataatctgttggattaccaaggatatccagttcctgaagcagaaaaagctaaaaagcgtcgtaaccttggcgtaggtgttaccaactatgcagcttggctggcaagtaactttgcttcttatgaagatgctaacgatttaacacatgaactatttgagagattacagtatgggctcattaaagcatccattaagctcgccaaagaaaaaggaccttgcgaatattattcagacactcgttggtctcgaggcgaattacctatcgactggtacaataaaaagattgaccaaatcgcagctccaaaatacgtttgtgactggtcgtcgctgcgggaagaccttaagctctttggcatccgtaatagcacattatcagcacttatgccatgtgagtcatcttcccaagtttctaacagtacaaacggtatcgagcctccacgtggaccagtctctgttaaagaatcaaaagagggctcctttaatcaagtcgtgcccaatattgagcataacatagacctctatgattatacatggaaattagctaagaaaggtaataaaccttatcttacgcaggtagctattatgctgaaatgggtatgtcaatcagcttcagcgaatacatactatgacccgcagatttttccaaaaggaaaggttccaatgtcaataatgattgatgacatgctatacggatggtattatggcattaaaaatttctattatcataatactcgtgatggttctggtactgatgattatgaaatagaaactccaaaagctgaagattgttcatcctgtaaattatgatataatttgactcacggacgagtcaccaactattaactaagtggaaaatttatgagcacagtttttaatacaaacccagttgatgttttaaaagaacctatgttttttggttcaggtcttggtattgcgcgttatgatattcaacggcatcgagtatttgaagaacttacagaaaagtccttatcatttttctggcgcccggaagaagtaaacttaatgatggatgctgcacagtttaataagcttcctcagtatcagcaaaatatttttactaacaacttgaagtatcaatcacttttggatagcattcagggtcgtgcgccgtctgctgtacttatgtcattaatttcagacccaagccttgatacgtgggttgctacatggacttttagtgaaactattcacagtcgttcatatacacatatcatgcgaaatctttatactgatccatcgaaggtatttgatgagattgtattagatgaagctattatgaaacgtgctgaatccattggacgttattatgatgatgttctgattaaaactcgtgaatgggaaaatgctaaagaatttgtagaactatctaaagaatctcctgatgccgactttcgtttaaaccgagctattaaacaagaagccgaagctaaacgtgctttaatgaaatctctttacctctgtttgcacgttattaatgccttagaagctattcgtttttatgtatctttcgcatgcacttttaacttccataagaacatggaaatcatggaaggtaatgccaagattatgaagttcattgcgcgtgatgagcagcttcaccttaaaggcactcaatatattattcgtcaacttcaacttggcactgatggcgatgaatgggttaaaattgctcaagagtgtgaacaagaagcagttgatattttcatggaagttaaccgccaagaaaaagattgggcagttcatttatttaaagatggtgatgttcctggattaaatacaaatagcatgtggagctttattgattacttaactgtatctcgtatgaaacagtgtggtcttccatgcccaattaccgatgctccaattaaacatccatatccttggattcgtgaatatcttaattctgataatgttcaatccgcgccacaagaagtagaactgtcatcttaccttgttgcacagattgataatgatgttgatgataaagttatgatgagttttaaaaaatacttttaaggagtgggccgcaaggcccattttattatgaaagaaattgcaacagaatattcatttattaaatatactgagctagaattagacgacaatggaagtataaaacagttatctattccaaacaagtataatgtaatttatgctattgctataaatgatgagcttgtttatattggaaaaactaaaaatttacgcaaaagaataaactattatagaactgctattaaccgtaaagacaaaacgtctgattctactaaatctgcattaattcatgctgcgctaaaggaaggaagcaaagttgaattttacgcccgccaatgttttaatctttctatgacaaatgagttaggtacaatgacaatcgcaacgattgacttagaggagccactattcattaaactgtttaacccgccttggaatattcaacataagaaaaaatgatgcttccacatggagtgtggtactatattcaaaacacaaaagaggatacacaatgcaagaactttttaacaatttaatggaactatgtaaggattcacagcgtaagtttttttactcagatgatgtaagtgcatctggaagaacttacagaattttctcatataattatgcatcttattctgattggttacttccagacgcattggaatgtcgtggaattatgtttgaaatggatggagaaaaaccggtaagaattgcctctcgtcccatggaaaagttttttaacttgaatgaaaatccattcacgatgaatatcgatttaaatgatgttgattacattctaacaaaagaagatgggtctttggtatcaacttatttagacggtgatgaaattctgttcaaatcaaagggttcaatcaaatctgaacaggctttaatggctaatgggattttgatgaatattaatcatcatcagttgcgcgacagacttaaagaattagccgaagatggatttactgctaacttcgaattcgtcgctccaactaatagaatcgttcttgcttatcaagagatgaaaatcattttattgaatgttcgtgaaaacgaaacgggtgaatacatttcatatgatgatatttataaagatgctattcttcgtccgtatctagttgaacgatacgaaatcgatagccctaaatgggtagaagaagctaaaaatgcagaaaacatcgaaggctatgttgctgtgatgaaagatggttctcattttaaaattaagtctgactggtatgtgtctcttcatagcacaaaaagttcattagataatccagaaaaattgtttaagactattattgacggtgcatcagatgatcttaaagcaatgtacgccgatgatgaatattcatatagaaaaattgaagcatttgaaacgacttatctgaagtacttagaccgagctctattcttagttcttgactgtcataataagcattgtggtaaagatagaaagacttatgcaatggaagcgcaaggcgttgctaaaggtgctggaatggatcacctgttcggtatcatcatgagcctataccaagggtatgatagtcaagagaaggtcatgtgtgaaatcgaacagaattttttgaaaaattataaaaaatttatcccagaaggatactaagctgtttacaagtccctcgtgttgtgttatagtagtcttactgacataacatgaggactttatgatggatttgcagcttattactactgaaatggtcgttgaagcatacggtgatactacagatgggatttctgtattcaaaggaaatcgtcgagttggatatatcaccgatcttaagaaagatttagctaagcaagtcaagcggaaaacgaccattaaagaatatcgaaatcgtcgtcttgagcaagcccgtgatatgcttcctgatgcggttgaagagatgaaagtctttttagaaaatcaactcgctaagtatgattgtgaagtgttcattaatcagactcagcctaatgttcatatcaatagctgcaaatgctatatcatcgttaatcctttgactggaaagcatcgtcttggaattagtaatccaaatcgtagtgcatcggatatggcagaagatgttgaggcatgctttaaaatttctaaatctccggctgaacatcatattttaattaacggtctttctcaagacgatattatagaggttattaaaactttatgcaattaagtaatacaacagctggattgctattacttgtaatagcatttggcggaacatctattattttaaaaaataaggtagaaagattagaaacatcagttactgaaattacaaaaacagccaatgaaaacgctttagcattagataatttgcgaattcagtataattatattgatgcgatgaataataaaaatcgtgaggcaattgctgctattgagcgtgaaaatgaaaaactgcgcaaagatgcaaagaaggcggatgtggtggctcataagccaggattggttgaaaaacaaatcaacaactccttcaacaagttcgcagaagacatccaggacctttctaaatgattaaactatcagcagtaatattatctattggtcttctagttggttgttctacaaagcctctagaagtaaagaaagaaacagttcatcctaattggcctgtacaaataaagtcatatgatgaagctaaactatcttggcaagttaaagttattgatggtaaagcttgggtcggtatgccatttgaagattcccaggaatttcgtatttggcttaatgatgtaaaacgatatgtacatgaccaaaaaactatgatatgttattatcgtcaagagctaaaagaggataaatgtaaatgattacatggcatcaatttgaacatctaaagggattaatttatgaatccgagatggctgcaatgatttatggacgacagattcaacgattagaatctttacctccaactaatgatgttttattagctcaatcacgtgctaatcttaaaaatgaataccaaaataagtggggtaaagcatctaaagacctgcatgattatattcaatcattgattgagaaaaataaatgaaaactctactagaacgttatattgaatgctcagaccgttacattgacgtatgccgtgaaaatgtatcaagcattagcgaagacattgaacatgctaaagctttagatgatgctggtaaagccctgcgaaaagaagcgaaagctcgtgggcttgatatgtatcagcttaaaaatcacatgataaaatttatttcatctaatgttcaaagtaaatcagtgaatcaatcaacagctgaattgtacaaaggacggcgtgagcataatattcgtattcttgaagttttcttaggaattaaatgatgaaaaagattattttgactattggctgtcctggttcaggtaagagtacttgggctcgtgaatttattgctaagaatcccgggttttataatatcaatcgtgatgattatcgtcaatccatcatgggtcatgaagaacgcgatgagtataagtataccaaaaagaaagaaggcatcgtaactggtatgcagtttgatacagctaaaagtattctgtacggtggtgattctgttaagggcgtaatcatttcagatactaacttgaatcctgaacgtcgcctagcatgggaaacttttgccaaagaatacggctggaaagttgaacataaagtgtttgatgttccttggactgaattggttaaacgtaactcaaaacgcggaactaaagcagtaccaattgatgttttacgctcaatgtataaaagcatgcgagagtatctcggtcttccggtatataaagggactcctggtaaaccaaaagcagttatttttgatgttgacggcacgttggcaaaaatgaattgtcgtggtccttatgaccttgaaaaatgcgataccgatattattaatccaatggtcgttgaactatccaagatgtatgcccgtatgggttatcagattatcgtagtaagtggtcgtgaatgtggaactaaagaagacccaacgaaatattatcgtatgacccgtaaatgggttgaggacattgctggcgttccattagttatgcaatgtcaacgcgaacaaggtgatactcgtaaagacgatgtagttaaagaagaaattttctggaaacacatcgcaccacattttgacgtgaaattagctattgatgaccgaactcaagtagttgaaatgtggcgccgcatcggtgttgaatgctggcaagtcgcctcgggagatttttaatggctttgcaccatgaaacttgggatattattaattggcttgaagaaaattatgtgaggtaaatatgtttccgacttactctaaaatcgtagaagtagtgtttagccaaattatcgctaataatatgtttgaaaaacttgataacgcagctgaacttcgaatccacgctcaagtgactcatgtattgaacactttgcttccagaccgggtggattctgttgttattcaactgtatcctgggtcagcgcatatcattgtcgtatttggtcttgatgctgaactagttattcaaggcgacattcgctttaaatctcaaaccgcggaattcaaagcgatttaatagtttactttacggtagagttgtgatattatagctctaccaaaacaaatgaggaaattgaaatgagcgaatggtttgaagaagataaggtttatcgctttaaaactgggtataaagatatttttaatgaaacttgcggggctaataaacgaattgcccagtttattgatgaaaattcatttaaagtaaaaattgaccctgcaaagaatgttattagcattaaacgcgaaattgatgactgctggtataaagctattgatgtaatgggcgaatcctataaagatagcccgttattttcaattgcttatatgttagaatattcttttttcgaagaagttcaaaaagatgattctgtcagtaaatttgaaattaaaactgataaagaaattaagtggaaagtagtaggtattactggttgtatgttctatatctatgctcaaactgatacgaaggaagaagctaaaaagaaagctctagaatatcttgaagagtatgaagaaggcccggtaatgattactcaagatgctgaattagtttctgtcaaattagttaaaaatgttgaaagtaaggagctgggatcaacatgctaagtgaaaaaccaattactgttaaagaattccaagaaaaagttaaaatatttgcgcaggaattagtaaataaggtttctgaacgatttcctgaaacatcggttcgtgttattaccgaaactcctcgttcagtattagtaattgtgaatccaggcgatggcgatcaaatatcgcatcttaaactggattttgatggattagttgaagcacaaagggtgtatggcgtactatgatgaatttaactgatataattgataattgtcttgaaaatgatactggtgatcatagagcgcttgattctgaaacagcaaagttcattagaataactttaatgaatgatactctggtgaatagtattcatccttctgtgtatgatgctattattgtgacgaagtatccagttgagcttcacaaaaagatgactggcgcagtttttattgataagaaaaaccgctttaaagatgggcagaatataattagttctgttattaaaagtataactaaacttcgtcacgaaatttatcgtgttgaaactgctaaatctgcttatctggtgattatgaaatgaaagcgagtacagtacttcaaattgcatatttagtatcgcaggaatcaaaatgttgctcctggaaggtaggagcagtaattgaaaagaatggacgtattatttctactgggtataatggttcacccgcagggggtgtgaactgttgtgattatgctgctgagcaaggttggttgttgaataagcctaaacatactatcattaaaggtcataagcctgaatgcgtatcatttggttcaactgatcgttttgtcttggcgaaagaacaccgcagcgctcactctgaatggtcgtctaaaaatgaaattcatgctgaactaaatgcaattttgtttgctgcacgaaatggttcttctattgaaggtgctactatgtatgtaacactttctccttgtccagattgcgcaaaagcgatagctcaatctggtattaaaaagctggtttattgcgaaacatatgataaaaataaacctggctgggatgatattctgcgaaatgcaggtattgaagtgtttaatgttcctaagaaaaacttgaataagttaaactgggaaaatatcaacgaattctgtggtgaataatgaaatttcgtttggtaaagctcacagcaattagttcttattccaacgagaacatttcatttgctgtagagtataagaagtattttttctctaaatggaagcagtattataagtcaaactgggtttgtattgatagaccacatagttggaaatctgatttagaaaaatgccaaaaattactttccactcttaaagaacgtggaacaactcatattaaaactgtaataggtaaataaatgaaactgacgactgaacaaaaagtagcaattcgtgaaattttgaaaactaaattgtccatgggtgtttcaaacgtagtttttgaaaagtctgatggtactattcgtgttatgaaaggtactcgtgatgcagactttatgccaaccatgcaaactggtaaattgacggaatctactaggaaagaatctactgacatgattccagtatttgatgttgaacttggtgcatggcgaggtttttctattgacaaattgatttccgttaatggtatgaaagttgagcatttgctccaatttattggtaaataaatgctttaagaattatttgttattattaattcatctgttaacaaaaaggaaaaacgatgtctgaagtacaacagctaccaattcgtgctgtcggtgaatatgttattttagtttctgaacctgcacaagccggtgatgaagaagttacagaatcaggacttattatcggtaaacgtgttcaaggtgaagttcctgaactgtgtgtagttcactctgtcggtcctgatgttcctgaaggtttctgcgaagttggtgatttgacttctcttccagttggtcaaattcgaaatgttccgcatccttttgtagctctgggtcttaagcagccaaaagaaattaaacaaaaattcgttacttgtcactataaagctattccgtgtctttataagtgatataaataataatatgaattgggtgtcggaataataagttaaccgaacaattctatgtggtagtctacaactgagagatctgtcgaaagaagatgaaattcagaagaacgtgactaccgagttttaatctctaacgagaatttttaaatgattaaacaattacaacacgctcttgaactgcaacgaaacgcatggaataatggtcacgaaaactatggcgcatctattgatgttgaagccgaagctcttgaaatcctgcgttatttcaaacatctgaatcctgctcaaactgcattagctgctgagcttcaggaaaaagatgaacttaaatatgctaagcctttggcttctgctgcgcgaaaagcagttcgtcactttgtggtaacattgaagtaatttattggagattcactgccttagtgtgagctaaatcgaggagccgtcgaactgtctgattaatgatttgcgaatcattatagttttaagaccccggcagttttacggtgtacctcttgaatgtgaatgatgacgggtttatggttatcctggtcgttaaatatccaaaaacctatgttccccttgagggcttgcgcaggcaatgccaataagtcctgcattttcatttaaaagagaatttataatggcaaaacaagctaaagcaaagaaagcagttgaaaagaaagttggtgattctaaacgcgctggctacaagcgtgggtcgaactctcgtatcaatcaaactgttgagaagatcatgcgccgagcacgtgcggttcttcgagatgatgcttctcgttttggtaagcagaaagcataagttaaggactccttcgggagtccttttttattttccaaagattgcataaagttgtttacagtatggttcctttgtgatagtattatcttacacaaacaaaggagaataaaatgaaaacgattaatctgaacgctacagttaaaactaaatgcttcaatggtaaatatgatgaaactatgtggttcttaatggcagttgaaggtgatattattgaagtagaaacaacagaaggtatgggaacagatttcacctttacaattcaagttcataatttctttactggttggatttatgaattgaatacagtaatcgttggaaaaattgaacaaaatgaattaggtgaatggtattatgttacagctcgccaacgtgccgaacgcttaattgagaagatgaaaaaagttggtaaacttgacatgcagcattggaaagtagtaaaataattgtttactttggtacaggacatgatattaacctgtaccgcaattaaacatcttggagaataaaatgaactacattaactttgaacgtaaatatgtttctaatggtattgcaggttctattgatactatttgcctctggaaacatcaaaatggatcagtatgcgaaattgaacagtatatgactcctaattacgtttatatgcgatttgaaaacggtattacagtttcaatcacgatggaaggttccaactttaaaatcgctctggatgatgatttccgtgaacgcgatttagggactcatccttgctggaatggcgttaatcgcaagcttttggttaaaacttggattcgtcatattctgagtaacagagctaaacctgagcatcttgaagcaatctttgatgtagttcttaacgaatttgatatttaaaataaatgaggggctttggccccttactgaggaaaatgttatgtttatgactacttattttgatacccgcaaaaatttctgtgaagttgttttctcaaaggcacctaaagaccttcctgcacatttgcaacctactagcgaatcgattaaaaactacgttgatgtggtttgtcctttagagtttcgtactgtaaatgggcgcgatactttagctatcactaaactcaatcgtgaaattgacattgacccttcaattgcacgtgaaattaatagttctgatattaatggcggtaatgttaaatcgcacggttttcagatgaggttttaatgaaattctttttaggtcaaactgttgaattaaagggagttggtatacctggattaatttctaaggttctaccttcgtttaaatggagtggtattcaaataaaagaggcttatattgtttcttgggtagatggaaatgaagaccttcgtatgggcgatgaattatctcctatctacggattaaaggaattagtatgaatataattaataagatttttggaattcagtacattaaggtcacatataaagtaacagataaaaatccgtatactgatgaacacgaagaaccgcaagttaagtctattatattagaaaaaggcagtgactggccagttgaatttcgtctaccaaactgtggtcattgggctgatgttgaaattataagcattgaaaatgtctgagttagagattagaagtaattttaggtggccatcatgtgcattaagtaatttcgcccattggcctttcgttatggatggtattcaatttggaggtcttgaaggattcctccaaggatgcaaagtgaaaaatgttgaacaacaacgtcgtatatttggtttatccgggcttgccgcccaacaagctggacgagcttatgctagagctcaggaccgtggcacgttgttctggcttggagttccattttcaagatactctccagcgtggaaagaattatacacaaatgcatattttgaagcagcgatccaaaacaggggctttcgtgatgcattacaagcctcgaaaggaaaagttttgaagcacagcatggctagtggtctaacaaaagatgatacaatactaaccgaagctgaatttattgatgtgttaaatctattaagagactctctatgaagccaactattttgactgatattgatggagtatgtttaagctggcaatcaggccttccttattttgcccagaaatataatcttccgttagaacatattttaaaaatgatccaagatgagaaatttatttctccaggtaaactctttaattgtgacgaagaacttggcgttaagctaattgaaaaatacaatcgttcggattttattcgatacttgtctccatataaagatgccctatgtgtaattaacaaattaaaagaagattataattttgtagctgttacagcattgggtgattctattgacgctctgctgaatcgtcaatttaatttgaatgctctttttcctggtgccttctcagaagtactgatgtgtggtcatgattcttcaaaagaagagttgttcaaaaaggcaaaagaaaaatataacgtaatttgttatattgacgatctcggtcaccactgtgatcacgcgagtgaaatattaagtgttcctgtttattggatggctcgaggggaacgtgacagtattccaaaaactgctcagcgagtttatacatggaacgatgtagagaataagcttttttcaccaaaggaaaataaagaaagttttgatagtgaaaaagctataaaagatgtaattgaaaagatgattaaaaacgattcttttccttggaacactacctggagaactcctggatttaatccttataatcatctatatcatccatatcagacgcatccgtttcagacatggaactatattaaacccggcggtatagagtatttgtataatagacctacttgtggtgataatattttccaaggagcattctaatgtttgttgttcacactatttatgaaaatgaaggtaatactacacgtgattacggtcacgtaaatcaatttttagatgcaatccagaattccgatctcaaaaagacgaacgaatttttaaaaaatgcgtagagcaaggtttcatttatatcaagcactggatgcaaggaaataaagttagaaccacatatcataagtctttgactgagcttaatgatgaattgatttataatagagctgtaaaccaaactctgaaggatgaataatgattcttaaaattctgaatgaaatagcatctattggttcaactaagcagaagcaagcaattcttgaaaagaataaagataatgaattgcttaaacgagtatatcgtctgacttattctcgtgggttgcagtattatatcaagaaatggcctaaacctggtattactacccagagttttggaatgttgactcttaccgatatgcttgacttcattgaattcacattagctactcggaaattgactggaaatgcggcaattgaggaattaactggatatatcaccgatggtaaaaaagatgatgttgaagttttgcgtcgggtgatgatgcgagaccttgaatgcggtgcttcagtatctattgcgaacaaagtttggccaggtttaattcctgaacaacctcaaatgcttgcaagttcttatgatgaaaaaggcattaataagaatatcaaatttccagcctttgcccagttaaaagctgatggagctcggtgttttgccgaagtcagaggtgatgaattagatgatgttcgtcttttatcacgagccggtaatgaatatctaggattagatcttcttaaggaagaattaatcaaaatgaccgctgaagcccgtcagattcatccagaaggcgtgttaattgatggcgaattggtataccatgagcaagttaaaaaggagccagaaggcctagattttctttttgatgcttatcctgaaattagtaaagccaaagaattcgccgaagtagctgaatcacgtactacttctaatggaatcgctaataaatctttaaagggaaccatttctgaaaaagaagctcaatgcatgaagtttcaggtctgggattatgttccattggtagaaatatatggtcttccggcgtttcgtttaaaatatgatgtacgtttttctaaactagaacaaatgacatcaggatatgataaagtaattttaattgaaaaccaggtagtaaataacctagacgaagccaaggtaatttataaaaagtatattgaccaaggtcttgaaggtattattctcaaaaacgttgatgggttatgggaaaatgcccgttcaaaaaatctttataaatttaaagaagtaattgatgttgatttaaaaattgtaggaatttatcctcaccgtaaagaccctactaaagcaggtggatttattcttgagtcagagtgtggaaaaattaaggtaaatgctggttcaggcttaaaagataaagccggtgtaaaatcgcatgaacttgaccgtactcgcattatggaaaaccaaaattattatattggaaaaattctagagtgcgaatgcaacggttggttaaaatctgatggccgcactgattacgttaaattatttcttccgattgcgattcgtttacgcgaagataaaactaaagctaatacatttgaggatgtatttggtgattttcatgaggtaactggtctatgaaagcttacttagaaacaattgtcattgctcaaaaagaaggtggagatgtttctacttctgtatcacaagtcattctcgaatttgtagatgcatatgcttataataaattcacagaaacatttgatgcctatgaaaaaggtccaaagtttgaaatatatcgtactctcttaccgttagattattaaaggccttcgggcctttaattttataaatagaataaacactagagaggatatgatggaactaattacagaattatttgacgaagatactactcttccgattacaaacttaaatccaaagaagaaaataccgcaaattttttcagttcatgttgatgatgcaattgaacaaccaggctttcgtttatgtacctatacatctggaggtgatactaatcgcgatttaaaaatgggcgataaaatgatgcatattgttccttttacattaactgctaaaggttcaattgctaaattaaaaggtcttggtccaagcccaattaattatatcaattcggtttttactgttgcaatgcaaacaatgcgtcagtataaaattgatgcttgtatgcttcgtattcttaagtctaaaaccgctggtcaagctcgacaaattcaagttattgctgatagacttatccgtagtcgttcaggtggcagatacgtccttcttaaggaactctgggattatgataaaaagtatgcatatattcttatacatcgcaaaaatgtatcactagaagacattccaggagttccggaaattagtaccgagctctttactaaagttgaatcgaaggtcggtgatgtttatatcaataaagatactggagctcaagtaactaaaaatgaggcaattgcagcatctattgcacaagaaaatgataaacgttctgaccaagctgtaatcgttaaagttaaaatttcacgtagagcaattgcacaaagtcagtcgttggaatcttctagatttgaaagtgaattattccagaagtatgaatctacagcagctaattttaataaaccagctactgcacctttaattcccgaagcagaagaaatgaaaattggaattaattcattagcttctaaaacaaaggcagcaaaaattattgctgaaggaacggcagatgaacttcattatgactataaattcttttcaaaaagtgaggttaatgaagtttctgaaaagattaaagatgtaattcttaatgcgattaaaaatgaaccaactacttcaataaaatgtttagagaaatacgcagcagccgttaatcaattctttgaagaatataaagataattggcttgataaacataataaaacccgtaaaggacagccagatgaagtctgggaagaaataactaaaaattcctggaacgcagcaaaaactaaattcctcaaacgaatgatttatagcttttctggaattggtgcaggtccaatgattgatattactattgcccgtgatggttctaaatatactccatcgcaaaagcgtggcattagagaatattgcggttcaggatatactgacatcaataatcttcttttaggccgctacaatccagaacgatatgatgtaatgagtgaaaaagaaattgaatctgctataaataacttagattcagcttttgaaaatggtgaccgtataccagaaggcattacagtttatcgtgctcaaagtatgactgctcctatatatgaagcgttagttaaaaataaagtgttctacttcagaaattttgtatctacttctttaactcctatcatttttggacgttttggaatcacacatgctggtattggtcttttagaaccagaagctcgcaatgaattaacagttgataaaaatgaagaaggaataactattaatccaaacgaaataagagcgtataaagaaaatcctgaatacgttaaagttcaaataggatgggcaattgatggagctcataaagttaatgttgtatatccaggaagtctcggaatagcaacagaagctgaagttattctaccacgcggattgatggtcaaagttaataaaataactgatgcttctaataatgatggaacaacatctaataatacaaaactcattcaagctgaagttatgactacggaagaactcaccgaatcggtcatttatgacggtgaccgtctaatggaaaccggcgaagtagttgcaatgacaggtgatattgaaatagaagacagagttgactttgcatcatttgtttcatcaaatgttaaacagaaagcagaatcatctctcggaattattgcgtcttgcatagatattacaaacatgccttacaagttcgttcaaggataaatcatggaacttattacagaattatttgacggcgcttcggcgccggttgttaacttaaatcctaagcataaaatacctcaaatttttgctattcaagccggtgaagaaagcgtgcttcctggatttagattttgtacatacacctctggcggtgatacaaataaaaacgttaagccaggcgataaaatgatgcatatcgtaatgataggtgttaatgagaaactatcattagttaaacttaaaaacttgggtggaaatccaattggtgtcattaatgcggtttttgatactgctcttcagacaatgaaacaatacaaaattgacgcatgcttattccgcgtactaaagagtaaaacaaatggtgcagctcgtcaaatgcaagttattgccgaccgtttagtacgtactaaaggagcaggtcgatatgttcttttaaaggaaatctgggattacgataaaaagtacgcatatattatggtttaccgtaaaaatgctaatttagaagacattccaggtgtacctcctatttcaactgagttattcacaaaagttgaatcaaaggttggtgatgtttatgtagatgttaaaacaggtaatgctgttcctaaagctgttgctgttgctgcttctattgctttagaaaacgataagcgcacggatcaagctgttattcagaaaactaaaattagtcgtcggttagcagcacaagctcaatattctactgtcgatgcttcacttcagggtgatagcttcgctgctaagaaatatcaagagtttgaatctaaagttccggtatataaagcagaaggaccaatgaactctggcgttattcaggttggttcaaacttcagcaaaggagctatcggtggtatgagaagtgcttcccgttttaaatctagtgattatgaattagaaagcttccgaaatcatattgcattggctcatgcgcgtttacgtgatccatctatcaagttacagagcgatataacatatcaaggttctcaagaatatttaaagaataaagaattttttgattataaaactgataaaattttaagcgatcttgctgacattaatatttctaatagctttgatgttattaagaaaattgtcaatgatttagttaaaggttctaaagccacaccagatgaaaaggtagctattgttcaatttgtcatgaatggcgtttataaattgattaatgagtctgcttctcaagcgtatgaatatgcaagtactgaagtaactccaaaaggattaactcaagctgagtctgatgtaattgaagattattgtgcagattcatatgttgaaatgaactcgttccttttaggtaaaccggattctacccgtgaagaatatatggaacgagctattaaacacatcgagacaatggattctgcctttgccaaaggatcagttcttcctccaggaactacgctttaccgtggccaagaagttacctttaaaactttacgtcataatattgaaaataaaatgttctatttcaagaacttcgtatccacatcgcttaaaccaaatatcttcggtgagtatggtaaaaactatatggccctagatgattccagtgcagtattttctggtgaaggagaaggttcagttgacgcagaagatttgatgcatatgggcagtcactctgcttatgcgaatgaagatgctgaaactagcgtaggtatggtaattaaaggagctgagcgaatcaaagttatcgttccgggtcatttatcaggatttccatcagaagctgaagttattttaccacgtggaattttgctgaagattaataaagtgagtacgtacatgatgaaagaaactgcttataacaagtatctaatcgaaggcacaatcgttcctccttctgaacaattagaagaatcggtatatgatggcgaccatctaatggaaactggtgaagttcgtccaatgactggatttaatcaattccttgtagaagaatcaaaagaagaggaaaacgaagtttctcaaatcttggcttctttggttaatattaacggaatgtctaaaaagttcaaaatgtagtttacaagtccctcgtgttgtgttatagtaaacttactgacataacatgaggaacacaaaatgaaatcttctttgcgctttttaggtcaagaacttgtagttgaaggcgttattcctgctgataacgcctttaatgaagcagtttatgatgaatttatcaaaatttttggaacagataaaaagttcggaatttttccttctgaaaatttttcaaagccagaacagactgaaagcattttccaaggtgtagtaacaggcaaatttgagtcagaagctccggtaaaaattgaagtttatattgaagacagtttagttgcttcagttgctgcttttatttcattccgtaaataaaaacatggggaccgaaaggtccccattgttatattgctcctaatattttactttgcgagttgacaattcccgtcatagtattaatgtttgaaatgcttccagcagttcctcctaatctactaagtcgtgaaagcgaattagatagtccagtaacgcctccgctatttccgagaacgctttgaataccgtttatagcagcagattcaagccattcaagcgcagcttgtctatcaactgctccagcctgcatgactctatacgcaaaagtaacatcaaatgtagttatttggttatctccatcatatgataactcaggagcgctcactgacactggaatgcatccggtgaacatcactgcagtatgaggcaatccattacgagaatgaagattaacttgaatatctgcctcgacatcctgtggcaaagcacgcagtccagttactgggtcttgaacagcgttaacccagtcttgcatcgcacgatagttacaagcttctgaatccattctaaatgaaataaccaaagggtccaattctctcccagttatacgaatattaggagagttataattccagtcagtttcataggataatctattctctggcatttttacagagtatatcatcaatccagatgaattatatgccatattaaagaagtcaattaaatatgtaccaactgtaaatgagcccaataaactttgaactgtacgttgactcatggcaccaataagatatttactaacccctgattttcttatcagtttttgtgtgccagcagtaattagcgtggtaattccctgattaatatcgccttgagacaatcctaaccagtctgaatttagacccaagttattataagaaaagttgctaattgaacttatcaacgaagagcttttagttgatggagttgtcgcaaaaacgcagctaaacatattattacgttggaaatctgcgtttattgcttgattattaaattcctctaaagaatacattaaaaagtccccgcatataaagaagcacggtttaacgtgataatttctctcatagtaatctcaagggtaaatgtactagggaggtttggagcaatagctaatccgttaaagttaccattaggtgttttatcaaatctgatactctgtatttgacatggaccaaatatttccgtttttccatcaaacttagatgttgcaccaaagtttttcaccatccaaattgtcgggtttgaaactactagaacgttagttaaactcgatgtcattttctcaaatagtgttttatttttagctgcgtcttccggagataaaggttcaattaacgtagaacgataccaatcatctaaatacccctttatttcagcagcatattgagatttacccgtttcaccataagaaaaatagttaaaatattgatagatattaataatagccattaaatcttctgttgaacgtggagtcaaatcccatgtaaacactttagttctattttcagcaccaccatacatacttctggctgtcgtataaatctgttcattattatcagccattataccttgtgttatactttccagcgccccaaatactgcggttgaagcaatattacttagcacaccagtagcagtacctccgcctctactgataaggctttcttgaacatcattaaatctatgtgatgatgtatcaacatcagatttagatctcggtaaaagaatgtttgcgataggagctttacttattgttcctgaattattatttgatattaatccatttgatagttttgatactgtactactaatagtgtttctggctgtacgtaaaatactcgaagatgaagaagagtagttagatctcatcgatctaagacttccagaatccctagatgacatattgtatgcagtaaataataatccattcttatatagatctgtcacctggaagtcccctgtagtgtcattaccactagcacgcccagttggaaactgggctgtgtatgttttagttcctacttctgatttagtactctgcccggctgaaattttctcaccggactttttaattaaatcagcagttatttctttaacaattgccatattattccttaattaaccccagtcgcatcaaatacaccaggagcagttgtgcttgtgacaggtgtcatattatgaacgacagtatttttcttaataacattattagtattattgatcgaaggagatgcttgttgaacaggagcttgttgtgctttgttcttttctattacctggacttgttttgcttctggtgatttagcagaagtttcaggtttggcagtaggctgatttttcttgagctcttgataagtagcatcaattttagaaaatctagcagcaagttcttttttaactgccggtgaattatttaaatcagggtcatccatccgttttttaaggtcttcataggcagattcaactgatttaactgttgagtctttactcatatcagctgaattagcgtattcatcaaaacgattcatagcagcacgagcttcattagctttcattaaagcaattttagcttcctccggagaaagttgctttaatttttcttcttcctctgccctctcttcatcagtcgttagtgcttctttattatcaacgccacgaatccagttagatgcacgagttttccagttcgcaattttgtctaacccttttgctatcggaccaagttctccattcattcttttatattgatagtttgcaactttttcttggtcttctttgttaagagaagcatttgtagtattttggaaattttctagtgctcttccttctacttcatcagcagtatccttcatgccaggaatgactcgaagaattgcagcagataatttagccattccaagttgaataagttcacctaaattataaagaacctttccaagtccttctacaatagctaccgtcaaaccgccccaatctcccgcttcccagaattttttaatttcatcaatagaactaaagatgctttgtaataaaggaccccatgttccggtttcgctagagaatttagtaaagtctgtactaaacaaatcccaagcctgcgaaaatttatctgaccaatatttaaaatgaaccatcaacaggtctattccgacaacaacagccaatatcattgcagtcattttagcagcttcaatagcagcgctgacggtatacttaaataacatgcttgatattttatcagtaattgaaatggatttcttaaatccaaaatcaacagtctttgttaatttatctaaagcttgagataattttaagttaaatgcgtcttttttctgtttttcttctggcgattcttgtttgggctcaactggctgaggggtagggaaaaaatcagcatcaggatcattattaactgcttcaggagccggtaataaaggacccacagattcagctgtatcatcctcaacaactttaacaggaatagcgctttcaaccgtggctaaactagttcctgtttgttgaattccggctgtctgaattttttgctctagtaaacttgttaatttatctaatttgctcccgagtgattcaccgatttctttattaatattgttgccaatttcaacagtttcagcaattaactcggaaccagcagtagtatcactcactgcgttttctacgttgtcaattgctccaattatttcattcgatttttcttcgacagtttgagcaattaattcagaagcagcttgagcatcatccaatttcgtagatatatcgttaagtccagataaagtattggaagcggatttagccgcttcctgtgttggtttattatctgaaataacttttctacgcatcgtttgcatttcttgtggctttttcattcaaataatccaataatattgccaattccagttattggaccattagggccaggaattgctaaagttgtaaaaatgtcatttgcccattttaaaacgaatgctggcatctcaagaaaattaatttctttaacttcatcattgaccttaagcaagcatttggataacatatcgctcacagttaaaaattgttcaaattttccaggaggtctaaaataaaatgtatttccttggtattgaaattctaatctttggcacacataaacatcattaatgtcataagtataaccatctatttctttacgagatttaatctttccattaaattccaataaatgaatagaaacgaaatcaacttctgccggtgataaattcggacaaatagaatcaataagaagttttaaattttcatcaggacctttaacatcttttaaaatgttataatgtttaagacccattttaggaatagaaacttctttattgcttattggaagaactactttcttcagtggtagtatcagatttaaattcatttttaaccttaactgggtctattgtttccagtttcgttgcattagtgaacatatatagatgagttactgaattattattggataattcatggatgacttcatcaacgtaaaattctgttttaaattggtttttactatcattaaaaataattttaacgccaggtgtcaagttaaaattaccgacagtagaacatttagcatagccatcgtattgcgccatagtttgaagacgaatagcttcttcatatccattcctataagtcatttcagaataagcacctgaccttgacactacaatagagttttcaccttttcctgtagtaatcattggcaatgaagaatctaaaaatgaatgcgcatagatagtagcatttttcattgggtcacgtttgtgaggattcgatttagtcaaccaaacgaaatcatatgctaatggatattttaattcttggatgaattgacctattaaagatggctcaccgacaatcattgggtatggttcttgatttatcatcatatcatagtccatcatgttaactcccatgatgtcttgccatacaaatacaaatttgtcacttcctacagctagagcaacttctctgacatatgacaaatagttttcaaatgtactagtccacggaatatcaggaacataagcatttatagcatttattgctggagtcaatagcgtacggtcttgataaatgacgccaagcatttcctttatagattcacctgcatcagggaaaaacggtctgccaaatttaagattttctatagaatgaatagttcccaattcaatagcaatgatgttatcaccctttgaatctactgacacggaaaaatgcttacatccataaattcttgttttaacattattaatatcatttgcattagctacagaaatctgaattatttcatttccatccatttttgtatggatgtttttagaatcataaaactgcagcattccttcatttcggccataaagagaatcccgcatagttaacgtggtaatagtagcagctaattcaacaaatctattattactccaagcgtcgtaactatcaaacaatttaacgctgagatttggatatcctgggcgttgcaacatactcattattgtttatccttctcaatcagttttaatacgaatccgcgctcggcaggaatcattttcattattgaatttaagctataattactttttacaagtgtgtgattaatttgataaaaagtaaatatttcatctgggttaactaatagcttaaacacatctactatatcagtgtatttttttacatacttattacaacacgacatatgcaatgttaaattaataggattcattgcatcgagaattttttctaatgtttctatctcgattgcatcaacaagttctatttgacttgattcgctaatttccttccaatcataccatgtttcatctacttgaacagaatgaatattttcagtaatcatctttgctttattttcataaaactcagaaggaaactttaatttaattttaacattagctacatcaaaaacaggttcctttaattctttttgatatatttcaaatggaactgtcttttcttttttacattttggacatacaaatgtgaccggtactttagttttacctattgaccctacaaatacctgcaaaaatataaatggttgccaagtcttcggatagtctccaaaataatcggcaattaagtcagcaattatttctttttgttcttgtggtgaccgatgttctatatcgtttcgaactaacaaaaaatctcgataatcttctaccgtaaatggtttaaaacgatgaacaccatctggtaatttacaacgaataatgtttgccatagatgctccttttattctatttataaatatgataaataaaggagctaaatatgtatgaatacaaatttgatgtgagagttggttctaaaataatcaactgtcgcgcatttactcttaaagaatatctagaacttattactgctaaaaagaacggttcagtagaagagatcgttaaaaagctaattaaagattgtacaaatgcaaaagatttaaaccgccaagaatcagaactcttgttgattcatttatgggcacattctcttggggaagttaatcacgaaaactcctggaagtgcacctgtggaactgaaataccaacccatataaatctattacatacacaaatagatgcaccagaagacctctggtatacactgggtgacatcaaaattaagttccattaccctaaaatttttgatgataaaaatatagcccacatgatagtatcatgcatagaaacgattcatgctaacggggaaagcattccaattgaagacttgaatgaaaaagagttggaagatttatattctatcatcacagagtcagatattgcagctataaaagatatgcttttaaagcctactgtttatttggctgttccaattaagtgtccagagtgtggaaaaacccatgctcacgtaataagaggcctcaaagagttctttgagttactataatggcaaatattaataagctttattctgacattgacccggaaatgaaaatggattggaacaaagatgtttccagatcacttggattaaggtcaattaaaaacagtcttttgggaattattacaacaagaaaaggttcaagaccgtttgaccctgaatttggatgtgatttatcagaccagctttttgaaaatatgactcctcttactgctgacacagttgagcgcaatatcgaaagcgcagtaagaaactatgagccacgtattgataaattatcagttaatgtgataccagtttatgacgattatactctgatagtagaaatacgcttttcggtcatcgataaccctgatgatattgagcagataaaactgcaattggcttccagtaatagagtataatgcttcacgtataaacgtggtataatgaatctaagtccatccaataacaattgaatagagaacaatatgagattagaagatcttcaagaagaattgaagaaagatgtgtttatagattcgactaaattacagtatgaagcagctaataatgtgatgttatatagtaaatggcttaataagcattcaagtattaaaaaggaaatgcttagaattgacgcacagaaaaaagttgctcttaaagctagattagactactactcgggacgaggagatggtgatgaatttagtatggatcgttacgagaaatcagaaatgaagacagttctatcagctgataaggatgttttaaaggttgatacttcattacagtattggggaattttattagatttctgtagcggagctcttgatgctatcaaatcacgtggatttgctattaagcatattcaagacatgcgagcatttgaggctggaaaataatgagatatagcattgatgatgcttttaattatgaagaagaatttgaaacggaaattcaattcttaatgaaaaagcataatcttaagcgtcaggatattcgtatcctagccgaccacccgtgtggtgaagatgtcctttatattaaaggaaaatttgccggatatcttgatgaatatttttattctaaagatatgggcattgatatgcatatgagagatatggggtaaatatgacagattataaagaagtatttcgactattagcagagatggaagcttgcttaatccgtgtacaagaaatgcggattaaaatgggtttataaatattactatattcaaaaggagacaatcatgtcagataagatttgtgttgtctgtaaaactccaatcgattctgcattggttgttgaaacagacaaaggtcctgtacatcctgggccttgctataattacattaaagaactaccagtttcagaaagttcggaagaacaattaaatgaaacacaacttttgctatagtgtgacctttagtctatagttttggcccttcctttttggttgggccttttttaatttaaaagctttcttctacttcatcgtctgaatcttctaattcagctctttttcctgccaaagcatctctcacagagatgtcatcagtatcttttaattcagtttctttgactcttttcttgtaataagcttcaagttcttctaaaccttctaatgtttgacaagaggcaattttacccataaattcatcaatagaagcttcataaagaaattgtttaaattctagtaacatctttttctccaaagggccgaagcccttataaattaactgttttcattacgtaattaaatttttcatctgcgtagcgctgaatacgatcaatgccgtgttttaaaagatagttcaaatgaacgtatttctttttcgtattagcagattttggcttaacaccgcaatcatctatgaggtcccagaccgttgcgattgttttagaaccatgcttacgtaatacgcgacctattgtttgcaatacaataattttagatttaacaccgtgcgctaaaacaacgtgatgcagatttttaactgaaataccagtagaaaatacaccataactagctactataattattcctttaccgttttcagctaaggttttcattacattgcgtgtttcagtatcaacttcccctgatacgtaataaactttatcgtattcatttttaattaaatcgaaaatagctttaccgtgcgatacgtgtttaaacatgacaaaagcgttttcatctttttgtgcaagcttaatagctaatttagcgatccatttatttcttttactaagcccagtaataatttttatttcttcttggtaagtttttccctttaatttagtagtgaactcatcgggatagcgaagaaaaatactattaatttttaactcagttacttgtccatcttccattaatttagaggtcgttactggcttaaatatttcaccgaacattccaacatactgcatgatattggctttgccatcacgtaatgaaccagacaaaccgaatttgaacatgcagttatttaaacctgatatgatagatgaaatactttttcctgtagcaagatgacattcatcattcatcatcattccaaactgtgagaaccattctttcggttgttttactacagtttgccatgtaccaacaacgaccggtgcatcatttttatatttatcatcttttgatgctccaccaccgattttctttatcattgcatgactgaataaacgatagtcaacaaagtcatcagccatctgagttgtcagagcagttgttggaacaataataagaattttgccttcataattttccaaataataccgagcaagcaaagcttgaattaaagatttacctgcggatgttggaagattaagaattctacgacgattaactaatccttcgaacactgcatctttttgataccaatgcggttcaattcttttatttcctgaatagatttctaatttagaaagccattcatcaaaatcttttcttgataattcttctttttcgttaatctgtgggtcaatccaggctttatagccaaagttatcgcagaactttttaatttgcccgactaagccgaatggaagaagacgattataatctaaaagacggattcgtccatcccagttgccatatctgaagcgagggttaaatctatatccatcggcctcaaacgaaaagaaatctcttaattcgtggaacgtgctctcttcacaatcgatgcgtacatgactgaagtcgtgaaaatgtactttaatatccataattatgccttactaaatttgcctttagaatctcttttcatgagacgacctttaataaatccgtcgggaataataccgtctggttgtattaatttatttattgcgccattattgacccaaaaagttcctgtggtagtcggtttgactttacatccttttctggactttctattaggatgaaccgtcccttttacaaatccttctggaacaagttctccaggtttaataaaaatatttttagttccattagtgtaacaagttgtacctaataccgtgcccggtgagttttcaaatctcttagcggaagattctttcatctttgctataacctctgtagtcataacaattccaccaattccaccaggtttcatattataataatttttgctttttattatttcaggagttataatttcttcttcatacatgtacgcttcttcggaagttttaaactcttttagtattgttctagagaaattgttttcaccatatttctttatagcctgctgaattgccttaccggaaccaaggtaaccatcattcaagtcatcagtagagtgttttcctatatactttttaccatttattagatttgttgtttcatatacaaagtggtacatactattttccgagtaataaatatatctatatttatactgaggaaatattatgatagataaagattatattgcagagctgaaggctcttgatgataataaagaagctaaagctaaattagctgaatatgctgaacagtttggtataaaggtcaaaaagaataaatcttttgataatatcgttaatgatattgaagaagctctccagaagctcgctagtgaacctatgccagagactgatgggttatctattaaagacttaattgatgctgctgatgccgcagacggattaaaatatgacgatgaagaagtcaatccagaggcagcacttctgattgattctccggttaaatctgacattaaaattgaagtagtagaaacggataaaattcctgaaaataccactgttttaattgaagatactccttttgttgaagaaaaattcgaacaggctgtagctgagattattgaatctgaaaagccgtctgtatttactcttccggaaaactttagtccgaatcttcagctgattggaaaaaatccaggattctgcactgttccttggtggatttatcaatggattgctgaaaccccagattggaaatctcacccaactagttttgaacatgcgtcggcacaccaaactttatttagcttaatttactacattaatcgtgacggatcagttctaattcgtgaaacacgtaattcttctttcgtaacattaaaataaggataacttatggcttttacagttgatataactcctaaaacacctactggagttatagatcagactcagcagtttactgctacacccagtggtcaaactggagatggacctattacatatgcttggactgtagacgacgctccacaggaagaaacgtcagcaacttttagttatgtactaaaaggacctgccggtcaaaagactattaaagtagttgcaaccaatcaagttgcagaatctgaacctgaaacagctgaaattagtacaactatcacagttcaaaataagacacaaacaactactttggcagtaactcctggtagccctgatgctggagtaattggaaccccagttcaatttactgctgccttggtttctcaacctgatggagcgtctgctacatataaatggtatgtagatgattctcaaattggtggagaaactaactctacatttaactatactccaactacaagtggagtaaaaagaattaaatgtgtagcgcaagtaactgcagaaaattacaatgaaaaggaagttacttctaatgaagtatcattgacagttaataagaagacaatgaatccacaggttacattgactcctccttctattaacgttcagcaagatgcttcggctacatttacggctaatgttactggagcacctgaagcagcacaaatcgaatattcatggaagaaagattcttctcctgtagaagggtcaactaacgtatacaccgttgacacctcatctattggaagtcaaactattgaagttactgcaaccgttacagcaaccgactatgatagtaaaacagttaaagcaacaggccaagttcaagtgactgataaagttgctccggaaccagaaggtgaattaccttatgttcatcctcttccacatcgtagctcagcttatatctggtgcggttggtgggttatggatgaaatccaaaaaatgactgaagaaggtaaagattggaaaactgaagatccagatagtaaatactacttgcatcgttacactcttcagaagatgatgaaagactatccagaagttgatgttcaagaatcgcgtaatggatacatcattcataaaactgctttagaaactggtatcatctatacctatccataatctcaggggcttcggcccctttcttcattttgaaagcacacaaaccacaatcagaaaacgatgtatataatggcaccaactcgataacatgagattgattatgagaactgaggttgtggtgtttacactctatgagtctggaaagtcattcattgaaattgctcgtgaattgaacttacaggcaaaggaagtggctgtattatgggctcgagctatgactgctaagaataaatttgagactcgagaaaaagttgtctatagaaaaagacatattaataagaaggtgaaaaatggaacagtatgatctttatgaaaatgaatcttttgctaatcaattacgcgaaaaagcacttaaaagcaaacagtttaagctagagtgttttattaaagatttttcggaacttgctaataaagcagctgaacaaggtaaaacatattttagttattattgcactgctcgcgataaattgattactgaagaaattggtgattggctgagaaaagaaggatttagctttaaagtcaatagtgatcagcgtgatggtgattggttagaaattacattttgaggattaattatgtttaaaaagtatagcagtcttgaaaatcattataattctaaattcattgaaaaactttacagtttaggattgactggcggcgaatgggtagctcgtgaaaagattcacggtacaaacttttcattgattattgagcgtgataaagcgacttgcgctaaacgtactggaccgattcttcctgctgaagatttctttgggtatgaaattattctaaagaattacgctgattccattaaagcagtacaagatattatggaaacttcagcggttgtatcttatcaagtttttggcgaattcgctggacctggcattcagaagaatgtcgattatggcgataaagatttttatgtatttgacattattgttactacagaaagtggtgatgtgacttatgtcgatgattatatgatggaatcattctgcaatacatttaaatttaaaatggctccacttttaggtcgcggtaaatttgaagaacttattaaattgccaaatgatttagattctgtagtccaggattataattttacagtagaccatgctggattagttgatgcaaataaatgcgtttggaatgccgaagcaaaaggcgaagtatttactgctgaaggatatgtattgaaaccttgttatccttcttggatgcctaatggcaatcgtgtagctattaaatgcaagaactctaaatttagcgaaaagaaaaagtctgataagcctattaaagctaaagttgaactgtcagaagctgataacaaattggtgggaattttagcttgttacgttacactgaatcgtgtgaataatgttatttctaaaattggtgaaattggtccgaaggattttggaaaggtgatgggactaactgttcaagatattttggaagaaacttctcgtgaaggtattactctaactcaagcggataatccttctttgattaagaaggaattagttaaaatggtacaagatgtacttcgtccggcttggattgaattggtaagttaaataaaaagggacctttcggtccctttgttttattcatcaatgataatttttggtagcttaacacctaataaaacagacaaatctgaacgacccgccattttatccatgtctccaccatcaattactcttgcttctttttcatcttttgctacagtgtaaggatttgcagataaagcatatctaactaataaaccgatagatggctgcaaactttctggatcaactacaactttaaatgcacctacatgttcagggtcatctaagtcaagaccttctgtatacggagcatagaaaattgatccaacaatttctttttcaccaatattttctactacgccaacgattacataatctaatggactgttggtatcgcaataaagcggtaaaccattagctaagaacccgtaggcattttgtgaaagatatttgtcatcttctggtttatgttttaaccaacctgatgcagcaagaatcgcagcggcacgagctgaagcaacgcagaacgttgctgtataagttgattctttttggatatgcgaaaccatttcgcacaccattcgatataatgaacgaccagcttcaggtgcagatgcataactcaaatcaatgaatccagtatcagtaattcctgtaactttatagcgttttgacactgtaatcaaagactgtagaatatctttattgatttcatccgccatttcagttgcaagcaaatcttccaagaaattaggagcatcgaatccatttgcttctaaatcttgtgctaattcaactgtgatgccagttttaagtttacgagatttaactgcggtttgccatttattaatctggaatctagcatcagcaatttcgctatcagagctttcaaatttgctcgttgacgctgcatcagaaaatagacgaacctttaaaagaacaattgcaatctgaagagctaattctaaatcgctttcttcaatggtagcaaatggtgtatcttctaatactttataaacgatattattatatttgaataaatcgcctttattgagagttaatttagactcttctgttaattctgtgatttgttctcggtctacatatccagcttcgccagcgtaagtagcaccagttttaaacgtaaattcgttatctgggttaaggtatttaataccataaaaagcagcaacaggttgattagttctttgcgttgctacaatgtcagaatatattaatttagtggtagcgcgagtcaaagcaacgagatttgggcgaccgattgagttgctattcgttgtggttgattcgcgcagaagttcgttgattttagccattgcgctttccttttggtttatatgatttatttataccataaaaacaactaaagggacccgaaggtcccttaaatcgtcaaagattagatacctttaacatatacacggcggaagtaagcgtttttaccaaggctgttcagaatagaaggcataccgctctggatgcgagaagccggagcctgagcagcggattctgcaaatgggttgataccgataccgtaacgagttttgaatcccattactggttggaagttcttcggatcggaaccacgcagcggagtcagagctacatatggagcgtagtaaataccagcatccatttcgttcgggcctttataacctacagtgaaataatcctgtttagcatactggtcgatatatacacggtatttaccacccagaacaccagcaaatactgacttggtagtatcagtgttaaagccggtagccagaccctgtgcagcataagaaatgccagtatcaactgaagccagaacgttaactacgttacgggaagcgataatgaagttaccttcaccacgaccggtctgacgagcaatttcaactgcttctttgtcaatctggaacaacagagctttaaaggattcacccgcccagcgagcaccacgaatatcaattggatcctggaagtcaaatacaccagctttagaacccggagtcagggtcataccagatttaccaacctgagctgagtagttaatccaatcaacaacttcacggttgatttccaacatgatttcggtagccagaataccagacagttcagcatcagcatccataccgtgaacagcgcggaggtcttgtgctaattcgatagagtaagcagctttcagctgacgagatttagcttcgataacttgtttatcgatacggaagcccatttcattccatgggttatcggtggaaccgttgaaactttcctgaagttcagcgatagaagtagccataccttcagcgatttctaccagtgcaccagcttccatttgtttcttaatttcagcatctaatttagctgcatcatctgcagtagaactaattgttacttgagcagaagcttgcagatacacagtaccagtgtcctggaagaagtgagtatagatatcacctactgtggtttgtgtgctagcagccagagctgtgaatttcttagcagcaccctgaccagagaacattgcatctggaccatacattgggtggaatgcttctttagcgccggcagcgattgggtctttaccatatactgcgcgcagtgcgaatacctgaccagttgggctgttcatcggctgaacaccgcaaatatcgaaagcaatcaggttaggaatagcacgacgtaccatacccataacagctgggccaatctgagttactgcgccagaagtctgaccagcagcgatgttagtagcgttgtaaccgtggtcaccaccgatttcagcttctgttaagaaagaaccgaatgcctgagcaattttttcgtctttatattccggagctgtctggaaatctttttcctggttttcaaagattttagcgataatcgcttgtttgctattagcaatttccggtaaaccttcaccttccagtaatggcttccatttgttcaaaagttcagctttagttttgatagtcatttgtgttaacctttaaaattagaaacgagatgcgactttcgcatatacacttacaatatcttctgcaccaggtgcagctttatcttctacagcttcagtgacgaaattcagtccggctgcttcagtatcaggagtatttatactctcagtaatagtgctttcatctttattagacttcttcaccatttctacgatggcactcaatttatttgagaattcatctgaataatccataccttcgaccagagcagagactttttctttttgagactcagtcagatctttagtactttcgctcaatgccacttcacgctgcacataattgatatatgcgtcacgcttattgagttcttcgaacagacgagctgattcttctttatgttcttgcagttcttcttccatttcagctacaacatcaactgattcttctggaacaacaacgttgtgttcaacgaagagctctttcaatccaccaagcatggattcaaacagttcggctttgatacctttatctactgctaatttattttcagtgagccattcttttgcaagatggtcaaggaatttagaagcttgctcagcgattttcttctcagctttttcttctgcttcttctttatttttttctacttcttcttctgctttttcagcaattttagcgatatgagattcagctaatttaacggcgtgctgcttgacggtagcttcgaatacagtgccgaaagtttcttttgcttccggagaaatattaactgattcgaaaatactatcaagagcaacggaagcatcaattttttgcgcttcagcaatcagttgttctttaagcattttgtagtcctgttgtttagataataatatttataacgcttttttcatggcctctgcgagagccatataggcgtcatcggcacttgtatcggcttccgccgtctgtgattcggtaatttccttaggagttacccatgcatctggagcacttggaccccatactgcatcaacacctacagttaatttgaatccttcgtttacgatacgataacctttatttgtgtcagtcaatgaacctaatccacgagaagaaactcctggaatccatccggcacgaatattagctgctaatttatctccaggaccgtggtcaccttcaataacacgagctcgtccgtatacgtcatttcctttccaccacatatcttctataatgatagcggcttgcatcgggtcaacattagcgcgtggaggatgatttaattctccgagagcttgtttagttaaaacttgctcattaatatagtcttttaccgctttttctaatatacgttttggataaagacgtttatttctattgacgacttccgcttgcatgaatattccttcgatgtataaacccggttttaaacctaagtcttttccatcgtgggattcgagcattggcacaccatcaataatttcgccaggttgaccccaagtttcaattagtaattggggttcattcattagcttaatcctaatgctttacggcgtttaagagcttttttacgcttacgctgagcacgagattgacctgctggattggcaatcttcgttttggtagctttgcgagcaatttgtctacgttttgctttagacagcccagtggtttgaaatgcattacgttcacgtgttttgcggtctttagtacgtgtaatttcaccacgagctgaaacatgcttaacaatgaattcatttaacggcatgttttcattaatagaagctaatgcaactgctaaatcagtttcatcatcaagcatattctcgacaattgtatttatatcgtctttatttaaagcagaagacaattcgtcaaagcgaccctgtgcttcaggaataagtgcttcgacattctcgagaactaattcatgagtttcagggatcagaagcattattcatcatcctcgtcttcgtcagagtctttgtcttttttgtcgtctttatcatcactatcttcgtcttcgtcatcatcctcgtcatcaggttcttcaccttcgattaagaaattacgagcgatagcgattttttcttctttaattaaatcagtcgttcttgcagccatggcttcagcaaataatttacgagcggctacgaggtcgtttgatttaatagcttcaattaaaccttccattaaaaatcctcttgttcttggtcggggtcttggaaacgagcctctttagactcttcttcaatttgcttggcttcttgttctatttcttcatcagtcatctgcaaaatatctttcatagcagttctgtgagaaatatatttaccaataaatggttctgccatggttagcatattaattcttcgttccaaaatttctgcttctttgagctcagcaaagtagctatcccgatgaaattctatcttaatattatttatttcatcattccactcatcttctgtgattatacctttaagcaaaagatttgttttaagtggatctaggaaaacttcttcaaacttgtgctgtaactcacgaataaatttagcaaacgttaattcatcacgtgtaatgctagttccagaatcaaacatcacaccgccttgttggtcttgtggaatgcgtgaaagaggaacacgtaatgccatgtaaagagcttgtctaaaccaacgaatatcttccatattaccagtattatcagcaccaggaagagtatcaacttctgtcacagctttaccatcacggcgctgcaaccaatagtcttcggtcatagacatattatgttgttgattttttattttacctgttgatgcatcatatactacacggtttttcatcgtgttcataacatgttgcatgtgctcagcagctttacgagcaggcatattacctgtgtctacataccaaacacgacggtcaggagcacgagtaatgcgataaatgactacagcatcttctaataattttaattggttagcaggtttaacagcacgatgtaaatacccgatgatatttttgccacagcaatcgactaatccagaatgggcataaacaacagcagcttttggaatttttatttttgtgccagcttcatacattctaccatcacatgcatatgactcatgggcagtatcatatataaaatattctttgtaacctttaactatttttgtgccagcttcagtttctgttataatttcgcgaacatactgaacttggcgagggtctaatctacgtaattcttttatgccttcttttggacgttttggatcaatgattttatgaaagaaaattcttgaatcaacataccaacgtctaaaatgatcagaaccttttcgttgaaatgataaatgatttaatacatcattaaattcatctaacatcatatttttaatttttgggctaaatttagatttatccaaatttaacgctacgacttcagtatcatcttcgtagacgatagcatctgaaacgatttctgaaactgcattatccacttcatagttattcatgagattacgatatgtatcaataagctcacgagtagttttcattcctggttcatatgaaccaaaaattgtttggaatgcagcattataaggagaagcagcttcgttcgagcttacttcaaattctcttgctccatcatcaagctttggggctgtaatggaaacaagatcttctttttcttggtctttaaaatttcgttcgtccattttagcccatggagcaaacaaacttaatacattaaatttcattgtattctccaaatgggaattatagttatatttatatggacttctctgctttaagcaggatggggatttctccccattcatttttattcccaataatcgagagcaagagttacttcaaaggtttggatttcattgtttgaatcccaatctaattgaagttcacccacgttagtaggccacagacctttaatttcaatttcttttgttactgttttagcatcacgagcatattgacgaacaatagcgctctttttatactctgcaggttttccaccagtaatttcgtttccttgcccagcagcaatgctttgccaatcaacaaacttctggcgtgcatcatgcgcctcatcattcattactgtaatagtccagtcatcgaatgtacgatcgcctgctacgttaattttacggttcataaatccgactggaattttttctacaataccagctggtaaagcagtggctttacattgaaacgtaaaattttgtccaagataagaaatttctacttggaataagttaggtcgagcaaaatcaccagattcaaacgctcgtgttacatcatctacaaacatattagcctctgtagtatttatatccctatgtttaacctagggcatatagaattaaagaattaaggatatagtgtatttatatggcctgccgaaacaggcctttagaatgcaccgtattaacctgcaagaccagttaactcatcgaaatctgcaccagtagcagttgcgacgaaattcaaagtaatataatttatactacgcgccggttggatgtagaatgttgcaacaaactcatttctatcaattactgacggagtgttatttgttgtatcgcaaactacacgatattcataaattccaccgagagctttaattccctgtaagtattgggcagtttctgtgcggaatgatgaacgagtaaacgcgttgtttaattcgaacaaacgatattttgaactacgtccgatattcgttttcaacatattaaacagacgacgaacgttaatacgatcaaatggagaaggaacagaagtagctgttttatcaccatacaatacgtaaccatcaccacctgtaccagttactgggttgatagcttcttgatataaacggtcgcgctgagcttggcgagtttcaatagcaagtttaataacgttaagaatctgaccacgattataaccagctggagacatccaagtctgagaaacgttatcagttctcgcgcataaaccagcaatgtcagctgctaatggaacccaacgatttacatcattatatttgtcatactgatatttgtagttaccatcaattgctgcgtaggttgaactaatattaaagttattatcagtatatgaacctgccgcagttctccagttaactaaattatctactgcacgagttacaggaattccaacaacagtttcacgcggtggtgagcacaatactaagcaatcttggcgagcatctccaattgaaacgacgtgtttttggacagtagatgctgtttctaaagattcaccggcacaagaacccgcaataaacagttgaacgtcaacagattcacggtcagcaaagaagtcccaagcttccatcaaatctcctgctgtaacttcagcatttgatgataatccaccagaaagagttaaaattccagagaatccttctggccagttttgtgcagttgcaaaaatatattctgaaccaccttttgcgaaaaagtcatcgatatagatgttactatcgtaaatatctttttcaccacgcttagttgaaagaacaacgctttgaacaatagcatcatttcgacgaactataatagcgtactgtgagtcagtctgcggcccatatccaaatactgccttggcagtagatgcgcgtgttccgccacctggataaattgggagtaatgcagaagcaccttttgcgtagtcagctttagatacgatttcaatttcgattttatcgcccaactcgcctggataaagagctactactcctggaattccatatttttcgagatttgcctgaaagtcaaccgctgtcatagcagcttcagcattttcaatctcagctaataaaataccggaatcagtaataatttttccaagagttattaccgcagctaaaccagatgaagacgaagaaatttccgcggtccagttagaacctagttctggatattcaccgacttctttcgctttagcgataatttttgcagtaggaatattaattttcttaatttttccatcagcatctacttcggtaattttaccttctgtttcaatgtcttctgaaacatacttaactgtgattttatctccaaccgcgtagttactacctggggtagaaatagtgtattcaatattaccagcaatcggagatgagtttttagcggtatctctatcgacagcgcgcacaactcgcaaatcatttccatattgtaagaaattcattgcagacataaaataatcagcagtttcagctgtaggttgaccaaaagtattaactaaatctacttcatttgtaacctgtttaatctgaaaagcaggaccccactggaatttaccggccaaagctgctgtaccagtagagttattaaccacggtgctttgaaccgtagtttctttgagctcaatgcccggagataataaagtcatttttaatcctctttaatatgctttaatatatttataccattgacataccatgagatactggaacatactcagcagaatgaaccgaatcaacaaatataactggagcgtattcatcacccatatcttgaagttcttttgaaaacacttcagatgctaatcgcatgtcatctttgtcagcataatcaataaattttgattgtgttgataaccatccaaaaatcactaaagacatgactaaatcgtcatgataaccttcttcagctgcccaagacacgcctttttcactaaacgttctaaactcttgaatagttgcacggtgatgaataataagcttatctttttcaataaggtcttttaatgtagagcatcctactgctttcgttcgtttagtttgcttcattcctaaatcagtatatgaatcgcaaataacgccttcgtattctaaatccatataaagtgatttcgcaactgacacaccagtactatttaattcaatataaactgggcattcattatattctactaaatatcgcataacgatgtcaggtagaattaaatgagaaatagtgtttgagtgtaaaacaccaacctgctcccacacatcatcggtgacatcaataatatgtaaagcatgataatcttgcccacgaccttctgagcagtctagagttgcaatatattttctatctggttcaggttttttaaactgatgaaaaccatgatcatctggtgttacttctatgaaatccataacagctaatttcattcctgaaattaatgtaccagaagtcccttcaaacgctgcggtatgttcttgacgaaattgagctaaagtagaaccattaatggtttgtatgctccattgccatccatcgtcaaaaatatcttcatcattataaagacgttctttaactgaattccaaatagcagtgtatggttcaaaccctgatttaccttcaacagcagcagtccaaatatcataaaaatgatttaatccattaggagtcgtagtaataataattttcgaacgacgaccagatgaaattactggttgaatagcaagccaggaatcatggaagtttggaataaatgcgcattcgtcaatataaatcattgcgaacgagttaccacgaactgcgtcaggagaggaagcgtaggctccgattgaggaaccattatcaagttcaatagaccctttattccattcaacaattcctggctgtaaaaagtcaggaagcagttcaattgcttgcttagtacgatctaaaacttctgccgacattgagcctttatgcgccagaatacctacagctttatccttgttaaaacatacaaaatgtgcaaggaaaatagctactacggttgttttaccgagctggcgtgatagattacaaacagtcatacgtttagatgacattattttgagcatatcacgctgatagtcacgtaattgaacctttataacaccatagtcaatatgtgtaatagcacagtatgtttctgcaaaataaacaatatcgtctcggcattttttccactcctctaccatttcacgagtccattgtgttttaatattagctcgtttcaagttaggaagacccatataccgagatcttttattattcttatctttataagtttgaaataattcaggcttgtcagaattatttggaatttttactatcttgtgtagacgaaggtaatcactgaatttttcaggataccattttccatcccactgagattttatccaatgaattccatcttcatcttttctttcagctaagcttgggtgttttattaaaatttttccagcttcatttaatggatggaaatcatttaatgcattaatcggttgttccatttatcaccttctcacgagcttcttgagcctcgtaagcatcaccaatttcgtccattaattctgttggtgaacccatgaatactgtcgcattttgaatattcatttgacctgtaggaacagcacctttagtgccaacctgctcagatgtaatatctttcatatctttatgaagcttcagtatttctctgttcgtcgtagtcatttgccccataagagttgcaaatacttccatgtgacgaggagaatcagcattctttgccgtctcaagaaaaatcttggctgcgtccattagcatttgctgttgaaaatgcatatttcgacgaactactccataatcatcttctaagtcaggagtacggttttgaggattgcttttaacttctactaattgcagaggttcatatactttaatttcctccccgtcaattccggggaggtcagaaatatctaaaagtttgtttatatcaagaccttccataataacctctatgttcttgggccaggaggttctggcggtgttggtctatttacgttgctagtgaaagtttgttttaccgttccatcccagtcttctgggttaatatctcgaggaacaacttcgctatcgacagattcaaaaacaccttcaccatcaggcaaatctcttgtgttggcgtgaaaatctgtataagtagtacgaattaatccttctgcatcatctaccggaggatacatccatccatttacttcaaatgttagtgaccattcaattctacgacgagataaattatctccatctatagattcgtctatagcagcagacatcagtacaattttaatatcccttttaaatggaatatcatttccaaactgttcgtacatagttgtattaaaatgaggctgaaaatatggaagaatttgttcaactatttgaaacatatcatcctcatagcgagtaaatatactcaattcataaatcattttaataggagatggattatattgtgatactacagaagttgcgcctttttgtagtaaattttgatttaaaatgtttgttttaaatggagcattatagctaaaatcaactaaatgtaaatttatacgaggtagaatagtttcaactttagccacatcttcttgtgaatttatcgatgtccatttatttaatttcatcatgaagtgttcctttgatgcatacgtaataggaacacgtataaacttatcaccagattctaactgacgtttgatttggatatttgaaaacaaatcgcccatcaaggtagcatatcgtctaaaagacgaattataaaaataaccaaacatgatttctcctaatctgggctttaattagtttataatatttattaatccatgaaatcattatcaaatgggctagattcaaaagatttgcctctgttattgacaacaacataaggttcaacatattctttagcttcagaattaatttgatctacttcagcatactgatcaatattaatatcatgaatgccattaagattgcgaacaggatttaattctaattcactgaattccggaatgttaattccttcatttttctgtagaactggattaatttcttctccagaataaatgaatttacctgctgtaattttacgaatagcgttttggcctaattgataaaatggatcatatggttcaacccagttaatttcaaataagctgttatccataggaaaatatatcaaatcaccttcctttggttcttttccgttgacttgatgtttaaacaaatttggattaatggacaaagttacttcatcctgtacttgcataccaaaattactaaagaatgatttagctccttcatatccttcaaatgaatttaaatatgcagcgaatttccaagctttagtaaatttattttttaagtcttcgccgaatatcaaatcaggggaaacatactctcttggaacataatagcattctacacctcgcatttgaatgctttcagctactaatacatcggccaatatttgactatttttataatgattgaaatttacataaggatttagtatttcagtttcattagtctgagaataaccagtacgattttctaatttagcaaaaagatttttatcataagtagccatattaacctaccaaaattccaaatggaggatcaagcaagtacaattcttcgcgtaatgcttctttttctaatcgagcttcttctattaagcgctgtccatcaattgtaacacctccaggaagcatcataccttggtgacgtgctaaaatttggccattcaattctttagctaaagctgtagcatagtctttcacccaacggttattataagcaccttgcttaacatttggatcttgaccaacaacacgacctactaaattatggtctggattattatatcgttcagataatgaccagctatcttgtgggccgactgttccatatcctactgtatttccaaccattttattagtatcaatatatgatttagtccagctttctacgataattaaatcatatttttggaagtttcccatgactttgagttgttcatttgctgaattaaaccaaaagtctggaataggcgaaagcatatcttgcatcattcccatgtaactggttaactgagtaaaataccctaaatcagccccaaaggcatttggtccataaaatctattgcaagaagtccccatgccgccattaataccagccattcctaaaagaaagtcagtaaaccacggatatgtagcgtttccgtccattgacgttattgacccaacattcgtgcggagaatgcgagttactgcgaatacatttgaacctcttaaatcgaagactccggttttatacttttcttcgtcatctcctacataaaatacatgaaaacctttgttaagtccatcaaaatggtattcaccgtataattctagggcacgctggatgcaatcgtagatttgatcgggtgttaactcaacattgataattggagcccctaagcgtcttagaatgacatctttgagttcctttggattctgagaattatatcctgacatttaaaatcctttggggccttgcggccccatgttatgctggtgataaaaaggtagaaagtagtacccattcgccgtctttacgaacgtaagcttggccatcttttggagcttcaggaatataacctgcttcttgtagagcttgaacgctgctctgtaaagaggatatattgtctttagctgtatttacttcatgtgtgactgccgcaatgttagtttcattcgtttttacagaattagttaatcctcgttcttcaacagttgctccatcaggattatttccatttataagtgaagtaagttcaataacttgacctttaattcctgttctattatttcctatttcaacttgtatattttgaacattattgtttaaaactgaaacttctccttcaagcactgaaactttatttaatagagatccagaaggagacggttgtcctccactggagtcagttccaacaatttgatttaaccacgaaacattcgctcttaaaccagacgaagtgttttcaccaacaattccgtttaaagactcaatagaagttgtgtgatttttaatttttcctttaatactagaaggaatatcatctgaaccgatagaagtttcaatagccgttaagcgctgtttaacaccttcactctgatttaattcattgttaatagcttcaatgctacttttgttattattaatttctgttattatagaaacattttctgggtatccaatagaagatttaatttctgctatatcagaatttattaaagtttgtttatcatctatagtgtttaatctattataaatatttggtccaaaatctaccggtttattaccaagttcatcacgtaatttaccaacttcaacagtcaatgatcctacgtcagattcagtaaatttagtttctaattcgcttaaacgaatgccttgtgaagataataacgtactatttgttattattctgtgtttcattcctgtgctagcattaccaacaacaggaagaccgttaatgtcttggccagaatattgtcctaattcctgtttaatccacagtaaatcatttctaattgttctataaacagagttttcttcatcattaaatggacctatatcagcaataattttgtcaactgtattattagttccagttaatatatcagtgtgttcactagtaagtgtctttaaatttgatatgtcatttttattaacactgatctgcgatagcgcttctatatctcctgatacgtctaaaactccttgaattgttttaatatctttctgtgatgtttcaatggcagttttaagaattcccacattttcatcaagaacttcgacgtttttaaacacggaaacaattggtctattcattgatccatcatttccatacttagtactagctcctaatatttcttcaccatttttaatccatgaaatacgttcctgaccttcgtcaggaacgctatcaacaaaaggtaactcttttaattcaatcatttgtaatccttagtaatgaactttaataatatagtttaatgatatattccatggtctagtttcataaccaattaatccttcacgattaagtgtaccatgagcatctctcggtccacctaattcaaatccatcattagtgaagtatgaagcattatcccagtcggaatattttctagttccaagatatccttgataaactgacgcgccaaatgggccttcacttctgttatattctccccaaccaccggcgtgtttatggtatgacatttgttgtgcctggacaccaccaacatgcattccgtcacatcctacgccaagtctatcctttccataaccatcttgtcctcgttgatttaaaatatgaccgcctgtgccggctcctctgacgaaaagacctcgcatatcaggaataccaggattattccaatcaccaccaaatcttgttccaactacgtttctataatcaggaaattggtcacctgacacggttccaccgtgacacatagaccaacctggaggtgctgaatcacctgcaaacatcataatagtcccaactggaattctttcggacgcatatctttcagtggcaacaggttgatcgccatttttccacattccaccacgcgaccaaattccgtttgctgtaagatggtctaaatttaaagaaccattaatagtttgtccaccacgagtattaattacatctgcgttccatgctaatgctccagaactatcaccttcaggggcaataccggcttgcgtcgttaatttaactactccacgcatagaaccggtagctcctcgaccatttagtgtttcacctgttactgcaacaccccccaaattattattaatttcagtctgtgttcctaaacgtataacacccctatattcatctgttgcaacagaattcataaaggtatacggggaaattgcatatccttcgcggagagttccttgacgagtttgcgcaacagtagataattgaactactcctctcaccgattctgttgcagtgtcttctgacggagctatttgtgaaattaattttattgcaagtttttgggtttttaatggagtcattgccgtagtatcatctacgccggccaaagctgcaggcgtagatgatattttaataaccccgtttgatgactcagacgaatatctattttggaacacatcgtcagtatggtatttcagtttttgcggcgttattgatgaattattatctgagccttctaacgtttcttcatttgttgaataacgcgttaaaccatatttagtttcagtagcatttgggtataataaccttgttgctaatgtagctggcgtaacgattttagaattattagttccatctaaaacctcttgttctgacgcaatcattgctattcctttaacttccatagttgcatcaggaataccatttacgccgatattacttatttttgataatgcagactgcactgtcgtaacagtgttaggaaaattcgatccagtaggatcgaatttaacatattttgattcatttgatacgtgctgatatgtattgttactcatgctactctctcaaaataataaaatactgtaggttgtgtgtgactatctagcgtaacagtttgcgcacctaataattgccaagttccgtacccaggtttagaaggagaaattatttcctgtttgaaagtaattcctttatcagagtattgttctaagatatgttcttggttatctaaatacttaacttgtattttatttcctatggtaggatggtcttcaaatgaatcaattgcaataaattttacaaccatttcctgtagagctactctaacggcactagtaaattcgattgaagtcattccattagtagctttaactggaataccaaacatgttaacaataactggatcacctggtttggctgaagtatcagtaacggttccttcaaatgaccaatagtctgtttgttgcacgccagtaggagatactccgcttatattaactaatacagctccaacctgttgctctgccatatttctaacatcattgatagcagattctacatttgggtcataaaaaccttttgctatttgtgaaattgttacagcgcctactggctgattattcataaccgaaatatcatttttcttagttctaaaaccaagaaaatctgctaagcgggaaataactcccgctttattattaagtaaactcattatgcaatccttatccaacggtatacagtaatagacggttgaatattactaatattagcaggaggagtatgtgaagagtttgttgttgcgtaatcttcacggtattttgtatatataggaccagtttcatctgggtcatattggcaacccccaataataaccgatccattttcgtcttcaattaaaactctttcgtcggttttagttgcaggaagatttgcgttttcaagcgttactgatgttgttccaactgttccaccggcagtatgtgaaggatttccgctagaatctaaatcattattgtttaaagcaaagtttggatccgtaacatcatcattccatcctactaaaacttgtcctttaccaaataatttccatgaaccaaatcccatataagtcaccggattatttgggtttatagcattttcataaattgaaccaacaggataaatgctgtcgaaaatagatgatattgaattatacgttctagtataagaatcaactttttcaacatttggccaaccgattttatcaaaatctgttaaggccacatcaccaataacttcagtagatgatcctttgctaacatagcggtcatcagtcaattcaataatgtcatctttttctaaaagagttcctaaatcgttattgaaccatgttataacgataatgtcaccggattcaaattttctatcaaataaaagactggtaggttttccatcttcatattctatagaataatctgtgtttgattctttccattcgccaccaagagatatacatccttcttgtgtatctgaactagcgccttcacacaaaaacagaggatatccagctgttccagcctgctgctgtaaaattccattaaaacgaacctcaagagagttaggattaatgggttcaccaggaattaatccaaatgcagaaaatggaattgatttcatcgccgataaatcagtaacataaatgcttccttctaaagaagtctttgatgttagttttgaatctagtacttttatttggcgtctagtatatgaacttctccattgtgatacaccatccataaatgtttcaatttgaacagtgtcaccaatattacaaggctgtcttaatcgaatattaaatccatcaagaggaactaattcgccttcattttcgcccggagagccaaagtcactgttttcactaaatacatcaccgtaatacaattcgttaccacgatgttttactctgatgttattgacattataactagttccattgaaaacatctaaaaagtcagtttgtccttgaacttcaactaaaaattctttgcgagctacattactaatatctgaactaacaattttgtcaatttgtttgtttttgacatattcccaacgtcctggagcgcaataaactaactctaaatcactaaattgaacattaatttcaaccgatgatgacgaccctttaattgtatctccggaagcagctactaaagtaactggattgatgttccatgtagcgaatacgtctctagctctaattaccttgttgtaatcattaacagttcctttaggaagttgtagagttactcttccagacgaagtattaatggcatatgattttccccattctgccgctaatgtttgtccagatgaagcattataagttttccaggcaccggctgaatatggaacatctccatcaccaagttcataataaagttcatcaaagttttcatttatttttataccacctttacgcaggtagtcaccggtaccatcatcaacaacattaccgatattaatattttgtttcattattgagccaccccgattttctgcgtagcgataactttaactgctgctctcataccgacagttgaagaacttatagtcgctgttacataatttgttttaatactaaatgcaatattagcgatttcgtcttcttcggtttcattcccaacccgcatgacagcatattcagaagaaatgacctctgaattaacagtatctacaagaatatttatttctgctgttttaatttttcttccatctactgattggcatgtaactaacaatttagccatgttatattcagtacgatgaaatagcggaatgtcaactgatccagacgtagaaatattccatgtaccttcggccggtgattccttttggccaaacatactttcaatagaataattccaaactgacgtagaattatcagatgaaatacaacgtaaagtaactttactatatgggctagttactaccaaattacctgaaacacctttaattgaatcaatcgcttgaatcgttaaaggattggtaactgatatagatccatttgagttaataaattcaacgcaatcaccaagttcgcctctttcaatgataactttaacacctacagcagaggtatcaatatcatgtctagtaccaactttcaccggagttgcgtactctgtgatagaatgcttttgataatatccagtagcatggataatttggccgttagcaccagtgccatttgctactgccattttacgctgatcgccaaacgcgttataaattgcgttaaaatcactattaattttattaccaccgtcgaataagatatcaccagtagaagcgttaccaatttcgccggtatcaatcaatttctttggttcttgaatgaacatagcggtttccttatgagtttatagtatttataaagaaaaagggagcctatgggctcccttaatttaaaatgtaaacagaatattgatttcttctgtttgatccattgccataataataggtggcctattttccatataaatcatttcgcccgaatgcctcattaaatcttccggatcatagtaatccttttcagctttaacgtttgggtcatttggatgaactttagcttcaagaggattcgtgattatcgatatttgtctaaatcctttatttcctggcaatgcagcttcaggaaaataaactgaatctaagtatgctttaaaacgaatagtatttgccttaacccggtaaattaatccaaaatcatcttgctgccaagtgaggttatcttcatacccccatctagtcggatcttcttttaattcctcaggccaaggaaccacgatatattcattcgtgcatctgtttatagatacatcaggcggaatctcaaaaagatattcccatacatacccgtctccaggttcgattgttccttccgcgtctcctcgaccttcaggaggagtcattgacctaacagaaggagtccattttccacctagcttaaggcattcatccttattagttaaagactcaattgagcacattccggtatcaggaacatctaaacaacgatatactaaccagcctgcgcctgattcggtagcgttgtaaggagctgagttacacactacaatatcgttaattctaaatgtgtatggatccggatatctagtatctccccaatctcgacgaggaataactgcatcaagcatagatggaagaaccttcacggttcccatcatatgagtccacatgtcagttacacctaacacagaatcagtgggataaggtggggcaaatcccacctcattttcgtttgatgaccacggttctgatcttccaaatgtaataaagatagtgtttttatccggaccacttccaattgaattataaaaattcaacattttttctgttctaaattttgaagtaactatcgcacgatagataacacttgaatcattcatctattttaacctgtgttggattttcagggtctcttggatttcctatattatcttttagacgtttattaactaaatccctaaactgtgcaaatgttgttccagatgcgtcaaatagaggactcattaacttgcgtcgttcagaaggcaattgaccttgaaatattgaattattattttcagcattatagtcattaggaagaggatattttacaccagccattgggccaggttcataaattgcttctcctgttactgaatcatgttcaatttcaccagttggagttaatttagctactctatcagcatattcagtaggcaatccagaatcccacttgtagtttttgtatttattaattatagtctctgtatgtttaagagttaaaccgacattaataaacattgttaaaagagtaattgctataaatccaaatcctactggatgaacaaagcgaataacgtcagatttccagcgagaagaaggtaaattggatttaattttcattacataatatgatcggcttctattaatatagtctatattattttgaagcaaatcctttcctttaacaccacgaataatttcgccttcaaaactagggagtctttctgctttaacttcttgaccggcaattaatcttcccaaaagattatgaatagttacagtccattgcaatttaccgttagaataacttctttctatataagtaacattacatcttcctgtagctgtataaatcgtttgtcctactaagtcttcagtcaaagaatcagattgaatgattatatcatattcagtaccagccccagattcaatttcaatttcaacttcttcattataaagaactttaaaaagaaatttgtatgatgcttcaattcctttagtagaataaaaatcatagctacgtgattcaaaaaatcttgcaacagcatcacgtttgtcagcatttaaataaatgtttcttttatatatctctgaccacaaatattcccatgcatgctcttctcgtggatatttgttacgaattaaatttcgtaaattgttatactgagttccatatccatcagaaagatattgaatatatgcttcgcaaaatgcctcaaaattcgaatcttgtagtaaataagaatcaggcatcattgtgccaatcaatggtcttaaatcagggtcagctaatccatgctcttcttctggtgaccaaggagtttcacgctcttggttttgtaaaaatgcttttaaaaatattccagttggcttccaaattatttcaaccgtgtctctcactcgatagttaaaatcatagtaagaaattatttcaccagaagatttataaaaaagcatcccagacgcatattttttaaatcccgtgaatttaacatttggcattactatcgtacaatcaccatcatcccagtattcatgaactaatctatctggcgatgtttccggaatattttctataactttagtgtattttaaatcagcataaactactacagctctgtcagagttgtttatccaacaacgtgtgttagattttttagaccagttaaagaatggttcagcataatatttcattggttgcggagcaaaggtttcccaatcagacttttcatctgctataaatgccatcatatgataatgcttatcagctaaccattcacgaggaaattcatatttaacagcaccgattaactgatatttcgctgcagtttcagggtcattaacaatgttatcacttaaaaatttaaaattactcgaagacagagaaactaatttaccatcagttgacatattcgcatatccaggttgaatacgtcttctttcttcttcagtgttgccaaaaactcttttccacgtttttgtatcatgatttaaaacgtatattcctttatcatcagaatcaattatttttgatgttctaggattagcatttaatgtttcaacttcaccaataataagagcaaaaactttatcaccgatagaatccattttatagcatactgctttaggatttccggttatagtcattgtatcaggttcaaaaagtctttccgaatatgttggagataatggatcagaatctataggtgcattactcgtttttatgtatctaactttgtctctggcgacaacgtaaatgtaatcatcggtgcaagtaatagcttcagctatacgatacacatttgcaggtaatgtagcataagtaccaaagatttcaacatcaaatcccaaatgaagttgatcaccaagtttagcgaatgttatatcctgcgaactaaatctgacatcatcagctgaccatctaacatcagtagatttgcggccatagaaaatcttgtcgtatcctagaacgtatgttgtgctcgcagattggtaatatacagtcttagataaaggatatcctacacggtcattgaagagctttacagctttccaagtttgtcctttatcattagatactttaactacaggttgataacgctcaaaaagatatagaatcccttctgattccatcaaataaactcgattaatatccttacatacttgctgaatagaaccttgtatttcatgatactcattttcaccaataataaaattacttattgatgaaacatcagcatatgatgggctgaattggaatgattcattcatcaatgcagccattatagtatcattattaaaattaacatagtcagaattattaagagtaaatttttcctgaatgaatttattagctaattgcatttcaatcatgttttgaaatgtataagcgtttgtagcaaaagtttcaaactcttcggtataaatccaatcagactgctcaaaatcctgtgcagctgtagctactctaataatgtacgatgtcaatggattagcattatcaaaaaagaagctgttatttgcagtatatcctaagttaatccatcggtattgattgctcgggagattttcccccgagtttgtttttgtctcagcgatttctacaaaatagtagaaattagcaccaacgtcatcccagcgtacttgcacctgatttgcggataacttggaaattctgagactagtgactgaaggtgcttttactgtcattgtgatataggctccaaatcgatagttaagtattgtggacgtaaatcattttcaaatacaatcagtgaaccatcgcgtgtgaaaataacatcgtctattggatcagaatatagttcaatagtctgaacctcaaatttatcggatgttaaattaattttagcgatattccaataaatcatgtcagctggataatttatttcaccgataacatagtatttgtcacgtccatcggaacttgctaatttattaaaatcattgcctgtatacggctgaatgttttcattttctgtaacatcgccagaagcaaatggaccaataataactttgccaattcctttagaatctcggtctgttgatactatacgaacgtcatataatacatcttcttctaaaccagtatcaggatttacaacctttcgtccagaattaaatgaaaacgtattagatttcatagaacgatcttttatttgattattgtatttaatacctgcttcaggcgttttatagaagttttgtacttcacggacaatttgaattgtcgcggatgagccaatgatagaatgatctgcatcatctacgtatgtcagcatcttagatttagcaaaagatgagttaaaaatttctacatcttcggtataataacgatcaattttatcaattatttgaccttcgagccactgttctgattcttgcagcttatttaaagcatatgtgacttttaaattagtcttaataaaaaggtaattaggagaaataattgatggtgtaataggagctaaattatagtctttgagataatttttaatatcttcgcgttgtacagtagttaaatatagtcctgatttaggtttagcagcaataaatgcataaccaggcttagtagaatcagtgaaagtctgaactgcttgaataatagaaccaaatctctctgaaacgaatgtatcatagtcagtcgcagttacgcatcgttgctgagtttcgcgtttaatagtacccaattcgcgaatacgctcaatatcttctggatcgccgccgccatctgccccaacaaaatctgggtcatcatttggattttcgttaatattgatgacagttatatttgttaatgtatctgcgtatgaaaatccgactgcaccattcgcatctgcaccgttagtactgatgtactcaataacaatcgtagagttctgggtaggtttaagacctccaatataattagcggtcaatgctccttctgcagcattaacagaaatctcaccttcaccaaaataaaattcagtatttccatcaatagtttcacgcatgtagtaaattgttgatgtagaaccagcatgaaccattgactttcttgtccagttaatccattctgctccatcaacatacagcttaacttggtttctatctatatttttgtcataaatgataataggtgttaatttatcataaatgatttcagttcttactatacgtccctgggctaattttaaacgcggaaaatattggttatttttatcgcgaatagcaataacatcttcggtagatacaaagttataaggattaacagaagtatcttttgcatatgctaaaaagcgagtaccgcgaggaatagtaatgtaatttctattcaatgcgtctgtacaagttagcataatttcagtttgagcagctgattttgaagtaggtaaatatccattatcttgtgcagcttgaactactgaactacgcaaattagcagtacgcataaagctttcatacaaggcagcattaccaaactgctgaatgtacaatgtattataagccaaaaggtcacacagaacgtttaatcttgagccttcaaaatcataatccaaaaattcattttgaccattaagccattcaatgaggttttgttttatttcagcaaatgtacccccgacgaatatctcgggaatagcatttgctgttcttgttaattgataatttacaggggtatttgccattttaaatcctatttaatgaatactttagatgatgcctgagccacagtatcaccgcatgatattggatcagccatttgaacagctttctttccagtgacatataccttagaagttctaggttgtgtcactccgccatgtgtttcatatggctttttaatttctgtatgttctgtaattggatcacctgctacgagaacagcaattcctccagtgaatactttactttgtgtagcattcacaactgttggaggccacgcttcatggccggcagtaacacacttatcataacttaatcctgacatttatggcctctcatatacatagcttctcaatttattagcccaacgactccaatttccaactatagtttttgtgtaatttttaacaagagtttttcttattggagccggaggattcgttggttcagtagtatcagaagatgacctaaaattactgccagaacctccagattcactttgttcttggtagtcatatattaatgttacttcgtaggtgaatgtcttctggaggttttgaggagctttccatagatataactgagtattagaatcagttggaaggtcttcccatgaagcagcagttttaaattcatcatctaaacgatatttcaatgcgtcatttccaaatccaaatacagattcatacgttccatataaacgattttcttctactaaaaccccaggagtttcttcgtaactagttatatttatagatactaacgtttcacctgtttctaattgagcggtaaaggtgacgtcgatagaagaaccttccatggattctcctaaatcagcgctcattggaagtatattagccaatgtcaatcctcgatccatcaattgtgtattgaccagatgaaatagaactcatagatgccattttttctgtccaatcaccaccaacgtcccaatcaactgtcccagcaactttccaagaaagatttccatttactgtattagtctgatttccttcaactaaagtggtagcatctcctttaactgtaatgtcagcattaccttcgactacaatagtaacattacctttaactaggatagttccattaccttcaactgtcttagtttcatcgccacggacaaatattgtgttgcttccatctatttggtgaagacgattatccatgttgtagtaaatttctgatccaccgacgttagtctttttatcaccggctaccaaaaaattaccatcagcatttgttatatcatacaaattatcaacagtttttcttgttcttcttcctgacggtgatacttcctcatacgttccagtcggatgaactaatctgtatcgttcttgcccaggggtatcatcaaattcctgaatatgaccgctttcagtttccattgtgtgaacatacggatattcacctttatatgaagaaacaggttctttgaataaaattctcgaatcattcggaataggagggtcagctggatcagaagactttgctacagtagcagccattgctgacaaagacctagctggtgttttaacttcaataccgtatgattccaaattccctgtaagaataatcatggtaacacgggatgcacggccttttgtttgttgataccacaatgaatcacgcccggctttatatgctttttcccaatctccggctaacatagcagttaacattgtgttaaatttagctacgccgccaacacccatctgaaatgccatattttctaacgccatttgacgagaacgattaactgctttccaaactgggccaactttagaatgtgatttaatgtcacgttgcatatcagccaaatcgcgttcaaataaagttaccgcttcttccattgtaatagaacctggatttccggtaatttcacgaccaacttgttttgataaaactttattaatttgggccatatcacgaactggctgcttcatgataagatgaccaataccaattgtcggatatccttcggtatcccaataaacttttagtcttaatccttcatcgcggcgaagcatttcagccattgacatatttggattatcatcagttggaatctctgatagcggtctatcatcgggatttatcgcagtgtctaaattactgtcttggataacgttagaagacgaatcatatcctacttctccgccttggtttaatacgttagtatcatttcctagacgtctaggatactgtccagttgggtcagaaaatccttcaagtctattaggtttttcgcgaactatcccgccatacgtgccaaggacaattccgttagttttccatttgtctaaaaaatgaccatatactctagttccttctaccggaccagtaacggagcctccaattccagacattgctgcagaagttataggttgaataactgacatccatggtaatttatcagttggaatacccattacatcaccttgtgctctttgaggtggatgcagaccaaccacacgaacacgaacacgacctaattttaatgggtccattctatcttcaacaacaccaacaaaccaattaaggttattacttatcatttccataagatttctccattatacgtataaggtcgttcataaatgaattaatgtctgattttgctattatttttatttgacgaagtttttcattttcaagaacagcatcttcatacgtatcgaccgcagcaagcgctccttcatattgaggatattttctagctttatcgcctttgtcataccaaacatatggattatcatcgtatgatactaaattataaaatttttcaccgttctcattcacatgatatactatttggtctccacctacatttttgtatttttgtatagatgcttgataagcagcttcctgcgaagtaatccatccataatacgggtcataattatcattacacatcaataaaacccaatacaactgtggatttccatatatagtatttgctaattcttccgggcgtggtgaacctttaatataataagtacgtaagcggtatcccgcaagagcgcgtttaaaatagtctttatagtttctaaaaatatctgtcataggaatagtcggcgcgtttttattcaccgttttggccgcatattcaatcggatcaaaaaatgtaaagagcatgggccctcctgtttataaatatattatctatttataaggagaatccaatgacatattctggaaaatgggttcctaaaaatatatcaaaatacagaggtgaccctaaaaaaattacgtatagatcaaattgggaaaaattcttttttgaatggttagataaaaatccagaaattattgcatggggtagtgaaacagcagtaattccttatttttgcaatgcagaagggaaaaaacgtagatacttcatggatatttggatgaaagattcttctggacaagaattttttattgaaataaagcctaaaaaagaaacacaaccaccagttaaaccagcacatctaacaactgcagcgaagaaaagatttatgaatgaaatttatacatattcagttaatactgacaaatggaaagcagctcaagctttagctgaaaagcgtggaataaaatttagaattttaacagaagatggattacgagctcttggctttaagggggcataatggctatttttcaaataattaatgaaagcactccccaagttccaaaggttaagcaatcattaaacgaaaagaaatggattcagataggtcttgaatacaaaaaggccaaagcaaaaggaatgacaggaaagcaatttgctgaagaaagaggaatcaaatactctacgtttacttcggcaatgtcaaaatatgcttcaggaattaaaacagccgaaaagattcaaaagcttgaatcaaaaccaatgaataaactcaataagcaagaaagacaactgcttatgataaattcattcagacaaacattgcgtgataaaattcgtaatgaaggcgcagcaattaataataaaaccagaaagtggtttgctgaaactattaagcaggtaaaaggacataaagttgttcgcccgcagccgggacgaatatatgcttttgcttatgatgctaaacacaaggaaactcttccttattgggataaatttcctttgataatttacctcggtttaggtaaacacaatttaatgtatggattaaacttgcactatattccacctaaagctcgtcaacagtttctagaagagcttttaaagcaatattcaaatacacctactattactaataaaacgaaattaaaaattgattggagtcaagtgaaaggatttaggggtgcagaccaaatgattaaggcatatatacctggtaatattatgggtagccttgttgaaatcgccccgaaagactgggcgaacgttgtgttgatgccactccaaagcttctactccaaaggaaaacgtttctctgcaaacaaagtttggagcaatgtacgatgaattatgaaaaaatttataattcactaattgatagggctcgcaatagagcccttactggatataaagaaagacatcatattattccgaaatgtttaggcggtagtaatgatgcttctaacttggttgatttaactccagaagagcattatgttgcacatcagctattagtaaaaatacacccaaattctttaaaattatcttatgcagccataaaaatgacggtttcaactaaatatgttaggagaaataataaagtttatggttggttaaaaagaaaacatgcaaataatatttcaaatacacaaactggacgaaaatattataataatggtaaaagatgtataaaattgcatgatggagatataattcctgagggatttattttaggaagaggatggagtccgacacaaggaacaactcattctagaaaaaatgacacatttaaaaacaaaaagcttcaatctgctttagctaataaacggtgggaaaaagaaaagaaaataatgttagataactttggagttaacactattgatgaagcaaagaaaattgttcttgattttaaatcaacttgtcatccaagatattggcgaaagccaactttagaaaaatttccatttatgacttctgctcgtttaagaagtctaataaattaattctattatcttccattcttttctattgtttgttctaattggaattgaatggaagggacttagacccattataccaccaacatttataaagcattatgaggaatatatgtcgcaagcactacaacaaatttttaaccaagcaaatacaactaactttgtagtatcaataccacatagtaatactacatctgcttttactttaaatgctcaatcggttcctattccaggaattagaatacctgttactgataccgtgactgggccgtttggactgggccgagcacaacgtccaggtgttacatttgagtacgacccactcattgtgagatttatagttgatgaagagcttaagtcgtggataggaatgtatgaatggatgctaggaactagcaactatcttacaggtgaaaatactgcccaaaaaacaggtcctgaatacattacgctttacattttagataatagtaaaactgaaatcgtgatgtcaataaatttttataagccttgggtttctgacctgtctgaagtagaatttagctacactgaagattcagacccagctttagtatgtacagcaacgattccttatacgtattttcaagtagaaaaagatggcaaaattatagcagaagtttaatgcttcagtttcatgtgttataatcttaactaaatttgaggagaaacatatgaaactaatctttttaagtggtgtaaagcgtagtggaaaagatactactgcagattttatcatgaataattattctgcggttaaatatcaacttgctggtcctattaaagatgcattggcttatgcatggggtgtatttgcagaaaacactgactatccttgcttaactcgtaaagagtttgaaggaattgactatgatcgtgagactaatttaaatctgactaaatcagaagtaatcacgattatggaacaagcattttgctatcttaacggtaaaagcccaattaagggggtgtgtgtgtttgaggacgaaggacaagaatcagttgattccgtagcatgtaacaagattattgacgttataaataatattgaagatcaatggtcagtccgtcgtctgatgcaagccctaggtacggatttgattgttaataacttcgaccgcatgtattgggtaaaattatttgctttagattatcttgataaatttaactcaggttatgattattatatcgttcctgatactcgtcaagatcatgaaatggatgcggctagggcgatgggtgctacagtaattcatgtagttcgtcctggtcaaaaatccaatgatacgcatattacagaagctggattgccaattcgtgatggcgatttagtaattacaaacgatggttctcttgaagaacttttttctaaaattaaaaatacactaaaggtactataatgtctgaacaaactattgaacaaaaactgtccgctgaaatcgtagctctgaagtctcgtatccttgatactcaggaccaagcggctcgtctgatggaagaatccagaattatgcaaggaactttggctgaaattgctcatgcagtaggtatcactagcgacactatcaaagttgaagaaatcgtcgaagctgtcaagaatcttattgctgaatctgctgatgaagaataatggaatttaaagacttttcaacgggtctttatgtagcagctaagttttcagaattaacacttgatgcgctggaagaactccagcgctctttacgtgttcctaatccagttcctagagaaaaaattcattcgaccatatgttattcaagagtaaatgttccatatgttccatcgagtggaagttttgaagtagcttcttctggacatttagaagtatggaaaacacaagatggatcgactcttgtacttgtgctagattctgaatatctgcgctgtcgacacatgtatgcgcgggcactaggtgctacacatgattttgatgattacacaccgcatataacattgtcttataatgttggacccttatcatttagcggtgatgtacaaattccggtcgtattagatcgtgaatacaaagagcctcttaaactcgattgggcagatgatttaaaataatttcacaaagttgtttacacggggttttagttgtgatactattaccctatcaaaacaaatgagtgattggagaataaaatgaaaacatttaaagaatttatcaatgaagctacttttaacgaaaaagtaaaaattagcaaagctgtcaagactttgattgctgacatcaattacctatatgatattgatttaactgactatgtaacagttggtaacaaacgtaactttttcgtgtttgacatctctgaacttgaccagaatcaaattaacaacattgagcgttttgctaatgataagggtcttcgtcatgagtcagcgggttataaaaaatacgcaatttatttaaaatgagtttacttttaaatagggttgtggtactattatctcatcaaaattaattaggaaaataaaatgaaaacatttaaagaatttatcaatgaagcggctgcaccaaagacattcgttattaatactcaggcgagtcttgacgatgaatacgcggaggcaattctgaagtcacttgctaagaacggtgttgaagtaattgcttcggactttaagaaaggggcttccgagatgtttatttctataactaaaggatctaaagctaagattaaatcatcattcggtgttgctcgtaccgatcaaatcgacaatcatgactttaaacaaactggtgctaaacgacagaatacaattgcatcacgcggaataaaatagtttataaaacagtttacttctgggtagtagtgtgatactattaccctatcaaaacaaatgagtgattggagaataaaatgaaacgctgtgaattaattcgaaatgttgctattgcaatttctgcttccgcttttagtttttcaatgtttgttggatttatatgtggattattgactacagcagaaaatgttttttcacttgtagtagcatttttaattggtttaatcgctattgttatggataaaatttctaaaggtgaataaatgaatattaacgaatattatgtttatgctggggattatgcaaatccttctcattttgaaggtaatttaatacctgatagagtttttaatactccttttgaagcgtggagttgggttgaaagtaaaaatggattttcttatcgttatgttgaagtaactgattggaaaggaactaaatatcctaaagagcattattatgtagacccatctaaagtaaattttcttttgttcgcaggcgataattactatccttgtggtggatatgatgatttaattgcgtatgctgaaacagaagatgaattacgtcaaattattgaagacaataaatcaaaacgatttggcgatagtttcgactggtggcaaatcgtaaatgcccatacacatactattgttgataaaggttaataatgattctttatgcgaaagtatcatccattgaaaatggatataaatatgatcaagaagcagctaaagctttgattgatgattatggcattttaacatgttttgaagttgaaaaggtttacattgaccgttcatcttctcaagttaaattagtgaaggaagaacgtaaatttaatacagtaaattttgatttctttattgaaacagaaaaaggtcctcttgaatatgatattttcaagaatcctttgggtcttgaatgcatcgtaaatatgtattattataaatggtaaatatgctttaagaattatttgttattattaactcacaccgcactgattaataccctctatcatcaagggttcttgtttgagagcctttgctaataattgggaattagccaagttggtaaggcactggattttgattccaggatgcaaaggttcaagtcctttattcccagcgcgagaatggtcaaattggtaaaggcacagcacttaaaatgctgcggaatgatttccttgtgggttcgagtcccacttctcgtaccaaagtttgcggatatcgtataatggtattacctcagacttccaatctgatgatgtgagttcgattctcattatccgctaaaatttaatttactccgtgtagctcagtttggtagagcgcctgatttgggatcaggaggtccaaggttcaaatccttgtatggagactggaggcgtggcagagtggtttaatgcaccggtcttgaaaaccggcagtcgctccggcgactcataggttcaaatcctatcgcctccgtaatttcgctgatttagctcagtaggtagagcacctcacttgtaatgaggacgtcggcggttcgattccatcaatcagcatatcaaggccctgtagctggaaggttcaagcaagcgactcataatcgccagatggtggttcaattccacctagggccatattttgggaacataaatactcttagaaataggagatatttatgttccattacacttataaaataacaaataaaattaataataaaatctatataggcgctcattctaccgaaaatttagatgatggatatatgggttctggtaaattattaaaaagagcccaagacaagtatggtatagaaaatttctctaaagaaatattagagttctttgacgataaaacctctatgtttgagtcagaaaagaatattgtgactgaagagtttttaaagcgccctgatgtttataatttgaaattaggtggtgaaggtggttggggccatttaaacactaaagaatatttggataaaaagaaagaagcttccttaaaaggggctgctgcttttaaaactagatttgagaacgacccagaccttaaagaaaaatatcgtaaaatgggttcagaaaggtttaaacagctttgggataatcctaagtatagagagaaatttttaaatactaaatctttcttgggtaagacccatactcctgaaactattaataaaatgaaagaatctcacgccagaaataaacaccaacagggcgaaaagaattcccaatttggtatggtgtggattcattcattagatgaaaaagtttctaaacgtattaagaaaactgacccaattccagaaggatggtttaaaggtcgaaaaatgaaattttaattacggggcatagctcaattgtatagagcaacggacttctaatccgtaggttgaaggttagaatccttctgtctcgaccagacaagaagccgggtcgctaccggcaagtcgtcggactgatgttccctgtttaaggactggcattaataaatctttatgttttgttaatgcccccttatatcacagcagaaacggcgcaccgaattatcgattcgaggaaatatctttgccataagccgagtagcgtttttgacggaacgttcggatatggtcgagatatggccttttaaaaatattgagtagcgtcaactacttaataaccgggttcgaatcccggcgtttcgtacaaacacttgccttagcaggtggaaccccgacaaggttgccgcaaggcttagccccagccgaaaggttggggctttttggtatctaggcctttctggacctctctaggcatcatttagtttctaccctttataatatattatcctatcctttaattgccccttccctccctagaattccctaaaactttttaaaaaatttttcacaaaatggtttacatccctgttcttccatggtactatatcaatatcaactactgatacagaaaacaacttggagaataaaat

SEQ ID NO: 7 - DNA, 166037 bp, Bacteriophage
aatttagctttagcttctttgttatcatcaagagccttcagctctgcaatataatctttatctatcataatatttcctcagtataaatatagatatatttattacatggtatttagacatgactgacattaaagtacatttttatgattttagtcacgtgagaattgattgtgaagaaagtacatttcatgaactccgtgatttctttagctttgaagctgatgggtatcgttttaatccgaaatacaaatatggccactgggatggacgaatccgtcttttagattataatcgtcttcttccattcggcttagtcgggcaaattaaaaaattctgtgataactttggctataaagcctggattgacccacaaattaacgaaaaagaagaattatcaagaaaagattttgatgaatggctttctaaattagaaatctattcaggaaataaaagaattgaaccacactggtatcaaaaagatgcagtgttcgaaggattagttaatcgtcgtagaattcttaatcttccaacatccgccggtaaatcattaattcaagctttgcttgcgcgatattatttggaaaattatgaaggtaaaattcttatcattgttccaacaactgccttaacaactcagatggctgatgactttgttgactatcgtttattcagtcatgcaatgataaagaaaattggtggcggagcatcaaaagatgataaatataaaaatgatgcaccagtcgttgttggtacatggcaaactgtagtaaaacaaccaaaagaatggttctcacagtttggaatgatgatgaatgatgaatgccatcttgctacaggaaaaagtatttcatctattatatcaggtttaaataactgtatgtttaaatttggtctatcaggttcattacgtgatggcaaagccaatatcatgcagtatgttggaatgtttggtgaaatatttaagccagtaacgacttctaaattaatggaagatggacaagtaactgagctaaaaattaatagtatttttcttcgctatcccgatgagttcactactaaattaaagggaaaaacttaccaagaagaaataaaaattattactgggcttagtaaaagaaataaatggatcgctaaattagctattaaacttgcgcaaaaagatgaaaacgcttttgtcatgtttaagcatgtatcacatggtaaagctattttcgatttaattaaaaatgaatacgataaagtttattacgtatcaggagaagttgatactgaaacacgcaacgtaatgaaaaccttagctgaaaatggtaaaggaataattatagtagctagttatggtgtattttctactggcatttcagttaaaaatcttcatcacgttgttttagcgcacggtgttaaatctaaaattatcgtattgcaaacaataggtcgcgtattacgtaagcatggttctaagacaatagcaacagtctgggacctcatagatgattgtggcgttaagccaaaatctgctaatacgaaaaagaaatatgttcatttgaactatcttttaaaacacggcattgatcgtattcagcgctacgcagatgaaaaatttaattacgtaatgaaaacagttaatttataagggcttcggccctttggagaaaaagatgttactagaatttaaacaatttctttatgaagcttctattgatgaatttatgggtaaaattgcctcttgtcaaacattagaaggtttagaagaacttgaagcttattataagaaaagagttaaagaaactgaattaaaagatactgatgacatctctgtgagagatgctttggcaggaaaaagagctgaattagaagattcagacgatgaagtagaagaaagcttttaaattaaaaaaggcccaaccaaaaaggaagggccaaaactatagactaaaggtcacactatagcaaaagttgtgtttcatttaattgttcttccgaactttctgaaactggtagttctttaatgtaattatagcaaggcccaggatgtacaggacctttgtctgtttcaacaaccaatgcagaatcgattggagttttacagacaacacaaatcttatctgacatgattgtctcctctgaattatatatctatttatacaactctcatatgcatatcaatgcccatatctttagaataaaaatattcatcaagatatccggcaaattttcctttaatataaaggacatcttcaccacatggatgatcggccaggatacgaatatcctgacgcttaagattatgctttttcattaagaattgaatttccgtttcaaattcttcttcataattaaaagcatcatcaatgctatatctcattattttccagcctcaaatgcccgcatgtcttgaatatgcttaatagcaaatccgcgtgatttaatagcatcaagagctccgctacagaaatctaataaaattccccaatattgtaatgaagtatcaacctttaaaacatccttatccgctgatagaactgtcttcatttctgatttctcgtaacgatccatactaaattcatcaccatctcctcgtcccgagtagtagtctaatttagctttaagagcaacttttttctgtgcatcaattctaagcatttcctttttaatacttgaatgcttattaagccatttactatataacatcacattattagctgcttcatactgtaatttagtcgaatctataaacacatctttcttcaattcttcttgaagatcttctaatttcatgttgttctctattcaattgttattggatggacttagattcattataccacgtttatacgtgaagcattatactctattactggaagccagctgcagttttatctgctcaatatcatcagggttatcgatgactgaaaagcgtatttctactatcagagtataatcatcataaactggtatcacattaactgctaatttgtcaatacgcggctcatagtttcttactgcgctttcaatgttacgctcaaccgtgtcagcagtaagaggagtcatattctcaaaaagctgatcagataaatcacatccaaactcagggtcaaacggtcttgacccttttctggttgtaataattcccaaaagactgtttttaattgaccttaatccaagggatctagaaacatctttgtcccagtccattttcatttctgggtcaatgtcagaataaagcttattaatatttgccattacaatagctcaaagaattctttgagtcctcttattacatgagcgtgagattttccacactctggacatttaattggaacagccaaataaacagtaggctttaaaagcatatcttttatagctacaatatctgactctgtgatgatagaatataaatcttccaactctttttcatttaagtcttcaattggaatgctttccccgttcgcgtgaatcgtttctatgcatgatactatcatatgggctatatttttatcatcaaaaattttggggtaatggaacttaattttaatgtcacctagtgtataccagaggtcttctggtgcatctatttgtgtatgtaatagatttatatgggttggtatttcagttccacaggtgcacttccaggagttttcgtgattaacttctccaagagaatgcgcccataaatgaatcagtaatagttctgattcttgacggtttaaatcttttgcatttgtgcagtctttgattagctttttaacaatttcttctacggaaccgttatttttagcagtaataagttctagatactctttaagagtaaatgcgcgacaattgattattttagaaccaactctcacgtcaaatttatattcatacatatttagctcctttatttatcatatttataaatagaataaaaggagcatctatggcaaacattattcgttgtaaattaccagatggtgttcatcgttttaaaccatttacggtagaagattatcgagattttttgttagttcgaaacgatatagaacatcggtcaccacaagaacaaaaagaagtaattgctgatttaattgctgattattttggagactatccaaagacttggcaaccatttatatttttgcaggtatttgtagggtcaataggtaaaactaaagtaccagtcacatttgtatgtccaaaatgtaaaaaagaaaagacagttccatttgaaatataccaaaaagaattaaaggagcctgtttttgatgtagctaatgttaaaattaaattaaagtttccttctgagttttatgaaaataaagcaaagatgattactgaaaatattcattctgttcaagtagatgaaacttggtatgattggaaggaaattagcgaatcaagtcaaatagaacttgttgacgccatcgagatagaaacattagaaaaaattctcgattcaatgaatcctattaatttaacattgcacatgtcgtgttgtaataagtatgtaaaaaaatacactgatatagtagatgtgtttaagctattagttaacccagatgaaatatttactttttatcaaattaatcacacactcgtaaaaagtaattatagcttaaattcaataatgaaaatgattcctgccgagcgcggattcgtattaaaactgattgagaaggataaacatcaatgagtatgttacaacgccctggatatccaaatctcagcgttaaattatttgatagctacgacgcttggagtaataatagatttgttgaattagctgctactattaccacattaactatgcgggattctctttatggacgaaatgaaggaatgctgcagttttatgattctaaaaatatccacacaaaaatggatggaaatgaaataattcagatttctgtagctaatgcaaacgatattaataatgttaaaacacgaatttatggatgcaagcatttttccgtgtcagtagattcaaaaggcgataacatcattgctattgaattaggaactattcattctatagaaaatcttaaatttggtagaccatttttccctgatgccggtgaatctataaaggaaatgcttggtgtcatttatcaagaccgcacattattaactccagcaataaatgctataaatgcttatgttcctgatattccatggactagtacatttgaaaactatttgtcgtatgttagagaagttgctctagctgtaggaagtgacaaatttgtatttgtgtggcaagacatcatgggagttaacatgatggactatgatatgatgataaatcaagaaccgtatccaatgattgtcggtgagccatctttaataggtcaattcatccaagaattaaaatatccattagcatatgatttcgtttggttaactaaatcaaatcctcacaaacgtgacccaatgaaaaacgctactatctatgcgcattcatttttagattcttcattgccaatgattactacgggaaagggagaaaactctattgtagtgtcaaggtcaggtgcttattctgaaatgacttataggaatggctatgaagaagctattcgtcttcaaactatggcacaatatgacggctatgctaaatgttctactgtcggtaattttaacttgactcctggcgttaaaattatttttaatgatagtaaaaatcaatttaaaaccgaattttatgttgatgaagttatccatgaattatcaaataataattccgtaactcatctatatatgttcactaatgcaacgaaactggaaacaatagacccagttaaggttaaaaatgaatttaaatctgatactaccactgaagaaagtagttcttccaataagtaataaagaagtttctattcctaaaatgggtcttaaacattataatattttaaaagatgttaaaggtcctgatgaaaatttaaaacttcttattgattctatttgtccgaatttatcaccggcagaagttgatttcgtttctattcatttattggaatttaatggaaagattaaatctcgtaaagaaatagatggctatacttatgacataaatgatgtttatgtatgccaaagattagagtttcaataccaaggaaatacattttattttagacctcctggaaaatttgaacaatttttaacggtgagcgatatgttatccaaatgcttgcttaaggtcaatgatgaagttaaagaaattaattttcttgagatgccagcattcgttttaaaatgggcaaatgatatttttacaactttagcaattcctggccctaatggtccaataactggaattggcaatattattggattatttgaatgaaaaagccacaagaaatgcaaacgatgcgtagaaaagttatttcagataataaaccaacacaggaagcggctaaatccgcttccaacactttatctgggcttaatgacatttctacaaaattggatgatgctcaagctgcttctgaattaatagctcaaactgtcgaagaaaaatcgaatgaaatagttggagcaattgataacgttgaaagcgcagtgagtgatactactgctggttctgagttaattgccgagactgttgaaattggcaacaatattaataaagaaatcggtgaatcactcggaagcaaattagataaattaacaagtttactagagcaaaaaatccagacagctggaattcaacagacgggaacgagtttagcagtagtagaaaatgctattcctgttaaagtcgttgaggatgatacagctgaatctgtgggtcctttattaccggcccccgaagcagttaataatgatcctgatgctgattttttcccgacccctcagccagttgagccaaagcaagaatcaccagaagaaaaacagaaaaaagaagcatttaacttaaaattatctcaagctttagataaattaacaaagacagttgattttggatttaagaaatccatttcaattactgataaaatatcaagcatgctatttaagtataccgtcagtgctgctattgaagctgctaaaatgactgcaatgatattggctgttgttgttggaatagacctgttgatggttcattttaaatactggtcagataaattttcaaaagcctgggatttatttaatactgactttactaaattctctagcgaaaccggaacatggggtcctttattacagagcatctttgattctattgataaaattaaacaactttgggaagcgggagattggggtggattgacagcagctattgttgaaggactcggaagtgttctttttaatttaggtgaacttattcaattaggtatggctaaattatctgcagcaattcttcgagtcattcctggtatgaaggatactgctgatgaagtagaaggaagagcattagaaaatttccaaaattctactggagcatctctcaataaagaagaccaggaaaaagttgcaaattatcaagataaacgaatgaatggagaccttggtccgatagcaaaaggattagataaaattgctaattggaaaactcgtgcatctaactggattcgtggtgtagataataaagaagcactgactactgacgaagaacgtgcagcagaagaagaaaaattaaagcagctttcacctgaagaaagaaaaaatgctttaatgaaggccaatgaagctcgtgccgcgatgattcgttttgaaaaatatgctgattcagctgatatgagtaaagactcaacggttaaatcagttgaatctgcctatgaagaccttaaaaaacggatggatgacccggatttaaataattcaccggcagttaaaaaagaacttgcggctagattttctaaaattgatgctacttatcaagagctcaagaaaaatcaacctaatgccaaacctgaaacttcggctaaatcaccagaagcgaaacaggtccaagttattgaaaagaacaaagcacagcaagctcctgttcaacaagcatctccttcaatcaataatactaataatgttattaagaaaaatactgtcgttcataatatgacacctgtcacaagcacaactgctcctggtgtatttgatgcgactggagttaattaaggaataatatggcaattgttaaagaaataactgctgatttaattaaaaaatccggtgagacaatttcagccggacaaagcactaaatcagaagtaggaattaaaacatacactgcccagtttccaactgggcgtgctagtggtaatgacactacaggggacttccaggtaacagatctatataagaatggattattatttactgcatacaatatgtcatctagggattctggaagtcttagatcgatgagatctaactactcttcttcatcttcgagtattttaagtacagctagaaacactattagtagtacagtatcaaaactatcaaatggattaatatcaaataataattcaggaacaataagtaaagctcctgtcgcaaacattcttttaccgagatctaaatctgatgttgatacatcatcacatagatttaatgatgttcaagaaagtcttatcagcagaggcggaggtactgctactggtgtgctaagtaatgttgcttcaaccgcagtatttggggcactggaaagtataacacaaggtataatggctgataataatgaacagatttatacgacagccagaagtatgtatggtggtgctgaaaatagaactaaagtgtttacgtgggatttgactccacgctcaacagaagatttaatggctattattaatatctatcaatattttaactatttttcttatggtgaaacgggtaaatctcaatatgccgctgaaataaaggggtatttagatgattggtatcgttctacgttaattgaacctttatctccggaagacgcagctaaaaataaaacactatttgagaaaatgacatcgagtttaactaacgttctagtagtttcaaacccgacgatttggatggtgaaaaactttggtgcaacatctaagtttgatggaaaaacggaaatatttggtccatgccaaatacagagcatcagatttgataaaacacctaacggtaactttaacggattagctattgcaccaaatctccctagtacatttactctcgagattactatgagagaaattattacgttaaaccgtgcttctttatatgcggggactttttaatgtattctttagatgaatttaataatcaagcaataaatgcagatttccaacgtaataatatgtttagttgcgtttttgcgacaactccatcaactaaaagctcttcgttgataagttcaattagcaacttttcttataataacttgggtctaaattcagattggttaggattaacccaaggtgatattaatcagggaattaccacgctaattacagctggcacacaaaaactgacaagaaaatcaggggtcagtaaatatcttattggtgccatgagtcaacgtacagttcaaagtttattaggctcatttacagttggtacatatttaattgacttctttaacatggcatataactcatctggattgatgatatactctgtaaaaatgccagagaatagattatcctatgaaactgactggaactacaactctcctaatattcgtataactgggagagaattagatcctttggttatttcatttagaatggattcagaatcgtgtaattaccgtgcaatgcaagactgggttaatgctgttcaagacccagtaactggattacgtgctctgccacaagatgtcgaggcagatattcaggttaatcttcatgctcgtaatggattacctcatactgcggtgatgttcactggatgcattccaatatcagtgagcgctcctgagttatcatatgatggagataaccaaataactacatttgatgttacttttgcgtatagagtgatgcaggctggagcagttgataggcaagctgcgcttgaatggcttgaatctgctgctataaatggcattcaaagctcttctggaaataatggaggtgttactgaactatctagttcgctttcacgacttagtagattaggtggaactgcaggaagcatttcaaacattaatactatgacagggattgtcaattcgcagagtaaaatattaggagcaatataacaatggggaccgaaaggtccccatgtttttatttacggaatgaaatgaaagcagcaactgaagcaactaaactgtcttcaatataaacttcaatttttaccggagcttctgactcaaatttacctgttactacgccttggaaaatactttcagtttgttctggctttgaaaaattttcagaaggaaaaattccgaactttttatctgttccaaaaattttgacaaattcatcgtaaactgcttcattaaaagcattatcagcaggaataacgccttcaactacaagttcttgacctaaaaagcgcaaagaagatttcattttgtgttcctcatgttatgttagtaagactactataacacaacacgagggacttgtaaactacattttgaactttttagacattccgttaatgttaaccaaagaagctaagatttgagaaacttcgttttcctcttcttttgattcttctacaaggaattgattaaatccagccattggacgaacttcaccagtttccatcagatggtcgccatcatatactgattcttctaattgttcagaaggaggaacgattgcaccttcgattagatacttgttataagcagtttctttcataaagtaagtacttactttattaatctttagtaaaattccacgtggtagaataacttcagcttctgatggaaatcctgataaatgacctggaacgataactttgattcgctcagctcctttaattaccatacctacattagtttcagcgtcttcattcgcatatgtagaatgactacccatatgcattaaatcttcagcatcaactgaaccttctccttcaccagaaaatactgctccggaatcatctaaggccatataatttttaccatattcaccgaagatatttggcttgagtgaagtagatacaaagttcttgaaatagaacattttattttcaatgttatgacgcaaagttttaaaggtaacttcttgcccacgataaagagtagttcctggaggaagaactgaacctttagaaaatgcagaatccagcgtctcaatatgtttaatagctcgttccatatattcttcacgggtagaatcaggtttacctaaaaggaatgagttcatttcaacatatgaatctgcacaataatcttcaattacatcagattcagcctgagttaatccttttggagttacttcagtacttgcatattcatatgcctgagcggcagattcatcaattaatttataaattccattcatgacaaattgaataatagctgtcttttcatctggtgtagctttagaacctttaactaaatcattgacaattttcttaataacatcaaagctattagaaatattaatgtcagcaagatcgcttaaaattttatcagttttataatcaaagaattctttattctttaaatattcttgagaaccttgatatgttatatcgctctgcagcttgatagatggatcgcgtaaacgtgcatgggccaatgcaatatgatttcggaagctttcgagttcataatcactagatttaaaacgagaagcacttctcataccaccgatagctcctttgctaaagtttgaaccaacctgaataacgccagagttcattggtccttctgctttatataccggaactttagattcaaactcttgatatttcttagcagcgaagctatcaccctgaagtgaagcatcaacagtagaatattgagcttgtgctgctaatcgacgactaattttagttttctgaataacggcttgatccgtgcgcttatcattttctaaagcaatagaagcagcaacagcaacagctttaggaacagcattacctgttttaacgtctacataaacatcaccaacctttgattcgacttttgtgaataactcggttgaaataggaggtacacctggaatgtcttctaaattggcatttttacggtaaaccataatatatgcgtactttttatcataatcccagatttcctttaaaagaacatatcgacctgctcctttagtacgtactaaacggtcagcaataacttgcatttgacgagctgcgccatttgttttactttttagtacgcggaataggcatgcatcaattttatactgcttcattgtttgaagagcagtatcaaaaacagcattaatgacgccaattggatttccacccaagtttttaagcttaactaatgatagtttctcattaacacctatcattacgatatgcatcattttgtcgcctggcttaacgtttttattcgtatcaccgccagaggtgtatgtacaaaatctaaatccaggaagcacgctttcttcacctgcttgaatagcaaaaatttgaggtattttatgcttaggatttaagttaacaaccggcgccgaagcgccgtcaaataattctgtaataagttccatgatttatccttgaacgaacttgtaaggcatgtttgtaatatctatgcaagacgcaataattccaagagatgattctactttctgtttaacatttgatgaaacaaatgatgcaaagtcaactctgtcttctatttcaatatcacctgtcattgcaactacttcaccggtttccattaaatggtctccgtcatagattaccgattcggtgagctcttccgtggtcataacttcagcttgaatgagttttgtattattagatgttgttccgtcattattagaagcatcagttattttattaaccttgaccatcaatccgcgtggtagaataacttcagcttctgttgctattccgagacttcctggatatacaacattaactttatgagctccatcaattgcccatcctatttgaactttaacgtattcaggattttctttatacgctcttatttcgtttggattaatagttattccttcttcatttttatcaactgtcaattcattacgagcttctggttctaaaagaccaataccagcatgtgtaattccaaaacgtccaaaaatgataggagttaaagaagtagatacaaaatttctgaagtagaacactttatttttaactaacgcttcatatataggagcagtcatactttgagcacgataaactgtaatgccttctggtatacggtcaccattttcaaaagctgaatctaagttatttatagcagattcaatttctttttcactcattacatcgtatcgttctggattgtaacgacctaaaagaagattattgatgtcagtatatcctgaaccgcaatattctctaatgccacgcttttgtgatggagtatatttagaaccatcgcgtgcaatagtaatatcaatcattggaccagcaccaattccagaaaaactgtaaatcattcgtttgaggaatttagtttttgctgcgttccaggaatttttagttatttcttcccagacttcatctggttgtcctttacgatttttattatgattagcaagccatttatctttataatcttcaaagaattgatttacagctgctgcgtatttctctaaacattttattgaagtagttggttcatttttaattgcattaaaaattacttctttaattttttctgaaacttcaccgacttgactcattggaaagaatttataatcatagtgaagttcatctgccgttccttcagcaataatttttgctgcctttgttttagaagctaatgaattaattccaagcttcatttcttctgcttcgggaattaaaggtgcagtagctggtttattaaaattagctgctgtagattcatacttctggaataattcactttcaaatctagaagattccaatgactgactttgtgcaattgctctgcgagaaattttaaccttaacgattacagcttggtcagaacgtttatcattttcttgcgcaatagatgcagcaattgcctcatttttggttacttgagctccagtatctttattaatataaacatcaccgaccttcgattcaactttagtaaagagttcagtgctaatttctggaactcctggaatgtcttctagtgatacatttttacgatgtataagaatatatgcatactttttatcataatcccagagttccttaagaaggacgtatctgccacctgaacgactgcggatgagtctatcagcaataagttgaatttgtcgagcttgaccggcggttttagacttaagaatacgaagcatgcaggcatcaattttatattgacgcatagtttgcattgcaacagtaaaaactgaattaatataattaattgggcttggaccaagaccttttaatttagcaattgaacctttagcagttaatgtaaaaggaacaatatgcatcattttatcgcccatctttaaatcgcgattagtatcaccgccagatgtataggtacataaacgaaagcctggttgttcaattgcgtcatcaacatgaactgaaaaaatttgtggtattttcttctttggatttaagtttgtaatcggaagagtagtatcttcgtcaaataattctgtaataagttccatcatagcctctctagtgtttattctatttataaaattaaaggcccgaaggcctttagtaatctagtggtaagagagtacgatatatttcaaactttggtcctttttcataggcatcaaatgtttccgtgaatttattataagcatatgcatctacaaattcgagaatgacttgtgatacagaagtagaaacatctccaccttctttttgagcaatgacaattgtttctaagtaagctttcatagaccagttacctcatgaaaatcaccaaatacatcctcgaatgtattagctttagttttatcttcacgtaaacgaatcgcaatcggaagaaataatttaacgtaatcagtgcggccatcagattttaaccaaccgttgcattcgcactctagaatttttccaatataataattttggttttccataatgcgagtacggtcaagttcatgcgattttacgccggctttatcttttaagcctgaaccagcatttactttaatttttccacactctgactcaagaataaatccgcctgctttagtagggtctttacggtgaggataaattcctacaatttttaaatcaacatcaattacttctttaaatttataaagattttttgaacgagcattttcccataatccatcaacgtttttgagaataataccttcaagaccttggtcaatatactttttataaattaccttagcttcatctaggttatttactacctggttttcaattaaaattactttatcatagcctggtgtcatttgttctagtttagaaaaacgtacatcatatttcaaacgaaatgcaggaagaccatatatttctactaatggaacataatcccagacctgaaacttcatgcattgagcttctttttctgaaatagttccccttaaagatttattagcgattccattagaagtagtacgtgattcagctacttcggcgaattctttagctttactaatttcaggataagcatcaaaaagaaaatctaggccttctggttccttttcaacttgctcatggtataccaattcgccatcaattaacacaccttctggatgaatctggcgggcttcagcggtcattttgattaactcttctttgagaaggtctaatcctaggtattcattaccagctcgtgataaaagacgaacatcatctaattcatcacctctgacttcagcaaagcaccgagctccatcagcttttaattgggcaaaggctggaaatttgatattcttattaatgcctttttcatcataagaacttgccagcatttgaggttgttcaggaattaaacctggccaaactttgtttgcaatagatactgaagcaccgcattcaaggtctcgcatcatcacccgacgcaaaacttcaacatcatcttttttaccgtcagcaatatatccagttaattcctcaattgccgcatttccagtcaatttccgagtagctaacgtgaattcaatgaagtcgagcatatctgcaagagtcaacattccaaaactctgggtagcaataccaggtttaggccatttcttgatataatactgtaacccacgagaataagtcagacgatatactcgtttaagcaattcattatctttattcttttcaagaattgcttgcttctgcttagttgaaccaatagatgctatttcgttcagaattttaagaatcattattcatccttcagagtttggtttacaactctattataaatcaattcatcattaagctcagtcaaagacctgtggtacgtggttctaactttatttccttgcatccagtgcttgatataaataaaaccttgctctacacattttttaaaaattcgttcgtctttttgagctcggaattctggattgcatctaaaaaattgatttacgtgaccgtaatcacgtgtagtattaccttcattttcataaatagtatgaacgacaaacattagaatgctccttggaaaatattatcaccacaagtaggtctattatacaaatactctatgccaccaggtttaatatagttccatgtctgaaatggatgtgtctgatatggatggtatggatggtatagatgattataaggattaaatccaggagttctccaggtagtattccaaggaaaagaatcgtttttgatcatcttctcaattacatcttttataactttttcactatcaaaactttctttattttccttcgatggaaaaagcttattctctacatcattccatgtataaactcgctgtgcagtttttggaatactgtcacgctcccctcgagccatccaataaacaggaacatttaatatttcactcgcatgatcgcaatggtgagcgagatcgtcaatataacaaattacgttatatttctcttttgcctttttgaacaactcttcttttgaagaatcatgaccacacatcagtacttctgagaaggcaccaggaaaaagagcgttcaaattaaattgacgattcagcagagcgtcaatagaatcacctaatgctgtaacagctacaaaattataatcttcttttaatttgttaattacacacagagcatctttatatggagacaagtaacgaataaaatctgatcgattgtatttttcaattagcttgacaccaagttcttcatcacaattaaagagtttacctggagaaataaatttctcatcttggatcatttttaaaatatgttctaacggaagattatatttctgagcaaaataaggaaggcctgattgccagctcaaacatactccgtcaatatcagttaaaatagttggcttcatagagagtctcttaataggtttaacacatcaataaattcagcttcggttagtattgtatcatcttttgttagaccactagccatgctgtgcttcaaaacttttcctttcgaggcttgtaatgcatcacgaaagcccttgttttgaatcgctgcttcaaaatatgcatttgtgtataattctttccacgccggggagtatcttgaaaacggaactccaagccagaagagggtcccacggtcctgagctctagcataagaccttccagcttgttgagcggcaagcccggataacccaaatatacgacgttgttgttcaacgtttttcaccttgcatccttggaggaatccttcaagacctccaaattgaataccatccataacgaaaggccatttggcgaaattacttaatgcacatgatggccacctaaaattacttctaatctctaactcagacattttcaatgcttataatttcaacatcagcccaatgaccatagcaaggaagacgaaattcaactggccagttagggtccttttctaatataatagactcaactcgtggttcttcatgttcatcagtatatggatttttatctgttactttatatgtgaccttaatgtactgaattccaaaaatcttattaattatattcatactaattcctttaatccgtaaataggagataattcatcacccatgcgaaggtcttcatttccatctacccaggaaacaatataagcctcttttatttgaataccactccatttaaatggaggtagaaccttagaaattaatccaggtataccaactccctttaattcaacagtttggcctaaaaagaatttcattagaacctcatctgaaaaccgtgcgatttaacattaccgccaccaatatcagagatattaatttcgcgcgcaattgaagggtcaatgtcaatttcacgattaagtttagtgatagctaaagtatcgcgcccatttacagtacgaaactctaaaggacaaaccacatcaacgtagtttttaatcgattcgctagtaggttgcaaatgtgcaggaaggtctttaggtgcctttgagaaaacaacttcacagaaatttttgcgggtatcaaaataagtagtcataaacataatattttcctcaatagggggccgaagcccctgttttattttaaatattaaattcgttaagaactacatcaaagattgcttcaagatgctcaggtttagctctgttactcagaatatgacgaatccaagttttaactaagagtttacgattagcaccattccagcaaggatgagtccctaaatcacgttgacgaaaatcatcatccagagcgattttgaagttggaaccttccatcgtgatggaaactgtaataccattttcaaatcgcatataaacgtagttaggagtcatatactgttcaatttcgcatactgatccattttgatgtttccaaaggcagatagtatcaatagaacctgcaataccgttagaaacatatttacgttcaaagttgatgtagttcattttattctccaagatgtttaattgcggtacaggtatataatatcatatcctgcaccaaagtaaacaattattttactactttccaatgcttcatatcaagtttaccaacttttttcatcttctcaattaagcgttcggcacgttggcgagctgtaacataataccattcacctaattcattttgttcaatttttccaacgattactgtattcaattcataaatccaaccagtaaagaaattatgaacttgaattgtaaaggtgaaatctgttcccataccttctgttgtttctacttcaataatatcaccttcaactgccattaagaaccacatagtttcatcatatttaccattgaagcatttagttttaactgcagcgttcagattaatcgttttcattttattctcctttgtttgtgtaagataatactatcacaaaggaaccatactgtaaacaactttgtgcaatctttggaaaataaaaaaggactcccgaaggagtcctcaacttatgctttctgcttaccaaaacgagaagcatcatctcgaagaaccgcacgtgctcggcgcatgatcttctcaacagtttgattgatacgagagttcgacccacgcttgtagccagcgcgtttagaatcaccaactttcttttcaactgctttctttgctttagcttgttttgccattataaattctcttttaaatgaaaatgcaggacttattggcattgcctgcgaaagccctcaaggggtacttaggttttgaatatttaccgacaggataaccataaacctcgtcaacattcaagaggtacaccgtaaaacaaagttcgacggctcctcgttttaacttcacactaaggcagtgactctccaataaattacttcagtgttaccacaaagtgacgaactgcttttcgtgcggcagaagccagaggcttagcatatttaagttcatctttttcctgaagctcggcagctaatgcagtttgagcaggattcagatgtttgaaataacgcaggatttcaagagcttcggcttcaacatcaatagatgcgccatagttttcgtgaccattattccatgcgtttcgttgcagttcaagagcgtgttgtaattgtttaatcatttaaaaattctcgttagagattaaaactcggtagtcacgttcttctgaatttcatcttctttcgacagatctctcagttgtagactaccacatagaattgaaactcaattcatattattatttatatcacttataaagacacggaatagctttataatgacaggtaacgaatttttgtttaatttcttttggctgcttaagacccagagctacaaaaggatgcggaacgtttcgaatttgaccaactggaagagaagtcaaatcaccgacttcgcaaaaaccttcaggaacatcaggaccaacagagtgaactacacatagttcaggaacttcaccttgaacacgtttaccgataataagtcctgattctgtaacttcttcatcaccggcttgtgcaggttcagaaactaaaataacatattcaccgacagcacgaattggtagctgttgtacttcagacatcgtttttcctttttgttaacagatgaattaataataacaaataattcttaaagcatttatttaccaataaattgaagcaaatgctcaactttcataccattaacggaaatcaatttgtcaatagaaaaacctcgccatgcaccaagttcaacatcaaatactggaatcatgtcagtagattctttccgagtagattcagtcaatttaccagtttgcatggttggcataaagtctgcatcacgagtacctttcatggtacgaatagtaccatcagacttttcaaaaactacgtttgaaacacccatggacagtttggttttcaaaatttcgcgaattgctactttctgctcagttgtcagtttcatttatttacctatcacagttttaatatgagttgttccacgttctttaagggtggaaagtaatttttggcatttttctaaatcagatttccaactatatggtctatcaatactagtccaatcagttttataatactgtttccatttagagaaaaaatatttcttatactctacagcaaacgagatgttctcattagaataagaactaattgctgtaagctttaccaaacgaaatttcattattcaccacagaattcgttgatattttcccagtttaacttattcaagtttttcttaggaacattaaacacttcaatacctgcatttcgcagaatatcgtcccagccaggtttatttttatcgtatgtttcgcaataaaccagctttttaataccagattgagctatcgcttttgcacaatctggacaaggagaaagtgttacatacatagtagcaccttcaatagaagaaccatttcgtgcagcaaacaaaattgcatttagttcagcatgaatttcatttttagacgaccaatcagagtgagcgctgcgatattcttttgccaaaacaaatcgatcagttaaaccaaatgatacgtattctggcttatgagcttgaataatagtatgtttaggcttattcagcaaccagcctttctcggcagcataatcacagcagttcacaccacctgcaggtgaaccattatacccagtagaaataatacgtccattcttttcaattactgctcctaccttccaggagcaacattttgattcttgtgatactaaatatgcaatttgaagtactgtactcgctttcatttcataatcaccagataagcagatttagcagtttcaacacgataaatttcgtgacgaagtttagttatacttttaataacagaactaattatattctgcccatctttaaagcggtttttcttatcgataaaaattgcgccaatcatctttttgtgaagctcaactggatacttcgtcacaataatagcatcatacacagaaggatgaatactattcactagagtatcattcattaaagttattctaatgaactgtgctgtttcagaatcaagcgctctatgatcgccagtatcattttcaagacaattatcaattatatcagttaaattcatcatagtacgccatacaccctttgtgcttcaactaatccatcaaaatccagtttaagatgcgatatttgatcgccatcacctggattcacaattactaacactgaacgaggagtttcggtaataacacgaaccgatgtttcaggaaatcgttcagaaaccttatttactaattcctgtgcaaatagtttaactttttcttggaattctttaacagtaattggtttttcacttagcatgttgatccaagctccttactttcaacgtttttaactaatttgacagaaactaattcagcatcttgggtaatcattaccgggccttcttcatattcttcaagatattctagagctttctttttagcttcttccttcgtatcagtttgagcatagatatagaacatacaaccagtaatacctactactttccacttaatttctttatcagttttaatttcaaatttactgacagaatcatctttttgaacttcttcgaaaaaagaatattctaacatataagcaattgaaaataacgggctatctttataggattcgcccattacatcaatggctttataccagcagtcatcaatttcgcgtttaatgctaataacattctttgcagggtcaatttttactttaaatgaattttcatcaataaactgggcaattcgtttattagccccgcaagtttcattaaaaatatctttatacccagttttaaagcgataaaccttatcttcttcaaaccattcgctcatttcaatttcctcaattgttttggtagagctataatatcacaactctaccgtaaagtaaaccattaaatcgctttgaattctgatgtctgtgattcaaagcgaatatcgcctttgatgactagctcagcatcaagaccgaatacgacaatgatatgcgcggaacctggatacagcgtaattgcaatagaatccacttggtctggaagcaaagcgttcaatacatgagtcacttgagcatgaattcgaagctcagctgcgttatcaagtttttcaaacatattattagcgataatttggctaaacactacttctacgattttagagtaagtcggaaacatatttacctcacataattttcttcaagccaattaataatacccaagtttcatgatgtaaagccattaaaaatctcccgaagcgacttgccagcattcaataccgatgcgacgccacatttcaactacttgagttcggtcatcaatagctaatttcacatcaaaatgtggtgcgatgtgtttccagaaaatttcttctttaactacatcatctttacgggtatcgccttgttcgcgttgacattgcataactaatggaacgccagcaatatcctcaacccatttacgggtcatacgataatatttcgtcgggtcttcttcagttccactttcacggcctgaaacgactacgatttgataacccataaaagcacacatcttagacagttcaacaaccataggattgataacatcggtatcgcatttttcaaggtcataaggaccacgaccattcattttggctagtgtaccatcgacatcaaaaataactgcttttggtttaccaggagtccctttgtataccggaagaccgagatactctcgcattcttttatacattgagcgtaaaacatcaattggcactgctttagttccacgcttttcgttacgtttaactaattctgtccaaggaacatcaaacactttatattcaatttgatggccaagctctttggcaaactcttcccagaccttacgtcgttcaggattcagattagtatctgaaacaattacacccttcgttgcgtcttggcagagaatcatgttagcaacatcatgttgcatgtaagttacgatgccttctttctttttggtatacttatactcatcacgttcttcatgcgccataatagattggcgatagtcatcacgattgatattataaaacccgggattcttagcaataaattcacgagcccaagtgctcttaccagaaccaggacagccaatagtcaaaataatctttttcatcatttaattcctaagaaaacttcaagaatacgaatattgtgctcacgccgtcctttgtacaattcagctgttgattgattcgctgatttactctgaacattagatgaaataaattttatcatgtgatttttaagctgatacatatcaagtccacgagctttcgcttcttttcgcagggctttaccagcatcatctaaagctttagcagggtcttcatcatttaatactattccacgatccaaatccatgtatactgcgccatgacatgcatcaatgtaacgatccgagcattcaatataacgttctagcagggttttcatttatttttctcaaccaatgattgaatataatcatgcaggtctttagatgctttaccccacttattttgatattcatttttgagattagcacgtgattgagctaataaaacatcattagttggaggtaaagattctaaccgctgaatctggcgtccataaatcattgcagccatctcggattcataaatcaatcctttgagatgttcaaattgatgccatgaaatcatttgcatttatcctcttttaactcttgacgataataacatatcatagttttctgatcatgtacatatcgttttacatcattaagccaaatacgaaattcctgggaatcttcaaatggcataccgacccaagctttaccatcaataactttaacttgccaagatagtttagcttcgtcatatgactttatttgtacaggccaattaggatgaactgtttctttctttacttctagaggctttgtcgaacaaccaactagaagaccaatagataatattactgctgatagtttaatcatttagaaaggtcctggatgtcttctgcgaacttgttgaaggagttgttgatttgtttttcaaccaatcctggcttatgagccaccacatccgccttctttgcatctttgcgcagtttttcattttcacgctcaatagcagcaattgcctcacgatttttattattcatcgcatcaatataattatactgaattcgcaaattatttaatgctaaggcgttttcattggccgtttttgtaatttcagtaactgatgtttctaatctttctaccttattttttaaaataatagatgttccgccaaatgctattacaagtaatagcaatccagctgttgtattacttaattgcataaagttttaataacctctataatatcgtcttgagaaagaccgttaattaaaatatgatgttcagctggagatttagaaattttaaagcatgccgcaacatcttctgccatatccgatgcgctacgatttggattactaattccaagacgatgttttcccgtcaaaggattgacgatgatatagcatttgcagctattgatatgaacattaggttgagtctgattaatgaacacttcacaatcatacttagcgagttgattttctaaaaagactttcatctcctcaaccgcatcaggaagcatatcacgggcttgctcaagacgacgatttcgatattctttaatggtcgttttccgcttgacttgtttagctaaatctttcttaagatcggtgatatatccaactcgacgatttcctttaaatacagaaatcccatccgtagtatcaccgtatgcttcaacgaccatttcagtagtaataagctgcaaatccatcataaagtcctcatgttatgtcagtaagtctactgtaacacaacatgagagacttgtaaacagcttagtatccttctgggataaattttttataatttttcaaaaaattctgttcgatttcacacataaccttctcttgactatcatacccttggtagaggctcatgatgataccgaacaggtgttccattccagcacctttagcaacgccttgcgcttccatcgcataagtctttctatctttaccacaatgcttattgtgacagtcaagaactaaaaacagagctcggtctaagtacttcagataagtcgtctcaaatgcttcaatttttctatacgaatactcatcatcagcgtacattgctttaagatcgtctgatgcaccatcaataatagtcttaaacagtttttctggattatctaatgaactttttgtactatgaagagacacataccagtcagacttaattttaaaatgagaaccatctttcatcacagcaacatagccttcgatgttttctgcatttttagcttcttcaacccatttaggactatcaatttcgtatcgttcaactaaatatggacgaagaacagcatctttataaatatcatcatatgaaatgtattcgcctgtttcattttcacgaatattcaataaaatgattttcatctcttgataagcaagaacgattctattagttggagcgacaaattcgaagttagcagtaaatccatcttcggctaattctttaagtctgtcgcgcaactggtgatgattaatattcatcaaaattccattagccattaaagcctgttcggatttgattgaaccctttgatttgaacagaatttcatcaccgtctaaataagttgataccaaagacccatcttcttttgttagaatgtaatcaacatcatttaaatcgatattcatcgtgaatggattttcattcaagttaaaaaacttttccataggacgagaagcaattcttaccggtttttctccatccatttcaaacataattccacgacattccaatgcgtctggaagtaaccaatcagaataagatgcataattatatgagaaaattctgtaagttcttccagatgcacttacatcatccgagtaaaaaaacttacgttgtgaatccttacatagttccattaaattgttaaaaagttcttgcattgtgtatcctcttttgtgttttgaatatagtaccacactccatgtggaagcatcattttttcttatgttgaatattccaaggcgggttaaatagcttaatgaatagcggctcctctaggtcaatcgttgcgattgtcattgtacctaactcatttgtcatagaaagattaaagcattggcgggcgtaaaattcaactttgcttccttcctttagcgcagcatgaattaatgcagatttagtagaatcagacgttttgtctttacggttaatagcagttctataatagtttattcttttacgtaaatttttagtttttccaatataaacaagctcatcatttatagcaatagcataaattacgttatacttgtttggaatagataattgttttatacttccattgtcgtctaattctaactcagtatatttaataaatgaatattctgttgcaatttctttcataataaaatgggccttgcggcccactccttaaaagtattttttaaaactcatcataactttatcatcaacatcattatcaatctgtgcaacaaggtaagatgacagttctacttcttgcggcgcggattgaacattatcagaattaaggtattcacgaatccaaggatatggatgtttaaccggagcatcggtaattgggcatggaagaccacactgtttcatacgagatacagttaagtaatcaataaagctccacatactatttgtatttaatccaggaacatcaccatctttaaataaatgaactgcccagtctttttcttgacggttaacttccatgaaaatatcaactgcttcttgttcacactcttgggcgattttaacccattcatcaccatcagtgccaagttgaagttgacgaataatgtactgagtacctttaaggtgaagctgctcgtcacgagcaatgaacttcataatcttggcattaccttccatgatttccatgttcttatggaagttaaaggtacatgcgaaagatacataaaaacgaatagcttccaatgcgttgattacatgcagacaaaggtaaagagaacgcattagttcgtatttgcattcttctacatgcataaggctatttgaatatgagtccaaatcatattcattctctgaaaaacacctaaaaatttcttttgcgttttcccattcacgagttttctcaataacatcatcataataacgaccaatagattcagcgcgtttcatgatagctttatctaatacaatctcatcaaatacctttgacggatcagtataaagatttcgcatgatatgagtatatgaacgactgtgaatagtttcactaaaagtccatgtagcaacccatgtatcaaggcttggatctgaaattaatgacataagtacagcagacggtgcacgaccctgaatgctatctaaaagtgattgatacttcaggttattagtaaaaatatcttgctgatactgaggaagcttgttaaattgtgcagcatccatcatcaagtttacttcttcaggacgccagaaaaatgacaattgcttttcggttaaatcttcaaaaactttatgacgttgaatatcataacgcgcaataccaagacctgaaccgaagaacataggttcctttaaaacatcaactggatttgtattaaaaactgtgctcataaattttccgcttagttaatagttggtgactcgtccgtgagtcaaattatatcataatttacaggatgaacaatcttcagcttttggagtttctatttcataatcatcagtaccggaaccatcacgggtattatgataatagaaattttttccgccaaaataccagaaatacaaaaggtcatcaatcattattgacattggaacctttccttttggaaaaatctgcgggtcatagtatgtattcgctgaagctgattgacatacccatttcagcataatagctacctgcgtaagataaggtttattacctttcttagctaatttccatgtataatcatagaggtctatgttatgctcaatattgggcacgacttgattaaaggagccctcttttgactctttaacagagactggtccacgtggaggctcgataccgtttgtactgttagaaacttgggaagatgactcacatggcataagtgctgataatgtgctattacggatgccaaagagcttaaggtcttcccgcagcgacgaccagtcacaaacgtattttggagctgcgatttggtcaatctttttattgtaccagtcgataggtaattcgcctcgagaccaacgagtgtctgaataatattcgcaaggtcctttttctttggcgagcttaatggatgctttaatgagtccatactgtaatctctcaaatagttcatgtgttaaatcgttggcatcttcataagaagcaaagttacttgccagccaagctgcatagttggtaacacctacaccgaggttacgacgctttttagctttttctgcttcaggaactggatatccttggtaatccaaaagattatcaagagcacgaacttgaacttctgccaattcattaattttatcttggtcttgccagtcaaaattatctagtacgaatgcagagagagtacacaatccaatttcagcatcaggaccattcacatcatttgttggaatagcaatttcacaacacaagttactctggcgaataggtgccttttcacgaataaacggagtatagttattcgtattatcaatgaactgcacataaatccttgctgttcctgaacgttcagtcatgagcaattcaaatagttcacgagctttaatacgctttttacgaatattagggtctttttctgctgcttcgtataattcacggaaacggtcttggtctttaaaataagaataataaagttctccacccatttcatgcggactgaacaaagtaatgtaatcgttctttccaaaacgttccatcatcaaatcattcagttgaacaccataatccatatgacggatacggttttcttctacgcctttgttatttttcaaaacgagaagattttcaacttccaaatgccaaataggataataagcagtagcagcgccgccacgaattccgccttgtgaacatgatttaacagcagtctgaaaatgtttccaaaaaggaataacaccggtatggcgtacttcacccatgccaatcttagaaccttcggcacgaatcataccaacgttaataccaattccagcgcgtttagagatatattcaacaattgaagcggaagccttattgatagactttaatgaatcacctgcctcaataacaacgcatgaactaaactgccgagttggagtacggcaaccagccataataggagttggcaatgaaatctgtcgagtagatactgcttcataaaaacggataacatgttttagtctatcaacaggttcatcttgatgcaatgccattccaatagtcataaatgcaaactgtggagtttcataaatttgaccggtggttttatctttaactagatatttttcttttaattgcatcgccccggaataagtaaattccatatcccgctcgtgcttaatttttgattctaaaaatgtaatttcttctgcagaatattttgacaacaattcagggtcgtatttaccttcatttacacagtaagaaatatggtcaataaatgaacgtggttcatattgcccgtaaacatgcttgcgaagagcgaacattaaacaacgtgcagctacatattgataatcaggttcttcaaccgaaatagaattcgcagcggccttaatgacaatagtctgaatatcatcagttgtcattccatcacggagataagatttaatattttcatataattcataaggatcgactgatgttccttcagctgcccaagataaaactttaataattttttgtgggtcaaagctctgagaaacaccactacttttgataacattaattaattgcataagtcctcaacttgaaaatcgtctttaaacaatcggttaactatatgagctattatatcaccatgacacggctttggtttacatgtgcatcctagcctcattccacgtaaaggctctaaatgtgctttagttatttctccggatttaattcgacgtataaaatcttttttgaataattcaatggcagcctcccggctgccagcatctttaccgacgtaatttccccaaaatgtaccacggtgaatattaacatcaaagtcggatttatatttattcactactcggcatatacggcctgcgcggttgtaagtgttcatattgttcttccgttaaaacagtaatatcgtagtaacagtcagaagaagttttaactgtggaaattttattatcaaaatactcacgagtcattttatgagtataatgttttttaccataaatgataataggctgatttggtcctggaacttctagctcacttggattaggaagtgtaaaaagaactacaccagaagtatctttaaatcgtaaaatcatatatcctcgcaattaaattaaaattataccgccatttttcctttaattggcagatgagatacatagttgttaagaacaaaattatgaggctttgcaaattgactcaaccaaaatacctgcgattctgtgccccattcatcaaattcatctggaaattttaattgtaattcgcataaatccataggttcacgacgtaaaatttctttacattgttctacgtgattcatatagatatgagtattaccaccagaaaatatcaaatctccaggaataagattacacattttagctacaatatgaactaacgtagcatatgatgcaatattaaatggaagaccgaggaaaacatctaccgaacgttgataccactggaggtcaaggtatccattacgcacattaaactgatagaacatatgacaaggcggtaatgccatatatttaagttcagctggattccacgcagaaacaatttgacgcctatcatttggcagttttttaatacgatcaacaacttctataatttggtctacaccaccgaaatcacgccattgtttaccgtatataggaccaagttcaccactatgatatcctaaatcttttgcttgattttcgtaattttcatcccagactgttttgccttgaattaatgaatcgtgctgaattaatcgtaaatcattgacatttgtgcttcctgataaaaaccaaagcagctcagcaatgcaagctttccaggcgagcttcttagttgttaccgcaggaaaacctttagttaaatcccagcgtaatttagtaccgaacaaagcaattgttcctgtgcctgttcggtcatcggtttcatagccattttcaaaaatgtctttaattaaatcttggtattgtttcatttagtaccttatacaaattataatacattttatgaagctaaataatcaatacggtttagcatcaaattttctctcaatttcaggtgtgaaatataattctttgccacgtttggaaaagcgaccaataatatgataattattctcatcaaacgtgatattaccaatatccatagctttcaaccaaatatcgatatttctatccagctttatgtcaaaattccaatacggagaactattaccgaaaatactgcaagcggattcagtgaaacaactgctataaatcttgtctttaggaactactaattgatagacacctttaataaactgaggaccctgccactttggctgtttctcatctttttctaatagaatagggtaataattaaaattcatattttccaccccgcggtatttcatttttatatactgattccgtaagagttgttacttcatctattttataccaatgcgtttcaaccatttcacgcttgcttatatcatcaagaaaacttgcatctaattgaaccgttgaattaacacgatgccttttaacgatgcgagaaacaactacttcatctgcataaggtaatgcagcatataacagagcaggcccgccaattacacttactttggaattctgatcaagcatagtatcaaatggtgcattagggcttgacacttgaatttcgccgccagaaatgtaagttatgtactgttcccatgtaatatagaaatgtgctaaatcgccgtctttagttacaggataatcacgcgcaaggtcacacaccacaatatggctacgaccaggaagtaatgtagataatgactggaacgttttagcacccataatcataattgtaccttcggtacgagctttaaaattctggaggtcctttttaactcgtccccatggtaaaccatcacctaaaccgaatgctaattcattaaaaccttcgactgttttagttggagaataagcgaataccaatttaatcattacgcaaagcccctttcaagaaaccattcagtggctttattagcatcaaagaataattcttcatatgtcttttctttgttttcaaagactgtcacacaaacacgttgacattctccgcagtattcttctgacatactcaaagcgtcagaaaacatttcattaaattcacttaaatcaggattatgcaatgcgttaaaaattgcataatcgaattcgtcattcataaattcaaatacaaaaatcatattattttccttaaacagactttttcacatttttccaatcagctttaaactgctcgacgtcagaatggtaaatccaaaatcctgcgctttctccatcttcataaagaggacatccatcgcattcatcttcccatcccatatcacgtaaaagatgctcagctttttcaacaagttcagaatctttaccgatgatattaaaataccatttacctttaacttgtgaatctttgatgctctggcgttgtaatctcattttattctccttagttgatagggtaatagtatcacactactaccctgatgtaaactactttttgaaagtttttcgcaaaagttcaataatttcatctacattgttttcgtcaacaatgcagtgaattttcgttacgccggaaaccttgtcttcgacttcatcttcttcagaagtaggttctttatactcacgaaaacaatgaaattcgtcttcacaaacgttaaagtaaaaatgctttccatttgcgcattcaatgtgttttattactctaaatccatcagcagagaaagcttctttaacttcaaaccatccgccattttcttgaataattttaactattgctgaattagaacgtgggctataattaataaatgtatcaataagtcttggaacaagttcatactttttaccagtatacataatgtttcctcattttaataggggcttgatagccccttaataattattgttcgatcagtcccatgtaaaattctgcgtcttcagaatccatgccatcacagtattcattagccataaagcgggtgaggtcttcaagaggaccttcaataacgatttgaatactccaaaacttagaatcttgtacatttgtgattctaagttcaggataacgattacgaataatttcttcaatatattcaaaatcaacgatgtcaatatcaactttagccatgttattttcctctttaatcatcagcagtattgccgatagttgtatagtaccatagaagagcaaggatgtaaaccattttgtgaaaaaaatttgaaataaaaaaggggacctctagggtccccaattaattagtaatataatctattaaaggtcattcaaaaggtcatccaggtccgtgtcatcagcactagatgaactgccagagcttgagctcataaaatcatcttcagtttttgttttgaagtcatcaacattgaatgcatccaaatcatcagcaactttatcagctttcttagcagcagttgcagcggcaccgcccatcacagcagttcccatgacttgaccgaatttagtgctcagttcttcaaacgatttgaatttatctttagaagtcatttcagaaaggtcaaccatttgttcgaacagttctttctggaaagattcatcatcaatgtttggaatcgcagattgattcaggaatttagattcatcgtagttactaaatccagaaacttgtttaactttcagtacaaagttagcaccttcccacggacaagttacatcaaccggagtttcacccatttcaacatcaaccgcaatcattgcattgattttatcccagattttcttaccgaaacggtatttaaatactttaccttcgttttctggagcagctgggtcttttacaacaagaatgttagcccagtaagaagttttacgtttaacaagactgtactctttattgtcagtgttgtacagatcatttttactgatgtactgacatactgggcaagaatcgtaatcaccgtgggtagatgagcaattttcgatataccatttaccgtttttcttgaaaccgtgatttacaagaattgcgaatggtgcttgttcatcatttttagacggaagaaaacgaattactgcttgaccgttacccgcattatcgagtttcagtttccactcgcctttatcttcagaagaaaaaccacctttatttccagccagtttagccatttgtgcagcgagttcagcagtagatttacgtttaaacatttttatttcctttttaatttaattaacagttggtgctatgacgatgtatgacctcatagctggtcagtgagataattataatctatttataataagcaattaatacttacaagatttcacagtttcaatgaaaacatttttagctttctgtgaatcaatatttaaaatttttctataagcctttaactttatagaataattattccagactaaattatcagtctgttcatcatgtttatcaattatatttaaaaatgaatcaagcaagataaacgtctcaaacgaaattatgttcgattgcagaagtttaaaaatataacttgactgaacttttggattatactcaaagatttctttaaaagcagaaacttcaacttttttactaaaataataaatgttgcgaatatcttcttcaaacttaaatttaatttgctttaagcgtccgatatattcacgataaaacacaagtgcatcagcgtcagagatgtcaccaatccaagcatcctggttagcaaccagattgcttataaagattaaagcaagttcctttaatttatatttttctgataacttctggaaaaaatacttatcccttcgcttttgataagcggcatcagacacccgcatgcaccaattatacttaattacatcatactttccattcatatgttgttttatcattaagtataatttataaactgatttaccatcaatatatctttcaccaccagcaggcatgcggagtttaatcatagtagaaaatctaatgtattagttttttcacaacgaacaacagaaggacgtaaaagattttcgtcaatagcttctgactgaattttttcaattatacccgaaggaataaatttagcaaattgagtttcaggaatagagttttcttccaagaatgctgtcgtagcttcaagataactcattccaaattcttctaccatcttttcaataataaatccattttcttgtcgatcaagaagctttgcgatttcatccttttcttttttgattgaaagttctttttctgaaagaccggtctcatcgaccggacgaatatcatttagagaaaactgtgtcataaagttcaactacctcttcagtttcagcttcaaacacatcacggttatctttatgatacaaagctaatagacgattaaacatcttaccatcaacgccaagttcatctttggcgcgaattcgaatatctttaatcaattcattataaccagaaattttcagtttatgatcagatgcttctttgataaatttagccaagtcttcgccgtggatagcttcatcaaattcaaccatttcttttttagccattattcacctcaaaattcattaatgctattagttaatttagaaagacccgcttttacaaaatatgaataaattttgccacgcggtggtaatttatatgaattatagtaattcacaatgtttgaagcaatattatcaggaatataatcaaaatcaattagaactaaattttctttgtatcgattatattcagattcggtaagaagcaccttagcttgctcacggtcattagcaatagcttcaacgattgaagttttcattgaaggagttcgttcaccttcaactctggtaaaccaaaagtcagaccgtactttaactgaagcaacgttatcctttttgtcgcctttaaggattttagtcatacagtcaatttcagcagaaccacttttaattttaacccatttcttgtgcatcggtgaccattgcttaacatttggatatttgtgaagttgagtaaagtcaccatccgatgaaatgattaaaatcttatgtccttctaaagagaactttttaacaagaacagcaatgtggtcatccgcttcatacttatcaatatccataacaatatatggcatataagctttcaattcatctataactttatggctggattcaaaataaccttcccagtcccaagtagattcttctcgtgcttttccacggtttttcttataataataagcgaaatcacgacgccaatatccagatttcgcgttatcaatacacagcacaattttagtgtatccaagcgtttttgcttttttgacattaaacttaattgagttcaatatcaaatgacgaaccattgataagttaattttttctttatctgggaagtttactaaagcagttgaaagcgcaatctgactaaagtcaattaagcaaattccttctttgtaatcttcatccagcatcatttctaaatccatatgaacctcgttcaattagtgagatttctattatataccatccaaatcttaaagtaaacaagtataaatacttattattgaaaacacaataggagcccgggagaatggccgagattaaaagaaagttcagagcagaagatggtctggacgcaggtggcgataaaataatcaacgtagctttagctgatcgtgccgtaggaactgacggtgttaacgttgattacttaattcaagaaaacacagttcaacaatatgatccaactcgtggatatttaaaagattttgtaatcatttatgataaccgcttttgggctgctataaatgatattccaaaaccagcaggagcttttaatagcgtacgatggagagcgttacgtactgatgcaaactggacaactgtttcatcaggaccttatcaattaaagtcaggcgaatcaatttcagttgatactgcagccggtaatgacattacatttactttaccatcttccccaattgatggagatactatcgttctccaagacattggaggaaaacctggagttaaccaagttttaattacagctccggtacaaagcattgtaaattttagaggtcagcaagtacgatcagtactaatgactcatccaaaatcgcagatagttttaatttttagtaatcgtctgtggcaaatgtatgttgctgattatagcagagaagctgcaattgtaacaccggcaagtctttatcaggcgcaatctaacgattttatcgtgcgtagatttacttcagctgcgccgattaatattaaacttccaagatttgctaatcatggcgatattattaatttcgttgatttagataaattaaatcctctttatcacacaattgttactacatatgatgaaacaacttcagtacaagaagttggaactcattccattgaaggtcgtacatcgattgacggtttcttgatgtttgatgataatgagaaattgtggagattgtttgacggggatagtaaagcacgtttacgtattataacaactaattctaatattcttccaaatgaagaagttatggtgttcggtgcgaataatggaacaacccaaacaattgaacttcagcttccgactaatatttctgttggtgatactgttaaaatttccatgaattacatgagaaaaggacaaacagttaaaatcaaagctgccggtgaagataaaattgcttcatctgttcaattgctgcaatttccaaaacgctcagaatatccgcctgaagctgaatgggtaacagttcaagaattagtttttaacggtgaaactaattatgttccagttttacagcttgcttatatcgaagattctgatggaaaatactgggttgtacagcaaaacgttccaactgtggaaagagtagactctttaaataattctactagagcaagattaggcgtaattgctttagctacacaagctcaagctaatgccgatttagaaaattctccacaaaaagaattggcaattactccagaaacgttagctaatcgtactgctacagaaactcgtagaggtattgcaagaatagcaacaactgcgcaagttaaccaggatactacattctcttttgctgatgatattatcatcactcctaaaaagctgaatgaaagaacagctactgaaactcgtagaggtgttgctgaaattgctacacagcaagaaactaatgcaggaaccgatgataccacaatcattactcctaaaaagcttcaagctcgtcaaggttctgaatcactatctggtattgtaacttttgtatctactgcaggtgctactccagcttctagccgcgaattaaatggtaccaacgtttataataaaaacactaataatttagttgtttcacctaaagctttggatcagtataaagctactccaacgcaacaaggtgcagtaattttagcagttgaaagtgaagtaattgctggacaaagtcaggaaggatgggcgaatgctgttgtaacgccagaaacgttacataaaaagacatcaactgatggaagaattggtttaattgaaattgctacgcaaagtgaagttaatacaggaactgattatactcgtgcagtcactcctaaaactttaaatgaccgtagagcagctgaaagtttaagtggtatagctgaaattgctacacaagttgaattcgacgcaggcgtcgacgatactcgtatctctacaccattaaaaattaaaaccagatttaatagtactgatcgtacttctgttgttgctctatctggattagttgaatcaggaactctctgggaccattatacccttaatattcttgaagcaaatgagacacagcgtggtacacttcgtgtagctacacaagttgaagctgctgcaggaaaattagataatgttttaataactcctaaaaagcttttaggtactaaatctaccgaatcgcaagaaggtgttattaaagttgcaactcagtctgaaactgtgactggaacatcagcaaatactgctgtatctccaaaaaatttaaaatggattgtgcagagtgaacctacctgggcagctactactgcggtaagaggttttgttaaaacttcatctggttcaattacattcgttggtaatgatacagtcggttctacccaagatttagaactgtatgagaaaaatagctatgcggtatcaccgtatgaattaaaccgtgtattagcaaattatttgccgttaaaagcaaaagctgtagatagtaatttattggatggcctagattcatctcagttcattcgtagggatattgcacagacagttaatggttcactaaccttaacaaaacaaacgaatctgagtgcccctcttgtatcatctagtactgctacgtttggtggttcagtttcggcaaatagtacactaaccatttctaatactgatggaacagcaactcgtctgatttttgagaaaggacctcaaactggaacgaacccggctcaaacgatgacagtcagcgtgtgggggaatcaatttagtggggaatcaaacacaacacgttctaccgtatttgaagttagtgatgaaacatcttatcacttttattctcaacgcgataaagatggtaatatagcatttagcattaatggtactgtaatgccaataaatgtgaatgctttaggttctttgaacgcgaacggcgttgcaacattcggtagttcagttactgctaatggcgaatttatcagtaaatcagcaaatgctttccgtgctattaacggaaattatggtttcattgttcgcaatgatggatcagtaacgaattttatgcttactgcatcgggtgatcagactggtggatttaatggattgcgtcctttagctattaataatcaatctggtcaggttacaattggtgaaagcttaatcattgccaaaggtgctactataacttcaggtggtttaactgttaactcgagaattcgttctcagggtactaaaacctctgatttatatacccgtgcgccaacatctgatactgtaggattctggtcaatcgatattaatgattcagccacttataaccagttcccgggttattttgaaatggttgaaaaaactaatgaagtgactggacttccatacttagaacgtggcgaagaggttaaatctcctggtacattgactcagtttggtaacacacttgattcgctttaccaagattggattacttatccaacgacgccagaagcgcgtaccactcgctggacacgtacatggcagaaaaccaaaaactcttggtcaagttttgttcaggtatttgatggaggtaaccctcctcagccatctgatattggtgctttaccatctgataatgctataatgggtaatcttactattcgtgatttcttacgaattggtaatgttcgcattgttcctgacccagtgaataaaactgttaaatttgaatgggttgaataagaggtattatggaaaaatttatggcagagtttggacaaggatatgtccaaacgccatttttatcggaaagtaattcagtaagatataaaataagtatagcgggttcttgcccgctttctacagcaggaccatatgtcaaatttcaggataatcctatcggaagtcaaacatttagcgcaggacttcatttaagagtttttgacccttccaccggagcattagttgatagtaagtcatatgctttttcgacttcaaatgatactacatcagcggcttttgttagtttcatgaattctttgacgaataatagacttgttgctatattaactagcggaaaggttaattttcctcctgaagtagcatcttggttaagaaccgccggaacgtctgcttttccatctgactctgtattgtcaagatttgatgtatcatatgctgccttttatacttcttctaaaagagctattgcattagaacatgttaaactaagtaatagaaaaagcacagatgactatcaaactattttagatgttgtatttgatagtttagaagacgttggagctacaggatttcctaaaagaacatatgaaagcgttgagcaatttatgtcagcggttggtggaactaataacgaaattgcacgtttaccgacttcatccgcgataagtaaattatctgattataatttaattcctggcgatgttctttatcttaaagcgcagctatatgctgatgccgatttacttgcgcttggaactacaaatatatctatccgtttttatgatgaatcgaatggatatatttcttcaacacatgctgagtttactggacaagctgagtcatgggaattaaaggaagattatgtagttgttcctgaaaatgcagtaggatttacgatatatgcacaaagaactgcccaagcaggtcaaggtggcatgaggaatttaagtttttctgaagtatcaagaaatggcggaatttcaaaacctgctgaatttggcgtcaatggtattcgcgttaattatatctgcgaatctgcttcacctccagatataatggtacttcctacacaagcatcgtctaaaactggtaaagtgtttgggcaagaatttagagaagtttaaattgagggagccttcgggttccctttttctttataaatactattaaaataaaggggcatacaatggctgatttaaaagtaggttcaacaactggaggctctgtcatttggcatcaaggaaattttccattgaatccagccggtgacgatgtactctataaatcatttaaaatatatacagaatataataaaccacaagcaactgataacgattttgtttctaaagctaatggtggtacgtatttaaataaagtaatttttaataaaggaatgactgttcccggcgcggggtcaggtgataatggcatttttgctggtcctggtgatagtgccacgtatgatactacaaatatggatattgtttcgtggtatggtattggttttaaatcatcacaaggaacagcaggtagaactgtagtaattaacacacgaaatggagatattagctcaaagggcgtaattgaagcatcacaaatccgtgtaacttcgttatcaccagtaaataattatgaccttacgcggaaagattatgttgatggagcaataaatattgttacagcaaacgcaaactctagggtattacgctctggagatactatgacaggaaatttaactgcgccaaaccttttttcacagaatcctgcatctcaaccctcacatgttccacgatttgaccaaattgttattaaggattctgttcaagatttcggctattattaagaggacttatggctactttaaaacaaatacaatttaaaagaagcaaaactgcaggagcacgtcctgtcgcttcagtattagccgaaggtgaattggctataaacttaaaagaccgtgtactttttactaaagatgaccaaggaaatattattgatttaggttttgctaaaggcggtagtattgacgggaatgttattcatacaggtaattataaccaaactggcgattatactttaaatggcaccttcactcagacaggtaattttaatttaactggtattgctcgagtaactcgcgatattattgctgctgggcatattacgactgaaggcggagaatttattacaaaaagttcaggtacagcgcatgttcgttttcatgattccgccgaccgtgaacgcggtattattttttctcctgctaatgacggtttaactacacaagtagttaacatcagagttcaagattacaaagctagttcagaaagcactttcgcttttaatggaaatggtttgttttcttcaccagaagtttttgggtggaaatctgtatcaactccggtaatttataccaataaagttatcaccaataaaaaagttaaaggtgattatgacatctattcgatggcagacagtgttccattgtctgaaagcactactgctattaatcatctccgtgttatgcgcaatgctataggcgctggtgtattccatgaagttaaagataatgatggaataacttggtatgccggagatggcttagacgcttatctttggtcgtttacctggtccggtggattgaaagcaggccattctatttctgttggtactcctggtggcaataaaggatactctgaattagggactgcttcaatttctcttggcgataatgataccgggttaaaatggtaccaagatggttatttctatgtagtaaacaatggtacgagaactttcctttacagccctgaatcaactgtaagccttagaaaaatggtcatgggttattctgtaaacggcaacgatttaactacgccgccaacagaaaactatgctttggctactgtcgtgacatatcacgataataacgcggttggagatggccagactcttttaggatattatcaaggcggtaattatcatcactatttccgcggtaaaggtactacaaacattaatactcacggcggtttgttagttactccaggcaatattgacgttattggtggttctgttaatatcgatggtagaaataatgcttctacgctgatgtttagaggtaacacgaccggagctagttcagttgataatatgacaatttccgtgtggggtaacacgtttactaatcctagtgtaggtaatcgtaaaaatgtcatggaaatttctgatgcaactagttggatgagctatattcaaagacttactactggtgaagtagaaatgaacgttaacggttcatttgaatcatctggtgttactgctggagatagaggagttcacacaacaggcgaaatttcatctagagcagtgaatgctcttcgcatttggaataatgactatggagccattttccgccgttcagaaaacagtcttcatattattcctaccgagtttggacaaggtaaaaccggtgatatcggtccacttcgcccgttccgcatggaccttgatacaggtaaagtaagtattcctaatatggatactactaatttggttatgaacacaaatggttttattaaatttggcggtcatggagcgggtgccggtggttatgatattcaatatgctcaagcagctcctgttttccaggaaatcgatgatgatgctgtaagcaaatattatcctattgttaaacagaagtttctaaacggtaaatccgtttggtctttaggtactgaaattaattcgggtacattcgttattcatcatctgaaagaagatggttcacaaggccatacgtctcgttttaatcaagacggtactgttaacttcccagataacgtttctgtcggcggtggtgaagctactattgctcgcaatggtaatatctggtctgatatctggaaaacgtttacttcagcaggcgacgtaactaatattcgcgatgcaatagctactcgtgttgctaaagaaggcgatacgatgacaggtcgtttaactcttaaaaccaactcagatgctgttgttattgattatccggcagatgaagcgggttatattaagggtaaaaaaggtggtgctgataactggtatgtcggtaacggtggtgctgataatggtttagccttctggagcttccaatcccaaggcggtattaatattaaccctaatggcgaggttattttagccccacaaggtgctgcaatgttcaatataaaccgcgaccgtattcatatgaatggttccaactgggttgcacataaatctggtgcttggggcgaccaatggggcttagaagcaccttatttccttgagtttggtagcgttggcgaagacagttattatcctatcattaaaggcagatctgtaattagtggtcaaggatatactacttctgttgaccttggtattagacgtacaccccaagcatggggacaagcgataattcgagttggtaatgccgaaggcgctgacggtcctgtgggtatttttgaattccattcgtctggacgattctatagccctaatatggttcaaactcctgcaatcggtgttggtactgataatggacttggtgctccaagtattgcaatcggtgataatgacacgggcttatcacatggtggtgacggtcgagttaatatggttgctaacgggattcatattgcatcttggtctaactcttaccatattcatgaaggtctttgggataccaatggtgctttgtggactgaaacaggaagagctattatttcttttggccatttagtccaacaaagcgacgcctattctacatatgttcgagacgtttatgttcgttctgatattcgtgttaaaaaagaccttgttaaatttgaaaatgcttccgagaagctttctaaaattaacggttacacttatatgcagaaacgtggaactgacgaagaaggtaaccagaaatgggaacctaacgcaggtttgatagctcaagaagttcaagctattttaccagaattagttgaaggcgaccctgatggtgaagctttacttcgtttgaactataacggcgtaattggtttaaatacagctgcaatcaatgagcatactgcagaaattgcagaacttaagtcagagattgaagagcttaaaaatttagttaaatcattgttaaaataataagaggggctgaagccccttggaggtttatatggcagttgaaggaccgtgggtaggatggtctgcgagagtacaaactggagacccttggatgggtggtgccgcacagagattgagaatgggaattccgttttggatgagtaatatgataggtcgatctgttgaagtaattcacacacttggagcagaccataacttcaatggtcaatggttccgagatagatgttttgaggcaggtagtgcacctatagtgtttaatattactggagatttagtatcatattctagagatgttcctttattcttcatgtacggagatacacctaatgaatacgttcaactgaacatacacggcgtaacgatgtatggtcgtggtgggaatggttgggccgctggtgcaattggggcatctgatggcggtgtatgtatccagaatgatataggtggacgtctgcgaattaataatggcggagctattgccggcggcggtggtggcggtggtggttattcacaagccaacaactgggcgggaaaatatgtttgtggtggcggtggtggtcgtccattcggcttaggcggaaataatggtgctcgatggcctggtggtaatgctagtttgacgtctccgggtgctggcgggaatactggtacagggtattatgcaggtggaggtggtgaagttggtcagccaggacaatatgctaatccaggtgctggttattcaacacctccgacaagtcctggcgctgctgtagcaggatcagctccaacatggcagaatgttggagcaatatatggtccaagagtataatttgaataaatatccttaaaaggagggtctatggcagcacctagaatatcattttcgccctctgatattctgttgggtgttctagatcgcttgttcaaagataacgctaccgggaaggttcttgcttcccgggtagctgtcgtaattcttttgtttataatggcgattgtttggtataggggagatagtttctttgagtactataagcaatcaaagtatgaaacataccgtgaaattattgaaaaggaaagaaatgcacgctttgaatctgtcgccctggaacaactccagatagttcatatatcatctgaggcagactttagtgcggtgtattctttccgccctaaaaacttaaactattttgtcgatattatagcatatgaaggaaaattaccttcaacaataagcgaaaaatcacttggaggatatcctgttgataaaactatggatgaatatacagttcatttaaatggacgtcattattattccgactcaaaatttgcttttttaccaactaaaaagcctactcccgaaataaattacatgtacagttgtccatatttcaatttggataatatctatgctggaacgataaccatgtactggtatagaaatgatcatataagtaatgaccgccttgaatcaatatgttctcaggcggccagaatattaggaagggctaaataattatttgttcgtatacatctctagatatcgatatacaccctcaaaaccctcgttgaattcgtcgatgagggttttcttatcttcttgggttaattcagaaacaattttacgaaatgaattctgatttaactttctaccttcatgcgttactccaatctcattcagaaatgcaataaaattagcacgattttcaacaatatcttctctggaaaatttaatcaaaatagacgcaacagtaataatttcacgaactgtatcaatgtttttattcattaactataccactcaattagttgactttattataatatcatcagacgcttgatttgtaaactggtctgtgttattttcttcaaaaattttttctacgaattccttgaacgacttacgttcctgagctacattatgctcgattaccttttcaagattatgactcattcgaaataatcttcaatttcataatcatggacataaatcattatagtttttaatacatcatcaatactttttcctggagctggaattacgtagaaatatcctgcttttgagaggtctttataagttccaatcaagaaatcattattctcaagatgaagttcttcaactaattcattaacaattgaatggtataaatttggtagaaacttatatagcttttctagaatatcaattttgattgtgtattgaaccacggactgagaatcaataatcatagaccttccccttatgtttctgtttgcgattagattctttaaacgctttcttcttatccttatgaacagaagctttattaaaattatgttttgctactaaattgttcatagtgttgaattacctctcttaaacatttgcatgtgaatgaaaactttttagctacaccacattcaaatatatgttctcttaaatcacgtgtatcggtatatcccatctcaacgataaagtgccgtattagatttttatctttatcattgagagaattaaaatagtcagattttgaattaatttccctggccaagttgaatcaccttcagttgacgttttagttcttttatcatctcttcgttcattgcaatataaagatcgcgtaaagcaggttttagcattccatttactggagaactaaatggacacacataatcttttcctacaagctttttagttaattccatatcacaaaactgaaatgcaggttcattagcataaattccccaattagttgacatcattttattggcatattccaatgcctggatttgattagtaattccgtcaatttgaaactttttaatattcattagtaaaggtcctcagagtaaagttctttttcactaccaccacgttcaatacgtacttgtccagcgtaagttgcaataatcattgcttcttcacgtgtccagtaattactatattggtcaataaacccttggtcatcatcgcaaacttgctgagtaactaattgaggtttaactacatctaaaacttctgccatatctttagaataatgacgagcacctggaataataagaattcgtccatcttttaatttaaaacggttggctgcacagacaattcgtcgttgatatttttggttttcatcccaatgtgcagtctgccaacagatttcaggaacttcttttagaatatcttcttctgtgcatttataaccatgtgctttaaatttttcaacaagactttctggagtctcacgagataaaggaacattcagcatttttaaacgattgataaatgggttcatttaaaccatcctttaatacgctgccacaaagttttctgttgagctttgttaacaccaattgaacgaataactggttgggattcctggaattctttataatcagcaaggtaaatttcgtaagctgaatctgtaaaggaacttatcgctgccatgaaattattgcgaatacctactggagcatctttactttcacgaataatcatgtatttaccagtcttaatctttacgatagttccaagataagctccgtggtaccaaatatcccacccctcttgagtaggttctgcacagcgacgaagttcattgataatttctaacttgttcattatttattcctcacagttcagatgctacggtgattacagcttcaatgttttctgcagagcgtttaatgtcaagatacacattaccatttttagcgattttacatgacattccgatatcagtaaatttctgaatatgatgttccatcattttgtatccaaaaattcgcatatttccgttgttattaatttcaaaattacgaattccgtgagtgcgtttttctaaaatagcaagataattactacgataagtttcaacctttttaagaacaaatccgttttcatccaaaagttttaacatgaagtctttatcttcttccatatcagaagtaatctcacgagctttacgagttgctcgttttttcagcagttccggggcattttcctgtgcgtataaagttgctgcatttgaaataatatcctgagcttcaccagtaatgattaatccatcaccagatttctccaccaggccttttttaatcaataccccaatattactattaactactgcgttacctaaatctggatgcacctcacgaacttctgcagctgtaatgaaatctttcttagcaatagtaattaaaatcgcagcagttttttcattcagaacatcgttagaagctttgatgatgtaagttactttagacattttctaatctccgtaattctgtatcagtagttgatagttgtataataccacagtatgctttggttgtaaacagttttgtgaaaaaatttttgaaataaaaaagggagagccgaggctctccctaaaattactgcatgactgtgataactgtcatgataacacgttgaattccgaacgcaagaagacctcctgctacagctggaacaatacctaaacccgccagcaaaatgctaccggatactaatgcagcgcttgtaatgcctatgaatggactcatttgatttcctctaaatctttggtgtattctgtaactacattagtagttttccaatattcattttcttcttttttagctttagcttcttcagcaagtttcttcgcttcatcggaagtcatatgaaaaatattcattccgactagtttatcaacataagaagaatacatctcaattttagaaagttcttcagtcagttctttacgagttttaccctgtacaacaatttcacctgaaattactttcttaatgaaatgtgccttggcaaaggctaaacgaaatgctgattcagtttctttaattttgttatcaattcgtttttggacataagttttacgaacttcaacaaagtctttaattaaatcaactacgttatcgtaaacttgtagctttcctttctcattaataacggtaatattttgggaacgacgctcaatcaacccaaagtctttcataatttttgcatggcgttcttcttcattatcgctcaaagaatattctttacggaatttaactttaaagccaaaaccatgctcaccacaagcatcgtcccatgtaatgaagcctttatcttcaagtgggtctaagattttactcacataagtttcacgatcatacttatacggaatctcagtgatgtgcatttgagttcgtgaagtaaacttatatgttccacgaatttcatattgtccatcaatttcaacaacttcaccacgaaattctgggaattctaccttcggtttagttactttctttccttgaagagcttgtagtacagctttcttgacagaagaaacactatgaggaagaatgtaagttgcataaccagttgcaataccggaaacgccattaagaagaacagtaggaataataggcaaatagaaagcaggcggaatgtgttctttatcttgatgtaccggagcatactcagtatctttatatacgttatagaaatttttacttacacgagcaaaaatataacgacttgctgctgccttttggacagtacgagaaccaaagtttccttgaccatctaatagaggaaagttattattccaagtattagccatcaaagcgcccgcatcttgtgcagagttttcgccatgatgatatccaaggtccgctacaccacctgcaatagaagcgagtttgtgaaacttatctttatttcctcgcgccaaatcaagagctcgagcaataacaaatcgttgaactggcttaaatccatcaatcatatttggaatagcacgattttcaaccgtgtacatagcataagccaatgcttcattatcaatgatactttttaaatcgcgattattcagttgcataaatttaccatactagtgaatgtagtgccataataacatcagaaatgaaaagcacgacttgaattaatccgaacattattccgtaatataatgctatcaataaaatagcaagggctagtgaatagcccaagattttcttaatcattagtagataacaacacaaatgttaaacatgcacacataccctgagctaaagcctgcgaaaacacgctactggaatcggtatagatagttaaaacgcatactattatccaacaaataaatgaaataactcctaataattttgcgatattcatattttcctcactggcgtccgaagacgcctttggttttaagattgttacgatagaactgcatcacgtgttcgttatggaaattactcattagtatgcctgcaaaacgaatttaaagttatcagccaacatacggttcatttcttcaagtgtttgatactcagaatgatgattacgagtaaacgctaaagctaactgtccttttccaaatcccgtcgtcagaggtttcatcttagaagcaggcagataaaatactgtgtatggaacattgttatttgcaatagtacgtgcaagttgagaccgacgctggcgaatatgacttagaaccgcactgaatccttgcttagaacgctgattacctacataaaatcgtgcagacacacatggattactaaatggacgaccatctaatttacttactaaaaagtaaaatccaggtttagataaaatatctttatgcggagttcctaaaaaccattcaccacccttgattgtaccaataacagttgcgcctgcattgttcagatcagtaacagtcatgtatttcatattaatttcctctaaattattttctactccaaggccgcatgaatacacacggccattaaattaatcgtcgcagtcgacgctcaattcccaaaactcttctacagtataagtttcagtatcattttcaatacagaaacgttcattactgttatttgctaaagtagcattaactgtaggtttctcgctagtgctcttaagaggtgaaatgcgaattaactgatcaccgttatctaaacagaaaatttcaccaacttttacatctttaaaaattttcataattcacctcagggagtataaaatccaaatgcagttgttgaccatcccatccaatacgggaaatttgcgccaatgtaaaacatgagaatataaaaccaaccactcagcaaattcatcattttacaccattccaaattgtttcaactacggattttaaaccattttgatgaatatcaattccgactactgtcatcaaatagattccaactacaactgaacctaaggcgaaaatcagcatgaaaatgaataaagctggaaaaatattatcgaaaaaccattcaataaatgtaaaagcactgcgtttacgcttcatattttcctcacataaatccaaagtaagcgtttaatacatcaatcattaaaacgattgggaatatactcaaaactactagtattataactacattccatatagctttaacaatctttttcattttctgttcctccgtagttgatagggtaatagtaccacagaggaacagtcttgtaaacaacttttttaaaaatattcgtaataaatgtgaataccaactactaccgctgaaacctgtgcaacccaccacgcacaagcaataagtacagaattaaaaattttcataataacctcatcacaaaagtaaatgttaaacaaatcaatggaatactaattaaccaaacaaaacaccaccataatgaactcatagttcaatctcaatgattttcattttactcaataatccgctaaaagatcgacgattgcatcacgaagacacttattcgcaatacgtttaagagcaatttcagtttctggagcattttgaataatcatcgaattcaactcagcctcagcaaattgaagttctttaactagttcagctttatatttcccttgccctttcttagcttttgcccgttttaattcagctgtagtaaacattttattctccaaatccgtatcagttgatagttgtatagtaccacagtccttgtggtatgtaaaccggtttgtgaatttttttaaatggaaagataccatccgttgtagttgctttttcttacaaccttacgaaggtcttctctatcaccgatgaatttcggagtgtactggatgacacctggatgaatttctttagtgttgaatataattatacagtccgcgacctggtgatttagaatgggccctagatttattccagaaccgtatggatactctccgctgcatcctgttgttacagaaatccaacgtgagtcagtttgatgtgtcttaacttctacacgaagcccgcagtatcttggatgcgccaatacatcccatgcgtatgtatacgggtcattaacgtcctcttggcctttgttaacatacccgcttagccaatctgctacaaaaaactctgcgtacaccgcgatacggcatctttcgataacttctgctttatcctggttcgggttttgttttaaagaatatcttgctgtatcagcaattttgaccttcatttcactagtcaaatcactgttcgatagggtaaatgtcggaatctgaaatagtctctgtaaacccggattcgttttctgcatttagactttcctttttaccgctgagataagcgttatatactttaagagtgccgtaataaattcggtcattttcatctaaagactcacggtcaagttcatcgagttcctttttatccatgactataatatcattgcagtaaagaaacccaagtttttcgtgaccaaactcaaatttattacagtacacaatattagcgtgatgatttccatgcagtttaatctcttttatgtcggaatcaccgatattcatacaataaatcataatttttccttaaaacaaaagggccgaagccctttattttacttgaattgtgcaattcttttctctagacattcagcataagatttcattgagatgaactgtgaaagcagtaattcttgctcaactgcactaactgttagaaacttcgcgctttctaaaaatttactcagtgcattaattttgagcattaattgatcgtattcttcttttactcgtgcttgataacctaacataattttccttaatatgataagggccgaagcccttatttaaattgttcagtaacatcttcaactacttcgtattggcaggtacgcattttagcgtcgttataatcaatcggaattgatactacatcgcgaggatgtactttaacttttacaactcggctggttgaactaccaaagtgacgaatataagatttagaacacacatgcagaccacgagaacaggtttgtgtatcatcgtcgttcacacgagtacgtggcattttaactactttacccggactgttatcaaaggtatttgagtgacagtcaaagtaattactgcgaactactttccaagcatagaagtaaccatcttctgtaatttcaatatcgtttgctaccaagaaatcaaagagtcgagataccgctttttggcttgggttttccagcagattttccaagaacggaaaataaaattcaaagttttcgcctttttccatcgagtcaagaatacgatcaaccagaccagaccgtaattcaatattttgatagaacaagcttccaccttcaattcgaacatcgccggaaatatatttttcaacagcgcgacgaacattaattttttgtgccgcttcttccaatttatctgcaacaagcagattaagaatttcctggaagtttgaatgagtattaggagttgcgttataagttacaccgtcaacagtaattgaaatgaattttttagaagcattccaaataatatcagatttagcaactggagcaataactgcatcgctattaactttaattgtaatatcaccgctaatagtaactttagagcgtttagcttcttcagcatttttcaaaacacgacggattgtgtcaaccgatacaccttgccaatcagccaattcctgttgggtgtaattaccacttgaatacaatttaacaatttcagcttgttcgtttttggtcaggcatttaatattgtacataattttccttattaggccgcaagggccttcatagttttagcgatttgggaaacttcatcatcacttaaagaattgcgataaccgatgaagtcggaaacaatacggaatttcttggtaaactcagcaaccattttatcactgttttttgaagcattacgtgataattcatcaaagagattagttaccgtccagatatcatgaccaatggtatcttttccaccattaaaatatacaccctgtaatgaactaaccatattagcgagtcgtgtatattcttcagaaacttcatctacactgaagtacttcatcataaaatctagctcaggatacttgataattttatcaatatatcgtttagctgaacttgaataacctacatacttatcataatctacatcatcaaaagcatctacatataaatcacgcaaagcttcaaaaatacattggcactgaccgagttcttttacctttttctgtaaaagcggacgaataacataaaattcattaatgccaataagattagccatacgaatcaaaatattcatagatggatgacaaagagatgtagtaccatccatagagaaaatatcagaacgatgcatatacgctacataaccagtaatttcatctgcttctgacgtaagcgtaaatagttcctctttttcccatcgcccatctttaatttcaaacttaaatgctgtagcagctttaggacgaggagctttacttttaactacctttggaatatagcttttaactaaagcttcaatttctgacaaataatgaatgttaacttcatcactttcaaacatcgccataatatcagggagtaaatcaatctgcgattctacttctggattaataaacagaagacgctcattgtgatgaatattcagagtgttattaaattcactatcatctaacgcacgtgctaatccacggacaatattaacacgatttttaatattatcaataacgatattaatttttgttgtattaataccaaacagacgataacttgatgcaacggctgaagtttcatggctttgcttaatacgtttcagccgagggtcaagatttacttcatacacaacccctgcattacataacttactatcaggttcaaacatactctgcatcttcttatatgacagatttttagtcgtgaatttgaccgaattactaatcatataatctcgagcagaataccccatcttcatcaattcacgatatgtgtgacgaggagatgtagattctttaaatcgttttacatcttcattaaatgctttctcactgagttctttaactcgttcaataatatttttacgagtacgatcatccagtgaaagagcctcacgagatggagcaatatcaagtgaacccattggaaacttaatgtaattcacttcattgcgaatgcttagccagttacggtctctaataacaccgtcgataggataaacaataccgccatagatagcatataatccgccgcgatctggccagtatctttctggatttacaccgtaataatcatcaaaatccggaaaataatcaatttcgcggtcaagaccattaatgatagccaaatctttgaacggtcgcatgatataagaaacttcataagcaaagtttctaaagtctttttcttcaactggaactacgatttcaataccagttttatcatctggacccatttcttttacgaatgtaggtttaatctgcggaccgtcaccatccatgtaagctacataaccacgaatttcacctttatgatacgaagtaatactaaatgtatcagtataactaaacggagatttagaacctaaaccaaatccgccaatgaaatcgttagattcagccttagatgaactgaagtatgaattatacagaccaggagaattatcatcaccctgaatatcaaaatcactcatacctggaccaaaatctcgacaaacaaatcgtggatctaaacgtccaggaacttgtatgataaatttttcaggatttccattgagtgcatgggcatcaatcatgttggtaatcaattcacggactactgcgcgaattttgtttgtatacagatcagatgatagaattttaaatactttaggagatgctgtgatgctaaatgcttttgatttagaaccattaccaagaattgtttctttttcagtggtgataatcataatttcctcattaattcatattacgcttaataacttcagcaacttctagtagttcatctttagttgcgatgtcggattgaattttatctctaatatctttaaagcggtttttaaattcttcggcttctcccatatcgaaaaagcgttgaatgattctatattctcgatgaactgctttatcaaaaagttctaaatttactttatatgatttcatttcaatatcctcatttgcccaattaattataccacatccttgtggtaaagtaaactactggctcatccattctttacgaaggtcagcgttatctcccatgagcatttcaaaaagctctttccaattctcaggaagtttaacaacatcatatactgggttttgaatcatctcacgatattcagatttttccaaagagccaagtcccttaatataacggatgctatgtttaggtagagcatctttggcactctcatattcagcgactgtataaaaccattcttgttttttaccgacctgagcgatgattacaggagttttgacaaagcgaattcgtccttgctcaaacaattctggccaattactaaaaaacccgagcagagaaggataaatgcttcctagaccatcgtggtcagcatcagtcataatagcaatattatgataattcaggttttcagctttttcaccaagaactaatccagtgattgcgcaaatatcaaacagttctttgtttttaagcatatcggcatatgacataccccagctattaagaactttaccgcgcaatggataaccaccgtgaagttctttatcacgaacatcaataagatatccgatagccgaatcaccctcagtcaagaacaatgtagtgtcagcatctttaccgcaaagattcgctttaatatgtttatgaacctttgccttagaggcctttttagctgctttagtttctgctgctttttctgccgccaatttacgagccaaagcagcttcaataatcggcattagaattgcttcattatttagaatagcgcgtgaaatctttttagcatcaagctgaatatgactacgaatttcaccaaatggagaagtcaaacgctctttagtctgagagtcaaatcgcatgtttttcatatcacgaacaaacataacgatagtcaaacattctttgacacgtgctttagttacatcaattttgaacttacgtttgatttgtggaataaggtcttcacaaatatcatccataacacagtcaatgtgatggccaccattcttagtgtgaatgttattcacataagttaattgacgaaaaccatccggtgaacgaccaactgcaatagaacaattttcttgttcttgaacgatagcatgctcatcatattggcgtgcatatttcttaaaattaccctgaacctttttaccattaaaggtaaattgaatatcaggataaacaacagcaagtgtctggagacgatctagtgtaatgtcaagataaacttgggacagctcattagtttcaaatgacataaaatcaggaatgaaagtaacacgagttcctttccattttcctggaatagtttcccatgatttattttccatgccatttgaacaacgaactacaatattattttgaccatcgccagtttcaccgacaaacatcacagaaaaaatgttagttaaactagaaccaacaccattcataccaccggtgacgcgttctttatcatcaccaaagttaccacctgcttttggaatagtccatgcagcaacaggaccaggaatttcttcaccggtaggtgttttaaccatcgcttgtggaataccgcgaccgttatcttcaactgttacctgattgtttttaatggtaacattaattttatttgcgaatttaaacttagtacgaataccttcatctactgagttatcgataatttcatcaataagcttaacaagaccaggtacatactgaacactttcccatttaccaaacagaaagcgctcatgcatttcattagcagaagagccaatatacatgccgctacgctttttgatatgttcaatatcgctcagaattttaatttcattcttaatcatcacttatcctcgtttggtttcgggaatattatactccaataatcataaagctaaaggcccgaaggccttttatttaaaacgaatagttgaatccttaaagaacagcccagaacatactgttccttctactttctgcccagtaggtccaatagcacgaaatccagtatgctggaaatcattttcagagcaaccgaaccaattatatccagtgatttcaatattagtaaaaccgcttgaagacaaaactttagttgcattatcagcgtcagtacatcctattaaagacactgctaatactaatgctgcaatagaacgattaacatatttcataattttcacttaaatttaatggcttgaagaagactaataactctcaagcgacttctttcatctttaactataaaagaaagagggtcaccagatttcatagtaatagtacattcaaaatcaaaatcttcgggaacttcttcgaataggtcaaattcttcatcataaattagaacattactctgaaaactgtgaagaatttttccatcatttccagatgttgtactaatcattgtaacattattacctttcatatcttcaacgataaattcgcttgtagatattacaacattaatagaaccattcctataaatagcagaaaatagatatttcttttcttcaccttcgcgaatgcgatatttcttaccgattttaaacataatcaccctttaagtaagtcgtaaaatccaccattcacatgcttaggagcagaaggccgacgagtagacaaacgatgacatttagggcaaacatcattttctcgttcagaaatctttttaattttttcatattcatgcccacaatcttcggattggcatttataatcatacattggcataattattccttaaagtgagctttcaacatctgatacaaggaccatgcctgttcattattttcaatagtaactttcatgacaggaaattctgtgaaatcttctatttgttcttgctcttcctgctcttgctcttcagcagcctgatatggattttccacttcattaaagaactcggcttcgttgctagaaagccagataaagttttcgtcaatgactgtacctcgtgatgaatatccaactatgccagtagatgtcacaattttagtaggacgcccgtaatagtcaacatctaaaattttaaaaggttccatacctaaacgccgcgcatagattccgttatcagtatggtctttaataaaattttcttgagcttgtttatttttaaattgataccatttattaacttcaaatttaatagccattaataaatttccttccagtaagttgtgccatcttcagtaatttcacgaaatacaccataaattggttgtttatcaccgactttctcatacacataaacagaagtcaagtgagtaaacttgctagtatgttccttttgaactattaccaaatttggatcaaataatacatcttcaaattcatcattagtacaattctgaacaattttacgtttcattacaatttcctcattaattgaacagtggagcgatacgtttcagaagagtagcagcacctttggcgaattttacatcatgaaaaacagtttcttcttccgttacaacacgaactttaatgttttcacaatcccaatttttacgaacaatcttcaaaagctgcagtaaatctttacattcagcaatatcgataacacatccacgagaatcttccattatcgcacgataaccgtaagccataccataatcgttgaaagattgctcaatgataattaagttttccattttattctccaagttgttttctgtatcagtagttgatattgatatagtaccataatcaactactgatgtatatagttttatgaaaaaattttaaactttatgcacagcgagctttgctatagtgtttaatccaactttcaggaatgactttgtatgttcctaaaaataccgcgttgtacaacttaacgccatcttctacccattgatcggtaatgtatgcacacatagcacgagtacgatgtttttgaacaaccccttcctcatcttcggtaaattcgaattcataaggagcaatgaacttaatagcctgaccgagtttccacttaaagtctacacctacatgcgaagtatcaatcgtttcaattcctttagcaggaacagctttcaaaaacgcagactcaagaaatttcgcacgaacatagccaaactgaggtttagactttccatctttaggaatgatacgcacttttacttcagaatcttcatctttaacaccgtgtttaagctgaatgcttacaatttcaaccaattttcctgctgctttagaacgggatttatcagatacacgagcaatttcaccaatattaataatcatagttatctctcacttgttaaaaagattttatactccacgggaccattatactctggtcccaagagtttgtaaactattaatttaaaatagctaccaccgcactacgaggtactacgctaaaatcacctgcatgaacaacgttcagaagttcaacaccatcttcaatccattggtctgttacccaaccacagaccgaaataaatggagtcttgatagctaccgcatgagttagaaggtcagtaggatcaacttctttgaagaggataagctctgcttcaaagactatagttttaattacttcatcattatctaaacggtgtactcgaatcacgtaagctttattcttatcataccagttactttttgaaaaacttttaaccacaaactcgccttcaccaaaagcattagtcaatgctttataacccaaatttagttcagtagttttaatttcagtttcaaccagtttgtagattttaccaatttcgatggtccgagcagtcataaaggtttccttaatttctaatggtttaacaagagtgccgtacatgcttgctatatccatgtcaagcagcttatatacaggattcggtgcgtattcaggattataattaaatttcataattatctcatttcaataaaatctacgagttcagcatgcgatttacggaacattacttggtgcccgccaatgataacttcatcttcaggaacttcgtatacagcgagataaaatcctttagaagataattcttcccgctcttctcgtgtgaaccatctcatcatatcatattcactagcgaaagcaaaatgataaagagctataaaccatcctggaatatgatattctactccaacataatctttcttgaacttagtattaattactatattagcgtttttaactaatagtttatcttcgtgtggtaaaggaattcttttattattatcgctatgatgcataaaattaggtctgtcataacctacgtgtaatagccactcttcgctccatgaatctattatactcctgtacggcgttatttgaacacaaagatttcgacgtattgttatagcatcttcataatcaagaatactaaacgatgattcaacacgataaattttcattttattatcctcagtagctatggtgttataataccataactaaccgaggaagtaaacaaccttttatcgtttagttggaagagacagaggatcgcaatcttcctctgacggagcatcttcaagacccatagcatatcgcaaagcatacttcatcatcaggatgtctttcgcacaatcatgaatagaatcatgtgcaacgaatccatctaaagttccctttggaagaggacatgtagtcatatcacgaacaagcagaagtgcttcaattctggtacgaatatcacgctgattccagaatttacaaggttctaacttaaacgtatcaagctcattctcagaaacgccgttaagacgttgaatatcacgaatgagatcgactaaaattggaaaatcaaatgacattccacggcaccaaccatgagatttccaaggatcgatattatgcgcattaatgtaatcattgaattttgcaataccatcaatagtgcttacatcttcatctgatggtgcaatattttttcgagcttcaggggattgattcttccaccattcgatagtacttttagtaaaaagacggtgtcctttttggctttttaaatcaaatttgattttaatgccacgtgaaactaattcatcaaatgtttcaacaacttccgggttagggtcaaaagcaattacagccaaatcaataacagctgctttttcaccgcttcccattgtttcaaaatctataataaaatcaaacattaaattttcctcgctaaatcacgaatttgacctacagtataatcttggatataaactttattaatgggctcatcaataaattttgccatagattcaatatctttttgtatctcttcaagactgtatactatctttgaagctttttcgcgaatagtaacattatcaggtcctggattttcctcaatgacagctttaacatttgtcataagagatttaaactgatgcaaacttaattcaatcattaataatcgccttataaagatggctaatttcacctaaaacataatcactgattgtaacagtttttacttcaccacaaaagaattctaacgcaatcaaatctcgttcaatttcttccagttgaagcattaacttgcctgattcaattttcacgtttttgcgatttttactataagctatttcataaatttcgctcactttatcttgaagtagataaaactggtctttagttatttccatgaatagcttcctcaaatttaatcatacataaaacacatcataacgaccacgagtgacaccaacataaagaagctgttgagccaattcagcgtctgcataatgaatacaaggcgtatagatgaaagcacggtccacagacataccctgagctttatggaatgttgatgcaggaagtgctttcactttactaaactgcgatttagcatcccaaaaatcactccacggagcttttccgcctttattccaatttttataagtttctgccgttttacctaaaaataagttaaacttatacagctcttcatcagatgaaattattttaatcttttcacgataatattcatcatcgccgtaagtttctactgttaaatcccaatgacgaattagatattctccagaaacaccacgagctttaacaaatgttgatgtatattctgcttctataatacgaactaattgtccgttattaaaaataatttctgacacaggctttccatcaattttatatgttttaattaatggttcctgcattacaataatttcaccgacaataaaatctttatcagtttcaaaaatctttttacgaataatgctatttaacttatcaacagatttattcgtaaatgccattacacgattttcaaacaaatcatctagtgatttgacgattgaaaaataatttaccataaaatcgcgtaaagcggtatcaccaataaatccacgtactccatgcccgtcaacaattttatcataaatccacttaccgttgcgaacatcagtagctacatcaataataggagcattactgcgtttaacttcagtgagttcacattgataaaaatctttgtgcgtgaagaatggactgatataagcagtgttttctcctgggtcaacaggtctaatttgcttattatcgcctattccaattatagtacaccaaggtggaatagttgaaagcagaattttaaatagctttctatcatacattgacacttcgtcgcagattaataccctgcatttagctaaatctggtacttctttttgttcaaaaagaacgttttcttcatatgttactgggttaattttaagaatgctgtgaatagtacttgcttctttcccagatagttttgaaagaatctttttagctgcatgagtaggagctgctaaaataataccagtttcacctgtagatattaaagcttcaatgatgaacttagtaagagtagtcttaccggtaccagcaggtccattaatagttacatgatgtttcttttctttaatagccctcataacaatgttaaaggcatttttctggccttctgtcaaatcatcaaatgtcatcggaaagtccctgcaattggaatactaacaatacgcccagtatctaaaattcgctgatataatcttcgtgtgtctacatcaggcttaacatgtttaacttctattttattaaaccaaaatttacgtggagtctcaactaatcttggaattcccttacctaaagctagtcgatactgctctttaagagtggtaaatactttatcagcaatcttccattcaaaaaatatagcaggacgatgttcatcaagcggaactggcgccgtaaatccgtctttgtctcggtaaactatcgcatatacataaaccatattatcctcggataagtttaaaaattgaacaatttagcggatatcctcttttcagtttaagtttatcaataaaagacaagttttgataccgctctacaccttgaataattttatcacacatatcatactgcatttctgcttctgacaactttttcacaattttccaatccgagcctttaagaagaacgttcaatttaacaacttcagcgccttctgctatacgagaaccatcaatacgagctttaagtgctataatcgttagcttaacgtcagaagtttgttttgatttagaaagctgagaaatgtgctcaattcggttttcacgttttttctgtatagctttaatttgattataagtctttttgattttagcccatttcttttcatctaaatttagtttatgaacttttttcgcagatgaacgaccaattcgcaaagcaaataaatcacgcttttcaatcaactcttctaaagtataatcagaacgaaatgtattgtactttttctttactgcaataacattccctttaatgtatccaacgttattatcaaaacgttctaatgataatttctctccttcaatacgattatcaaaaggttctcctgagtaagcgcaaactttctgatctaaaatgttcttaatgtaattgaagtctaagttaaaatctttagaacgtcttttggcagatgcctgagtatgctctagacgacgtttaattttacgaatttgattattagacagtttcatatttttctcacatcttacggacgatttaatactttattactataacatttttaccttaacttgtaaacaactttatgtaaaaatgctttaaaactttcgtggtataatgaatctaagtccttccattatagattaaatccttcaaaatcaagagtatagatagtgtatgttgaatactttttgtactcatatctatctgcaattctaaatacacttccagctggtatcattacttcttgttcatctgaaactaattccatattacgatagcgatggctatccggaaacttaaaacttggactatattctttacaacgtagagcttttatagcatactcctggaaattaaataccataggagctttgaattcaaaaataacttgcgtattgtattctaatccagaagcaaaatgtagagctatatttttatcatatgaagctgatacgactttatcaaatgtaataatatcaattccttgatttaacacctgcttagtctcagctggaacacctctccaaagaggtttatcatttggttccaaacgagatttgattatttcatttaaccaagtatggtcatctggtttgttggtaatacaatgaattaaaagttcaatttcagataaattaaacccttcagaaagtaattcttcacgaatagaagcacgcaccgatgcatccattgattttattttaaaatcttttagttgcattactgagtatttcattcaactacctcaatatcataaactttaaatgttccaaatgaatcgtgtaatttttcttttgaaatagaagttattttatactttccaattggaatcatccattcttgttcatgtacaatcatcattaagttatcagtacgctctgaatctaatccatcagtatcttcatacgtatacttaaactcagtattaggagaagaaagtataatatcactgatatggtcagagtaattaaaagctttatcagtttttaagcgaagtactatttcagtgaaatattcagcataagaaaaagaacacgctgtatgcaaactagtagtaaatgaatctaccctgttcgttgaaaacacttctccaacttgtaaatctttaataagttcttttgtcgattttgatataccacgatatagctgataaggtgatttagttaaatgctttttaatgattttattcaattgccgatgaagagcttcattctttttagcttccatacattgccaaagaacagactgctcaaaatcagtaaatttttcacagacctttttatacatatcatattgaaaatcaacgctttcagcttttatagataactgttcaacatctgcaagattaataatcatgatagcctccgtatacttcagaagctatcatatcatcgttagaaaggaaagtaaacaactttttgaattattttgcccagggagcccaaggcggagggtcaagatggtatgaagctagttcttctagaagagcatctggggcttcaattccataattctgtaatactatacggtactctttcttataattactagaatcattctggatattcgtagaatgattatcttctaacatctcaaataaatccatattaattcctagcgataaaaaccaaaatgacgattagcttcaataatctttctttcttcttctgacattctccagcgtagtccaacatcaaaatgagcccagaccatcttaacaaatgcatttatatctttaatatcttcaataatgaatgttttacttttagaaggttgactaactaatttaactttatcgtcttcaaacaggtcaaaaagaccatattcatgagctcttttatagcctttaatagttaaagcttcggaagaagaaaacggtgaatcagtattctgcaaaatatcttcagtatgctttataattagaataacattttctggatattttctttcttttatatctttaattaaaatatccggattttctgctaaaggaataattaatgagcattttttaccaagagtatttactgatttaccttctttagacatgaattctactgaataatgttttgctacttcaatcatgtgatttccttttgcctactaatggaccatcgggaattttgttttcctggatatatttctcattttcttccatcattttactaccgattttaagaagcaaatccaacgcttcatttgctttagccttggcctcttctaacgtcatatctctgttcacgatttatccccatagatgtctctcatcaatttaagcgctgagcgttctagtttcttttctttctcagcactaatcattgatttcatccattcttctgattcgttctgcatttctttatttgcctgttcaacccaaccgtcatcaatatacattgagtttggtctattgaaccattcaagaatcttcttgagagctttcatttattttacctaaaacaatagtatggacaccgtcaaattcatgaatttttagcaaatttggatttaaattattccataaagaggtaataaaatatgatagcgcactttcgtccgtaattataaatttatttcctttatctattttccaatcatatattgaatcatatgaatagaaggataacggtttattattataatatgcttcagcaacatcaatatagttagatttagtaaatgcttgaattgccataaatggagaatttttcacagtttcaataattccgatctttttaagttttatttcaacatcttctggaactggcattgaaataaaatcttctactagatacatgtcattgtcatatcttttatcaatcattactgctactgtaattggaacatccttgacaaacgccatactaatactattgatagacatttcaaacaaaattgcttccataattttcctcaatcacaagatgtagatgaacaactagaatcacaagaacttccacatgaatcgcccgtccatacatgaacaggaacattagtatcatatgaatcagaactagattgtgtattctgtgtgttagatgatgtagtaggtactgaccagcgccaaggatttttataatattcttgggcttcttcataagtcatagtaactgcttcgactgttccatctcccatataaacatactcaactactgttaaaggaagatagtcatttgaaataggaactacaccttctccaggagttgtagagaaaaaatccgtaaagaaacttttaaaccaattaaatataaacattataaaaagcctctttgaaattcgactctttgaaatccaccccagtcagtgtatcgcatttcagcattgaactcgactgaaccatctacatgcatcatgaatgaatgcgtgacgacattacaatcccagcttttcataccccatttgtcagagatagctttatcaagaaccttctggaggtcttcatttggtttaatccaacgatttaacatagtgctctcctctataagataattctattataccatactcattgtggaaagtaaaccgtttaaatgaaaaaaggactcccgaaagagtccttgaattattaaccgccagttactttccacaaatcttcgtttgcagcaatccacgcagcacgttgattttcttcatatacagtagtatatgctgctttttctgaagggaatgtctggtaatgagcgccagaaattttgtgaacgtcagaataaagagggaaagctactgaaatttcctttccttcaattttcttatttccatctaatttctgctcaaatgttttgatattaacataaccgcgagtactagccatgtaattctccttttatttaaattacatgattatttataataattctcacggcttttaagtcgtcgtttaaataaacgagctattaataacctcggtcttgacgagcgaaattttcggcatttttcaggtaataaagtttaaagatttcttctgctgtaagaccaagaccctggaacatgttcagaacgaaatgaagaatatcaatcatttcgaatttaatttccaactggtcttgcggagacaaatcagtaattagagtttcacgacgttcaccatgttgagctttccaaggcttccatacagcagatgcatctttttcgccattgctcataccgccaagagatgtcagaagttcacggaattcatcgtcaatataatctttctgattacgtagccaatcaacaacttcaccagcagtagccaaatcatcaggatgacggttatattcaggtttatctttagctaaacgaacttgcagagatttttgcatatcaagcataacttgcagcgggtctttttcatcaccgagaatatcccagtattcattttgagctttatcagcgccttcgatcagttgactacattcgttaaagtaagccattatttttcctttcaattcatgggttagtagattaattatacaataaatatataaagcaataaggaggacatatggtacaaaaattaatggcacttgttaatgccataaaaggtaataaaaaacgtatagcttttactatttctgctatggtaggaattttactctggaactttattctatcacctgttgcaattgcacatggtattaatattccagtagttactcttgatacatttgtagatttagcatttgctttagttgggttaatttaaatcttagcatatttagatagccgcattttagccatcaacccctgggcaatattatttttcatatattccataatttgttcaggggttgcaccttcctttctaatcatatcattgacatcttttgatttccagggagatttatcccaaaacataaccctttctcctgcatcaactaatttagtcattcgtttgatagtgtcaggatgacgaggttcattatctaaaacccacacacgtctatctttaaatggaacaacttctaggtctaattgaccacccgtaatagctataccattttcaataaaaagtgaatctataggtccttctagaacatatacatcaccatctttaactcgttcgactccatagatttttgttgcctcaggataagctttgatggtgatatatttttgaggagcatctttctttaatgcacgcccttgaaacgactcggcttttccattagcattataaattggaataacaagacgaggctcaggtatttcctttttatatgttcccggtgctatgctattaactaatttaggccattcagttgtaaaccaaagatatttccatttatcctttggaatacaacgagcttttacgtattttataattggatggtcttccgccagtttatctaatctaacacatgacggaagagatttaattattttcttctcaggttgtttaggaagttctttaggtttttctactgaacgacttttacctttttcttttcttatttcaaagatatactcacgatataaatcaggttcaaactcctttaaatatattccgattggtgcatgatagttacagttataacaatgaatatttccttcattattatcgccgtaataccatccacgggctttattttggtcggtttttgaatctccacaaacagggcatctaaaccgtaatttaaaagttgaactattatttacttgtgtgaatttcggtaaatgagctaatgcacggtatgcaaactcattatcaatccaaggtattgatgacatttttactcttctttttctttagattcctcttttttctttttaggaatctgttcaggacctttatttactacagcacctgatgttgttccagtggagatattttcaggattaccgcctgaatctccagctaccatatcttctttgataaattctttatatgttttcatattaacctctattcataaaagcattaaaaatttggtcatcaatagatggcgcagtaatattttctgcatcatttagcaaatcattaatttcatcagatagcataacacatgtacctttatttcctgtaattgttactgcacaattacgaacgttttctttatcaaattttaggttaatattttcgtagtgaaaatcctttaatgctgaatatatttttaaaatgaaattgtcttttactacaataaacccaacctcactattaaaacgtggttcatggaaactgtaataaaccttttcatctataaaatcgtatgaaattttttccatttttaaatatgaaaattcagaactatacatattaacctttattcataaaagcattaaaaatttgatcgtcaatagaaacttttactttaggctgttcttcaaacggtaattcatatccacatattacaattttgtgatcgataccaaaatacgcagaagcaatatgattaatattattttcagtgaaatctaaatcaacatcaatatctttttgactaacgctcaaaggataattaatacgaataattcgattatctttaacaaagattccaccgacatactctgtgttgcgtttaaagtttacacgtttcctaaatgaaaaatattcaggttctttatgagcccgactcataggacacaatgagtagctagaataagagatgtcaaatcctacaccttcaatatgagccaacgcgtcatgattaaaccaattataatcatatgccaaatccattatattgtaatatgtgaaaggcaccggattaacatcatgtgttgtacctttaaaatctgcccaggcaacgatttcgttatctttaacaattacaaaaattgtgccaataagatatccacggttattttcatcaggcgttatattataacattgtgcatcaggaaatttaccgtatttaaacggtggatttttgtgcatataataaatcatattattcacctgtgatttcggttacgatatttttgttattaaagtttttatcgcaatacagaacataattatactgcattacaccaccagacttaagctgtttttgcacttcagctttcatttcaggacgatcgcgctcaacgatattcataatatccgcttcaatttgagtttcaacttcagtctgatccgcagtcatagaccattcacacaaatctttatcataacctgccatagcaggctgagcagcacaagaagccaaagcaaaaattgcagcaaagataaattttttcatgataatctcctcagtagtttatgtttatatagtatctcaatttccaacaaaagtaaatagttattttaaaacttctgcgtaatcacatgttacaaactgtttctctagcttgacgattttacgaaagtatcttttgcattgacgaatctgccgcttcgtaggacgtacaacaaacttaataaattccactcgaccaaatggaggactttcttctgctggaatatctaacaccaattcccacgtatctgcaataagtgctttgaattgcgtatttttcctgacgttatacggagtaggtttaaataaaacaatatgcatattatcctcggcaatctacttcacatactttcttgtcatcaatgaaagctttaactaatgctttattaacttcagcatattgagtagtggcccattgaacgtcatttttcatcattgtggtttctttagtaaacatgctttcattcttaaaccaccccataaaaactacctttaccaattccataacaatatcctcatttaaccaacaagactactataccatagtctcgtcagcttgtaaactaaaattttaattcatttgccaaagcatctaactgagctcgagtagattcatttctttgatagcgattctgttcagcctgaatctgttgtgaacctgctacttcactcacttcagttggagtagaatcttgttcaatttctacccatttttgatttcctttttgaacacccatcaaaaacttattccacttattcttatcgccatatcgtgatttgatttgcttaatgagttgttgttcagcagctgctagctcctcggtttcaatgaccgcaagcataaaatcggctgttgctggaagaccagcagattctgcaatatcgctcatgttaacatcggaagagtcccaagcttgtttaccaacctgcgctgcagtccaaagaacagtttcggtttcaacagcaagagcacgcaattcctctgcaatagctttaacagttgtgtaactattttctgaataaactctgatgcgacaagatttacaaatacctagatagtcgacaataatgattgttggaacaaaattctttttgagcttcaattcattcaagagagacctgaatgtgttagcatctgccccaccagtagggtactgtttaacgattaaacgaccgagagtagatttctcacgccatttttccatttttcctttatactcagcgtaagaaatatgcccatcatcaatgtcatcaagagaaacatcaagcatattagcgtcaatacgcttagcacagacttcttctgccatttccatggaaatgtaaagaacattgtgtccgagctgtaaataatctgctgctaatgaacacaatcctaatgacttaccaacgttaacgccagccattaaaacgttcagcgttccagtctcagctccgcctttagtaattttgtttagaattctgagtttaaatggaaccttacgagctttattcatataagatagccaacgtgcttcgtagtcatccatccaatcatgaccaacgtaactatcaaatgaaatagataatgcctggcgcatgatgtcaggaatagcaccaacatccggcattttcttatttcgtttttccggaggaagctcagcattagtttgaatttcgattattttagacgtagcattaaacatcgccctttgctgaacatatttttctgtttcttttactaaccaactgtggtcttctggagaatcagttagttttgaaataagtgtttttacaccagaatattctgtttcagtaaatgaactattttctaatgcaacatttaacgcattaatagatggaacgctatggtactcattaacatgagatttaattaatttgaatgtatttttagctggaccactttcaaaatattctgaatccatatatggccaaacttttgaaaaataagcttgatcaaatatgagatgagaaagaataatttctaccacacttactccttaaaagaatttaaattttttctttgaccttttattaaatgcatcttgcagttgcattgtaatacatttttctacatgaggagctaattcagcttttctttcttggtcaagaacagcaaagtccattacaacctttccatcaacccaatccagttttgttacatatactatatgcgtagaaccatcttctagtttaatgacaatctcctggataacattttccatagcggatttaattatcttaagagactcattaaaaagacgttcttttctttcttcttccccctccgaagagggggattcatcgataatttctagatctaaatctaaatcatctttattcattaaattcttccatatcacttagctgatctaggtcagtttctaaatcagctgctgatttacttttactttctggagatttaaatttttcaacctttgagttaatcaattcatcaacttcagcttcaacaatttcattactatcaatagcacctaactgataagcacgcttaatagcatcacggaatggttgatgcttaaataaaggaccccagaatgtagtgcagttggtatcttttgcacgccaagatttttcttcgcgaatcatctcgccagtttcttcgtcaagaaattcacgagcataccagccatttttaggttttacaacaaatcctaattctagagccatatctaataatccagaataaggatcgataccaccgtcaaatttaacatcaataaagaatttacttttttctttaacggtacgagatttttctacgtttagaacaaattgatacccctgaagatcagaaccatctttaatctggcgtttaccgataatgaatacggtatcagccgaatacattacgcctgtaccacctgtcatcacggttttactaaacatttcaattgtttcaattgtatggttaaccgcaacacatggaatatttttaatgctaaaataaggagtaacaatacggaataatgacttcagtgatttagcacgagtcatatctgccacagatttttcattcaaggcatcttccgtttctttcttagaagccatattaccgattgagtcgatgaatactataaccttttcaccacgctcaatagcttcaagctgattcaccatatcaattttcagctgttcaactgactgaatcggcgtatgaattactcgttccgggtcaactcccatggatcgcaaataagctggagtaataccaaattcgctatcatagaatagacaaaccgcgtcaggatatttgttcaaatatgccgcaaccatagtcaaagacatatttgatttaaagtgtttagaaggccctgcgaaaatagttaaaccagactgcataccgccatcaatcgcaccagaaatagcaatattaagcattgggatttttgtacggattacatccttttcattaaagaatttagatgtagtcagttcagcagtcattttagaagtggaagctttaatcaaacgggattttaaatctgcaatagacattcattttttccataggcatcattatattttcctcactggttaaagatagagtaattataacacaataaatttaggcattaatcaactgctatcggatgaatagcattaaacttatgaaatgcttctgatttttctttacgcgaaacacacatgcgaagaacctttagtggttcatcttcttcacccaacgattttcgtttttcaatattagaagttttccaacgagcttgttctggaaactctctattgatttgctcaagcgctctattatgtttagaattactacgaattgaactgcacccgccaggagcttgtgcttttccagatacaaccagatatttgaacaaggccaaatgcggataaccttgattaattaaattgagaaatgcatacatatcttcgcataaatcaatttttccatacccaatttgttctgtcgtaagttttccgaggtcataccatgtattcgtgaatccgtatgaattttcacgataattaccccaagatgaagtaattttaaaaattggtaaacgagcatgaccatgataatacccgcaatccatggcatcctcaacatattgaatcaattcatagaactgttcacgagtcaattgattaattttatctacacaacgacgatcatctctttttcgcattgaactcatacgaatagtagtatcatcgtcaatcatccagattcgttgacctgcatacatatcagtaattgctttacgagttccagcaattccatttacatcatcaggaatagttataattttagctctagacccataggcatcataataagctttttcttcgtgttcacgtactacaatatgtggttcataatcagtcggaaacatatcaagggcagaaactgcccctacacgttgatagcttggaattacgaattgaatcatttccactcaccgttataatcttttttcacaatatgagtttcgccagtattccaccaatgatcaaccaagtaaaaatgacgagaatatacatgaagacttccaacattccatataatagaacctgctttatactgacgagttgaatcgcctgcattcaaatcagatactaatttatctagtacgtatttttgccatgcataatcattacggaatccgaagaccacgtcatttgagcgcatgcttactactgcattgactttcttatcacgaatcaggtactgtactgtattagtacacataaaatctgacataccatctttattgtagtcaaattgcatggatggacgagtataaatcatgataccacgtcgagaatcaggattttgaccaagttcagctaaacacatatcatactgggcatagttatcttctgaccaaatagcccaaccataattcgagttaatttcgcctttagaagatgctacctgctgccaaatctttggtgtttcacctggaatatctttaacaaacaagctcttagatttataccattcaagttcacgctgaatgtattcatcattaagagcgccaaaaataaacggttcatctgctacaaatgatgcgccaataatttcaatagttttaacaccagttttatcaactacgaaatctttttcctttaatgcagttcccaaataaaaacggatttcttcaactgtcatagagtcattaatcatttaaacctcaattgatgcattcatatttaaattgtaacagtaataaaccccaacctaaaataatagttggaatcataagaggaaccgttacactatagtatatacttattataatcatcaagattaaaagcaacactgttataattttgcttttcattccttctctctgatgataattacctgatttggttgtgcagactttttagtttcacctgcaattgaccaaataaatgtaataaaccaaccaataattgaccagttaaacagtaaagatgtgaaaaagattcctactgtcgattttgacccacgcatcaaggcgataaaccatggaagcatgtatataataatagccaacacgcctgaaactaaaaccataaaaattgaacctgctactaaagtttccatgttttcctcacttagtcaaattttttacgcatgaattataagaattcactacatactccatcggagcatttttaccagtacgccattggtaattattagcccaattagcccaaagctcggcgcagtagttttcaattttttcttcgcgtgtaattacatcagaattacgatatgcttgagcagattcatctggacgaatagcttcgtcaaaattcgcctgcatttgttctactgtctgttttggagcttctttataacacttgacattaggattataaaatttgcttgaacagtttacaatttttcctacatcagactgatttactaccggtccttgagctacacaaccagtaagacctaatgcaataaccaaaatagcgattttcatttcattctccaaatccgtatcagttgatagttgtatagtaccacggaagaacagtcttgtaaacagttttgtgaaaaaattttttaatgaatccaaaaggtccagaatcatctgtttttcataagtatagatttatattacttgtgtgaaaaagggacccggaggtccctagatttattctatcagccaaacaggaagtctaacgaagctttttcttcatagtccataccagccgattcacacatacccgcaagcggtttaacaaacgatttttggaacaaagttgagtagtcaatccaagacaatacgtcagaacgaatttcttttggaagttctgttcccgacggccaagcaatgcacttgtcaccaaatggatttccttcacgcaatggaagaaccattaccttatttccatccaaaattggagctacacctaaaccgctaacagctcgacgataagttagcacaccacgaatatggaacggacatttaaatcctggccaacctttatcatcatatttcgctatatcgttcgcagtttttacttcagcaataactttatagtcgagttgacgatattctttctcgaagttcttgtagtattcttggacagactcttcgccttcctgaagaatacgacgaatactttcttcgagagcttcttgtactgcttttggtgttgaactctgctgagtttccatacccatgatttttagatgtggttcagcaaatcgcttatcttccatatcataaacgttcagagcataacgttttttcgctttccaaaatccaccaacaccctttgaaccaagcggaggacaagaaatagcttcacggtccatatgcatcagatgctcgcggttattcatataatcacataactcacgatatgcaacatcaatcataggttccatctttttcttaccgaactgattcatgaattcaactaaatcattttgttctttaaagcggtcaagacctactttttcaataactttatctacacaaacatataccgaatcagtatcacctgctgcgatgaaatcttcaccatcggttccacatactttattcagatattcattaattttacgagcaatccactgaataccaacttgaccaaaaattgtgatagcagtagcatttcgcaaatcataatagcggaaatgaatgttaccaagagcaccataaagactgttaataagaattttacggttcagctgatttgtattagcaagtgtagccgctttttcacattcttcaatcaaactattgagaacagattcagtataattcgatagttcatttaagaaatcatcactgaacttaacatatcgttcaacttcaggtttagttgaacaagaccctgcgcctttcataataatctttttaatagcttcggcattcatttcttcagcgaacattttctttttccaatctttacgctggaaaaatactttagcgatttcctttggaatgataccttcttgatgcttatcatacatccatccattcggagaacaagaatattcatcactcggtttaggagctgttcctgcgatatattcatgaattggatgaactttaaactgaccacgaatagtctcaggactaatgttaacctgacgaataatgctcggatacagagacgtcaagtcaaaactcataatatatcgacgagcaattggtttaggttcaaacacaaatgcacctggaaaactctgtttaacgtgcgaaccttgttgaggaataaccttgtgttcacttttcagtgagttaaaaataatagcatcccaagttttaataggactcattacaccagaaaaaggcattttagcgtaataagacatacttaaaactagatcgataaacccgcgaattttatcaattgcttgaactgattctacgtcaatgatgttataactgatgtatcgttgatgattagtctcacgaagtttattaataggaccgtcgtatggtaatttgccctttttggtttcatgttgagcaactgattccaaagagaatgacggcaaattagtaaaagcgaatttcttgtacaaatctaaataatcaagaatagatacgccatcaatagaataaatttctttgctaccgtacatattttgaattagtttagattttacccgaccgattggagagaagcgtttcatactacgttcgcccagaatcattttaacacgattcatgatatatggaacgtcaaatccctcaatattccaaccagtaaaaatagcaggtcgtttctgttcccagagattgatatattccatgagcatatcacgctcattatcgaatggcatataaattactcggtcaagaatttcttgaggaacttcatcgccaccttcacagtcaagtttagcagctaactttgcatcccattttgatactgaaccgtacattgaattcaacaaatcaaagacgtaaaaacgatcgtcaattgaatcataatgagtgatagcatcaatttcatattcagctttcattgggtcaggaaatttatcaccagtaacctcaatgtcacagttagctacacgaacaaattttcggtcataaacaatttctgaaccgtatgtatcactgatataagcgagtttaaaatcgttcataccgagagcttcgagaccgatgtcttccattcgtttcatccaatctcgagcatctttcattgatggaaatttttgaggagcgcaatttttaccataaatgtctttgtattttgattcttccttacagtgtctaaacatagttggaagatattctacttcacgagtacgttcctttccgttttcatcaatataacgttcaacaatgttatttccgactgtttcgatagagatataaaattctttcatagatattccttagtttatagcccgagttattaggctcttgatatattatactccaaataaggggccgaagccccttgcttaattaccaatcgtatatttaggaacgagtttccattcatgtttttgtttaaaagaaataactcggaagttattagttaaatctttcataaaagttctttgaccaggaacaatttcaatcagtccccaatcttctaacagccatgcaatcgaatcacgacgaacttcatcttcttctgtcatttcaacttggcgaccatccatacgaagcatttctttaaaatgaacgatatagtatagtccttttttctggagaatatgacaggattgatacagaactttatctttattattagcaattcccatacgagtcaaagtttctttaactttcagaaaatcttcaggttttttaagagtaatttcaatcattttaccattccaatgctagttttttgagttgtttctgttcttttacattcttagtcacttctttcaaaaaatcatccgtgactaaaccttttagttcttttaatactaaaggaagttttccatttttagtaagaattgatttatagttaattgcatcatttgtattaacttgataccgcttagcaagtaacttaataatcaatacttcggtagaatcttcaaccagttttgcccatttaccatatcttttaccccgaggaacagcagccatcagataattaaaatgggcttcatcacttaatccagaaccgattaaattcattgcatacactgccggcatgcactctggaaattgtgataatgcattttcaaccatgaattttgaataatctttttgagcaatagagcatttagttttattattaatagctccaattatttcaaaaaactcattttcagctttttctttaaaagaatcagcagcggattggacagctgtccaatcttttgaataccaagcaacttgatgctcgtttaattgaatatcatcttcaaataagctcatatcacttccactgcatttcgcatgccaattgaatgaaaagatatgctaaatgtaactcagtattagccgcaattccatgatactggttattttcaccaacaatttcatacatacgaataatactttgcggagttacacgtgaataaatttcttcggcaagtttacctacgaaccacgaataatcagctgcatattttggtgctaaagctctgagttgtttaacatctttatttttgagagactcaagaacatcatcaatagcaccacgatcgttagtaaccagtgataaaataccagcatccaaaacacctttagatgaataactatcgagctcaccaatagttttacgaaaatcaggaaaattctttttaaccaaagctgctacaactttcatatcagctatagcaattccttcacgcttgcagatttcagtcaatcgacgaatcatctgcttcatcatttcaattttatcttcatcggttggttgaccgaacgtaataactcggcagcgtgactgaagcggtttaataataccatcaatattgttagcagtaataataatactacagtttgaactataagcttccataaaggaacgaagatgtcgctgagactctgctaaccctgaacggtcaaattcatcaataacgattactttttgacgaccatcaaatgaagctgcgctagcaaaattagtcaaaggaccgcgaacgaaatcaattttacaatctgacccattcacaaacatcatatcagcatttacgtcatgacacaatgcttttgctacggttgttttacctgttcctggagaaggagaatgaagaataatatgtggaatcttacctttacttgtaatagatttaaaggtttctttatcaaaggcgggaagaatacattcatcgatagtagatggacgatatttctgttcaagaatgtgttctttttcatttacagtaatcataatttcctcattcaagttttagtgtaaattataaagggccgaagccctttattaaaagtcgtgggtagaatcagcttcaagagctactacataattcgcatgttcaccttcaaatttagcagcgccttgtttaccttttgcccagagcagcagtttataatttcctggttgcattttcatatttgccatattgataatgaaattaaatgtattttcaccatcataatcgccaagagtcaaagaatatttaacacgggtcaaagcagaatcttctactttattaaaaccgttaattacgattttaccttcttttaccgtgatagcaattgtatcaatctgcagaccacgagatacacgcaacagttgttgaaggtcttcagctttaatttcagtaacaacagatgctaccgggaatggaattggtttattaggagcaactactgtactcggatcggctgctggccaaaaaattgttgagcgggcatcagcaattttaatatttccatcttctgactgtgaaatttctgcatcatcattaactagagacagaataccgagaaaaccgttcaaatcgtaaattgctacatcaaaatcaataacgtcagaaatatttgcttccgcataagttgtaccattaactgcgcgagtcataataaattgaccggatttaagcataataccggagttaatagtagcgaaatttttcagcagagcagtagtatctttagacagtttcatgtaatttccttcaattcaaatgagatttaattttataactaatttaataaagcaattaacgattaaaatcagctgcgattgtttcggcaacaatttgagcagcaacaatcaaacgttcatctgcattgccgcaatattcatcttcaaggcgttcaccacatgaagtcataataaatttagcaccggcgtttagggattctgtagtatgtttgcgcattagttcaatccatttattacttacttcacgatcgatagcttcataatacgcatgacgagcaggtgcagatttaattttgttctgaataacttccattgcgttatcagaaagagacaaaacccatgctcgacgaattttattttggttttgtggatttgattcagaacgcacgtgttttggctgaatatcttttacatcaacagtataattcacagtaattttagtcataatacacctttagtcataataatcagtaacagtccaagcttcatttctattggacattatttttgtatattctgctttaaatgcattcctaagcatagattcagtaactatatgctcttcattagaaaaattatttctcagaatatatcgttttatttcaggaatagttaatagatgttgtccagttgaatattccaatgtttttcctccatagagattatactctaataaattaaagcataatctcttataaattaaatcattacagtaaatcgaccaaccttcttcatttgaagatgctgaccatatgcttgcgggtcatggtctctatgtgaaataacaaaaacattagtattttttaaactatctaaaatagttgaaatagcttttacaccttcaacgtcggtcgctgaatcaaaaacttcatcaagaattagtgtgtttattttaacacctgaaactttttcagcaatatcacgccaagtaaataaaagagcaatatcaattcgtgctttttcaccttgactgaatgaagcataactaaaatcttcacgaccacgggatttaattgtctcattaaattcttcatctaatgtaaacacataatccgcttccattattttaagataatggttaatctgcttattaaataatggaatgtactttttaataatagcacctttaataccagaatctttgagcatatcagtcaaaattcctcggtggtatttttccattactaaattagtttttgtcttaacaattttatcaagttcttcttgaagcagtgctatttcatcagcatggtcaataaactcagaagatgctttttctatagctgctttaacttttttagctttatctaccgtcgtgattagagattgctttttattgcgaatatcatttgccaacgactgctgggttttaatattatctcggtattcatcaacaagaacttttaaattatcacgatgtgttgaaagctgttcaaatgaatgcgtacattcagaaactttatctttaattttagaaacaactttatcaccggaacttaattgtgacaaacaggttggacataatccaccttcgtgatacatattaatgactttattatacgagtcaatttttgatttaattaaaaatgcttcttgaccgattttattaaatgcatcagtcgggtcttcatccaaaacaatattaactaatctttcattagcttcttctatttccgattttagcgttctagcttcttttgccaaatcatcatacatattttgcagacgtgtaaggttgtcacccgttaattttttctggcgttcaacgttatcattatatattttaatttgttggataatactatcttttttaacatcaagcacttggttttgtgaatttaattcacgtattagtgctttattaagcttatccatttcagctaatgttcctacctcgagcaggtcttccacaagctttcttcgcgcaggggtcgacaaacccatgaaaggggtataccctgctgtaccaaggacaacaatctgcttgaaactggcatatgacattccgataagctgttcaaattctgcttggaaatctttactgctggcagattcattaagacgtgtaccgttaacggtgatttcgaaaacgtttggtttttgtcctcttttgatatagtactttttctcatcatattccatccacagttcaactaaaagttctttcttatttgtgctgtttattaattgacctttctttacatcacggaatggcttgccaaaaagcccaaatgtgatggcttctaacatagtagacttaccaccgccatttcgtccagtaataagagttttttgaaccttatctaattgaatgtcaataggatttccacctactgacattatattttgatacctaactcggtttagtttaaaattcttcacaaaagattccttttaatgtatcttttagaccattctatcatatcatcataatctaaaaagtattcatcaaattcagccatgcaaacaacgccttgtgctgtttttgatgtaatataaattattccaacatatctagaatcttcttcggtataatcaatgtttgctatgaattcatcattaatgtcaaatgtcgaaaacttcacagtatgcatccttaatacaagatacagccatatcttgtaatgatttaggtgtgtcattatctaaaatgttgaagttaaaagatacagcccagtcagtgcagaccgtgacctttttaatacaattatcttcaacctctagcggttcaaaccaatattcaataatttctttatgcccaatatcatcttttacttcgcattcaaaatgctgactcatcataacatttttaaattcatcaaaagtcattgtgttgcctctacatataactgatttgcatattgaataagtgcttcgcgatcagaatcagtgatgtctggaattgcattaatgtattcttccatcaatgtctgaagagattgaacttcaacttcttcactatcatctgactcgacagagttatcaatctttgacacaactcgtaatgaatgcacaactttttctagttcagattcgaacttcgtcagatttttgtctacttcagttactataacacgtactgatagatttgtaaaatctttatagtcaatttttcctttaaatggataatgaattctacgatgccaggtagtattgtttggaataaattccattcgttctgtttctgtatcaaacacccagaacccacgagggtcattctcgtcacctgcagttagtgtccatggtgtcccaatatatctgacgttagcagcctcagaaatagtatggaagtgaccagaccacacctctttataagtcttaaggaaatcaggttcaagaccgtgagatttcattcctttataaaaataaaatccattcagttcccagtgaccaacacaaaaagaagcagatgaagttttgatatgcccgagaatttcgccagtattttcttcacacatccaaggaattaaatcaattaaacatccgtcaaaatctactgtagtaggcttatcatatactttaacattaggatatttagccaaaagctcagtagaagcatttggatgcattacatttttgtagtggagatcgtgatttcctacaatagtatgtaatgtgattccagcatcatcaagcatttgaactatttcacgggcaaactccatagttttatgcgtgatcgcttttcgcacatcaaaaatatcaccgtattgaatccataccgtaattccatttttcttagaatattctatcgcttgcttaattccatcaatttgaataccgcgaatccactcatcatcagctttaacgcctaaatgccaatcacccaagtttagtattttcatggtgtcttttccatcctaatttagctgcttttgaaaccagttctttaatttttccttttgtccattcaggaccaggaggttcatgacataacatttgcttaactccgttattataccattttttacctttattatgtgatgaagctttaaatttatttgaccttccttttacataaccttctggaatataaggcaaaaaggcagattttcctgttaatggatcatgtgaatgtatatttcctttacaattatgagaaccatataatggatgattttgtcctttattatctcttccaaatgaaccttctggagcagcatatgacatattaaagaataatggatttttaactgcatcatgcaatcgttgataatataactcgcatttaatagcttcttcacgcgtatcaaattcagctaaaatgcatgaatcaaataagtgaggattatctgaaagctctttattataaattttcttatactttttagataaaactgaaccatgatatccagctaaatgtctatctaaagacgtagatccaatataaaaaggaggaagtttatctccactatatattgttaaataagttatatattttttcatatatcaagaaccgtcattgaaatgcaaaataaaattattgaaataaatccatctggagtactaaagaacccaatccaacatgctctggtgaatagataaaatgcaagaaaaagtatcacatatccaagaaatatcattatatcaaactccgtataaagctaaagggccgaagccctttattttgtaataatgtcaaactgctctttaaagcagaagcttgaatcttgatgctgatacaaaaattcataagctttttcacgttcgcggtcataaagagctcggtcagatgacagttctttaatacgttcaaatgttgattccatatcattttcatcaaaccaaatgataccgctatcatgcgaggtcaaaggagtattatcaacacggaattttaaattttcgccagtagatttccaaaatactggaattgttccacacgcgccaagctcgagatgagtatattctaaagaacgttgtaaatattttttgtccaacttactcagctgataaccaaatccggatttactcatgcgttcaagcatttcgctatttacataacggtcaagaatttgcgttggcaaattaggagcaattttaatttggtctacttgatgaagacgataatactcgtatggaattcctttttctttaataggaatgaacgctggagaacgttccagaccttccataatagtacttagtcctgcaggtttaagatgtttttcatgaaaataaaacatctgataaaaacctttccatgtagttgtacgaccaatccaacggttgatattcatgttaatttcagaaacatctttccagtatgttgatcgaacctttgcaatatccatcggaggctgaaagttatatacggtcggtgcttcttcaatatcatcaaacagagaaactgtttcaggataccattctttcatcagaactttattaaaatcgccattatcagaatgactaaaaataacatcagctcgacgaacagtttcttctaatcccaaatttcgacgcaaagaaagagaagaatggtcatgttgataaactacaacacgaacagaaggtttaatgttatcaataatttttttatagttattaatagtgtcttcttcaactgaagtagcaggaactgaattgataattagaatatcacaatcatttaccagcttaagtgttttatcatattcttttgccaataaaaccggaattgaaaatgatttataatcatgcgcgcaattacgagtaaatgatttatctttagcataaaccaaagttacttcatgaccatttttaataaaccaatcacgttgctcaagagaaaatttagttacaccgcaaccttcaagacctcgagccataaaaatacatactttcatttaatatcctcattgttttggtttattttaccaaaaatttataaagcaatataggagccgaagctcctatccgcataatacgccatacaaaggctcgttagagcttctaaattttatacgcttatatgttatagttccttctgctttagctttatcatgagactctttaaatcgtctcatcatttcctctttagaggaacgaattttattatctatttcacaagtctgggcgttcatctttcacagctgccaccattttttgacttgataggaatcaacccacactttcatattagggtctgctcttacaataggaggattaacttctttaattgaactatcatggtattccttttcagaaattttcacgcaaagatgaccattcaaagattcagtaaatcctgcattaattttaagacgcttgaattttacgcgtgtaagcatcaatcatatcctcaatctgcgatctagtagtcttccaaagaatactaatgagttcatcgttatatggctgttttagaatatcccgacttttcttgatagcatattcgtattgagcaaaattattgttttcagctgcaatttgagcgtgtttataaagacggttcagttcgcgtttgtttttagacaataacttatttgcttttctttctgcttcaagacggttcttttcttcaatagaagaaataagcttttccacttcatcattaatttcgggtttatcagtcatattatttctctaatataaaataaaaatcatcatctgttaaatgataccgatagtttaattctacaccattagatttaaaagcggtatcatacggattttctggatcaatatcgatgtcaagagctaaaacttccctgagatacattttaagtaaatagggaatagcttcaacttcaggtatttcttccaagaatccggagaggttaatcgttagcctcatataaaaaatccaaactaggagaatcgtctacaacacttttcttttcagcccctggtgttctataggttgattcttcgtaatgcgtcattttatcgtagatgtcttgaataaaagtttcatctactaacgcaaccatatcgtcgtcacgactgtcatagacattgtgaacgaagtaactatatttctttgcaacttccttacgttcttttttaatacgttggacgaatgcattaaaacaagcttgagttatatatgcatgtgggtttttatatttcgtttcatcaaaattatgaagtcccttaatagaagcttctataccatctgcaatcatttcttgtttccaagactgggtgtatcctgaaaagttgaaacgtttagataagccttctgcaataagcataatggctaatccgatagtatcattctgacgaactactttatttgggtctttattatttgctaattctgttttccaatcaataatagcttgtaaaagctctttattgtttacgtaattatatttaggcttagtttctgacattttcacctcttagctcaattcatagatctattatatcataatatttgaagatctatcttaaagcatagaggatatcagttatctaagtaagcagtatgcttggaatactttctccatcatctttttaaattcatgaatatctatataatgactagttaaatcagcatgatataaaaagtctaaaaacttttcatgtgtgctaatgtattcactttcatttaattcagaaacatgactttcccaatatccaacaccagtcttatttgggaaaaatgaaattttcatgtattggtcaacatagaaaattccataattttcaatagtaatagaaatattaataaatttcatacattcatcaacttagccgcttcaagagctgcatctagtgaatcaaattggtcaacgtattcaatcaattcgccgtaattagcgtataaccaccattggctaaattcatactcaaggatgaatccgtttccttcaatttgggttaaaccaatgccatttgtatttacttcatatccggcaagacgtaaatcgttaataagagcttcgttcatattcataccttagcaattttcagatcagcaaattttttcttgcgttgatttttcatacgacgaatagttttatcggaaatttcatgtttttgataagctttagattctacaccaaaagctttaacatcaaattctgacaagatatattgaaccaacaattcacggacagtattgcgcccaattttctgatcattccgtttcatcgtctgatgaagctctttttcccatttatccaaaatttgaggagttacaatatcgcctttttctagcagagaaactactttatcatatgcataagaattgatggcgtttttaatttgaatagtcatacattatcctcaattacgttaaaattttattatccaaaaagggccgaagcccttagctaaactgtttggcgcccttccagccttcgtacatcattgcagctgatattaatattgctcctgcgcattttgaatatttgtgattccaaaaccagttcagaaaaacttcgtcatcaataccttgggctatcatattttcaaagaactgacgacgagcttcggcaattcgttgcgataatttagattcaggattcatttaaattttccagttaccgttttcatcaataaatttaatccagtcatttactgaccacttggtcgtatcgccttttggagcaacatttaaagtgtatagtccttgcttaaaaagcattcgtttgatattcatattttcctcagctataacgataacactcgtttgatttacgtttagcaactcgttgagaaatattataatcaaaatcatcgtcaatgtaaactgattttttcaactttcttacttcaccgcgtaattgacgatttaactcatctttaacttctgaatcaatacctttcattctacgccatttatctgagcgaaaaatgttttcaaccatatctttatgacttaccccatcaggagctttacgctttccgaaatagtcataatcacgcacttttaagtctttacgacgatacgttttacccatggagtttaatttccttagcaactgaactaaatacagcacggtcacaaatcatgtgtttatgtaacttaagtataagataataaacatcataaccatttacgtaagtaacgcgaacagcattaccattaataagataatactgtccctttttaatttctttatcaatcataaccatatcaattcctcaaaggcaattcatgtgttaataataccacggtttgagctcgttgtaaacaactttgtgaaaaatattttagggaatgacaagaagggaacgatagcttagaatggtaatatacagaatgtgagaaagaaaggcccagagggcccgtcttagtcttctatgatatctctatcatatccaagtgaaatgagagtttctttgaagtgtttaatgttcttttgtctagaatcattgatgaaaatgactggataacgaatgttaaaagatgtgaatccagcgcgtttagcaagagatacaatcagtggacgatcatactcaatcttaccattatttgtaagaactttatagaaagtaaaaggagcattgagctcctttagaagttttgtaactgattgacatccaggacaacgacctacttcatctggaattccatagacttcaatcttgttttgtttcacaactattccttactgagggcagcattcagcttgttagtaattttatccagacgctcattaaactcactagaagataagcccttttctggagaaatcaaactaattacgaaaaatatagcaataaaaggaataaggaaaatagctccaactgccataaacagaaagaatgttacagttgtaagaaaatcagctaaacctttacgaaatttatacatattttacccttaattgattaaccaagcattgataagcactaaactatattgtgaataaaattctggaccaaaatgaaaaatcatatcatttatagtgtccataatataattcaatttaatcatgtttccacaccccatcggtatttgaccaaagtcgctgattatctgatcctcgccacagctttttggtcggaagatttttctcatacttcccatcaataataacatcaacatatttaagcatttctagttgtttaatatcttcaaacttatatcctgtccacaaccaaatgcttttattgggataaagatttttaatagtttgaaccacagagtgaataacatctcggttatcgggatagagagggtctcccccagttatagttaatccttctatataatcattattcaaacattcaattaattgttctagtgtttcaccagtgaatggaacgccatttctagcattccatgttgatttattataacacccttcgcatttatgcaaacaacctgtaacgaaaagaacgaccctgcaaccagggccattcacaaaatcgcaaggataaaatctatcataattcattggtgtttaaccctatgcatgatttctttatttttaccgagattaaatccgcgttcgttcggatttcccaaataaccacatgttcttcttattgtgttcatctttttaggatcagtttctccacaaatagaacaaacaaatccgttttcagtaggagtcatttcatgggtacttccgcatgtaaaacacttatctactggcatattaacaccaaaataatctaaatgttgtgcagcataatcccagacagcctcaagaccttttaggttatttttcatatcaggaagttcaacataagaaatgtgaccacctgtcgcaatgaaatgatatggggcttcgcgagaaatcttttcaaacggagtaatattttcttctactgaaacatggaaactgttagtgtaccatcctttatcggtaacatcttttacacttccatatttttctgtatcaagtttacagaagcgataacaaaggttttcagcaggagtcgaatacaaactaaaagcaaacccagttctttcagcccactgtttaagacgagcattcattttagttaaaatttcttgtccaatatcacgaccgacaagaatattcaattcatgaataccaatgtatcctaaagacactgaacttctaccgtttttaaataactcaattatgtcgtcatcaggtttaagacgaaccccgaatgcaccttcttggtaaagaataggagcaacagtcgctttaactccttttaaggaactaattctacacatcaaagcttcaaaacataaatccattcgctcattgaacaattcagtaaatttctgttcattgaactgtgttccaatataagaatccaacgcaatacgaggaagattcagtgttacaacaccaagattattacgtccatcaagaatttcattaccagtcgaatctttccatacactcaagaaactacggcatcccatcggagaaactggaactgaagaaccagtaatagctttattattcttaaccgaaataatgtcaggatacattcttttgcttgcacattctaacgcaagttgtttaatatcatagttcggatcatctttataaagattaacaccttcttcaacgaacataacaagtttagggaaaataggagttatcccgtcacgaccaagacctttaatacgatttttcagaattgctttctgaatcattcgttcagtccagtcagttcccgtaccaaatgtaattgttacaaaaggtgtttgtccgtttgaactaaagagagtgtttacttcatattcataagcttgaaatgcatcgtatacgtctttttctgttttagattgagcataattcaacgcatcggcgatttgccatttttctgcatcctcaatatgttttgcataggtgcgtttaacataaggagaaagtactttatctacattagcaaaagtcgttccgccgtattgatgggaagcaacctgtgcagtaatttgtgccataattgcagtagcaacgccaattgatttaggagtttcaatctgcgcattaccaagcttaaatccgttctcaagcattccttttaaatctactaaacaacaattagtaaatggaagagcaggggaataatcaatatcatggaaatgaataattccgctttcatgcgctttcataataaaagacgggaccatatttttggcaatgtgtttagacacaataccagccataaggtcccgttgagttggaaaaacacgagaatctttattagcattctcgtttaaaaggtctttattagttttatgaatcaatccttcaatttctttttcaattgtcattttaaactctttctaagctgcttcttaaatgaagctattaactgtgttttggtgtcagattcattatattcaaatcctctttgaagcatctcggccatcatttcctcttttcctaaacgagaaaattcctttgatttatctccaacaaagttagggtgaatattattttgggtgtaatcggattttaaataagtaagtaaattttctaaccattcaagataatcaacaccttgtccctttaagccagaacgattaaatttatgtttcatttgaccttctgcggcattgcagagattacaaagcaatccacgtacctttcctgcttttggtccatttaattcatggtcatggtcgaggtgattagcttgaacatcaggatttagttctcgttggcaaattaagcatttaccgttttgtgcattataaaatttttgtttttcttctttatataatttgccagtcaataacataataaacccttaccttaaatagataagggtatttattattttcaagtattgtaaaacatttgattcaatcgcttatattgccgaatcttttggtcagaaaaagaaatttgggtttcaagccattcaatatattctgccgcagcttgcatcaaatttccttcatagccatcgttattttcttgtgcagctaatttagctaatgcgtatgaaatacgttcaccttgaaaatcagctttaggcttctgaacaacttgattagttctctctacaacttcttcaatttcgccattttctactgattcagtattccacaagcaccaatacgtaattggcttatcgtagatgttaataatctttccatcagaaagttcaatttcaataattccagtatcaggctctatatcatcttcacattcttttgcaagttcacgaactttaaagacagtacctgcactaagttccggccagtaattacacagccctgtatcagcacgattaattctaaaccacttatctactgtaatcatgccccatctccatatcaattaagtcatttatcgttggttcattatatactgtttcttcatcagtgtaaaccggttcttccggctctggctctacagtttcccatctagccgcccaccaaggttttatagcgtaatccattctcgtactgtctgagttactacacgttcatggggctcgactagttcaacagtcggaactgcataataccagtcagaatgataagaacctgaccgagattcatttaccgctacatgtacattatgttttggactaaagtaaacacactgacgatattggcatttaccatcttgcacccagtcttctatttcgacaggtttaagataatccgaaaaatcgaaatcataattttctgaaaatgcatcatggtcttcgatgatttcactcagaactgcatcaacatctaatttattttcaatagtcattttttcaccaattaatttcgcaatttattaagttcttcataatcaatccaggattctaatcctgatggcaaatcagattcaatttcccaaagaagttcttcaattttatgaagacgatctagttcttcggctggaatagtaaccattgacggagctcgtgatacattaatatcgtaaatcatatttaccccaatttaaccatacaatcgccgtatttccacttagaaatagacttttcaccattagaataataaacttcaagtttagcacgattatttttaatttgaataacctttgctgtcatcaaagttccatacccataataaactgcaacttcatcacctacatataccgcgcttccgcggtaatcatgaatataatcagttccttcgagaatcatttaaagtattcccgcaattggtcaaatccaccaatatgaattccatcaggagcaaatacctgaggcatcgtcaatccgatttgagtatcacgacctagtttagtcagaagctcagcgattttctcatcatcaaaaacacctttttccggcataatgttgataaattcaaacggctgtttcttcacagtcaaaagacgttttgcattatcgcaatacacacatttgtggatgttgctatcataaccatatactttaaacatattattccttaattcctagtacttgtttaaaagtctcgtcgtaatcaagactttgacccgtttgttctttatgtttgtatataatatcacttacttctgatagcatatttttatatgaacgagttaaagcagatttaagcacgctgtatctatcaggaaatttaccgtgttcattataataagctattgctaattcacggactgccttttcagcagtctccatatattctttacgcttggtcatttttaatccaaaatattattaggcattggttgaacactcacaagttctttaaagaactcagtagagtcaggcaatttaaccatttccggagcatgcttactgaatttatgtttacattgacggcatttatattcaagctctggtttacgccagttaatcaattgaacttgttcagtaccgcattcagggcaattaggaacgtttttagaagctctttcacgtcgttcaaccatagccataatagcgtcccaggccggcggtttaaaatctaaatcgtcgcagccgtgaatctttccacgcatttccatatcatcttcctcaccagccataataattttaattaaactggaattacttgaagctgcaatgtcttctaataaacgctttttcatttcagtacctcaatagcatcacgtaaaccatttgcttttgcattaagagcttttaacaatttggtgtgttcggcaatctgggcttcaacttcaatcaaacgagcattgagatattcgcgttcttcactcagattatcaaccttttctactttaggttcttttacaactggcttatatgtattagggttcttcagtttaattagaatgcgtgaactgtacagcattgaaccattatcttcggtttcgtcatacatttctactacgtccatcatctccaccatcgtgcagagtttataagacaacgaacgaataattttgttgtgcttagtaatttctctagctgtcatggtgccgagattacgtgagtaataataaggaacctggatattaattaatactgatgaaccacctggcttgtgtgttacttcatcagcaataacccaatccttaacatgaactgtatttgtacggtcatcgcccgcggtaaatagtttacgagcatgcttaaaaagcatattcacttggtcattgaattgacaagcgaatttatcagcaaatttagtttcgggaattgtagataaccaatcagccaaatgggtctttttaacatcgttaacaatagtaaattcaaccaaatcggttatagatgtctcagatttaatgaagctcggcttcataaagtttttaatgttatcactagctacagtagaagataacagacgagaacgtttaaaccattgaagcaaattgcctaacgaatgagaataagcgttttgagtatctttacagatatgattttcctggccaacatattgaaggaaatcacgaagaatattattgattactgctctgtgtcctatctgataattacggtgtttagtaataagactgtcaaaataatcaatataatgtttacgggttttcatgttcttctcacttggttaatgatttgtactccgagccatccttggctttaaattacttaattaactgtaaagcttgttcaagacgatccaagcgattaacagattcttcccaaatccttttagcctgctcatattctttctgcgctttattagaaatttctagaacttctttataagctttttctaatgcaataacttctggacgaatttctgccggttcaggtgaatcgtcaagattatccattagttcctcaagggtaatttcttctttaggagtattcacaatttcatcacatttttgctggtaaatttctttatcagtcggtgagcacgcacactttacttcacgaagactaattacaattttatatccttcccatccgcatatattcttaaaaggatatgtatgaatattttctactgtttccatacaaagtaatgcagtctctaactgatgagttatagtgctagcaattgagaaaaatttattaatattcttttggttagcgtttggtgtaaaaaatccataattcacaaaaatagctactttattttcatcaagctcatattcttttacgataatcatatcagaagccaaaggatgaatttgacgataatcgccataacataatttagaagctgattttagaatttgtcctttgaaaagtctgaaattactaatccaacgacgagtaaaaatattctcagggtcttctttattattaagatgataagaattaacatcaccgaaccaattatatcctactacatctttggttcgtttaatttctttcccaaaattaccaagaatatcccgattaaccaaatatgaaagaagacgagactctttaaaagtttttttgataacatctttatctacacggctagaaattttacgaatttcatgaataaatttagtagaagaaacaatacttgcatcaacactattgagccattgattgataatagaaagaacgatattttgaccaaacatcggtatagctttatcatcaataactctattgaatgatttgatatattcgttacgagtcatattaatctcctcagtagaaagtaagaacattataccacatccttgtggcaaagtaaactagttcagtgcatttagtgcattgttcagtttagaacgttgctttgtcagattttgaacccttgactgagcttgttctaacgccttttcagcttctagcacttcattggtcgctttaacgagttcatcatctactgccttaagagacttctcaatcgcgtcagcgtgccatttttctacaggtttaaaatttgaattttcagtaggaagaaaactcactttattaagtttacatgcatctatattgcttgagctatacatccaaaatttaggatcgtttgataagtaattggataaatttaaatttaagttatcttgtacttcctgctttttctcttgcgtgacttcgtcctttctcaaaaaatcgtatttaaatgaaacgatcatatcaagttcatacgttgttgtgtctaacttaaatcgttcaaaacgaggtaaaatcttagattgaacagcagcaacaacatccatatacttaaatgcttctgtcaactgtgatttaaggcattcacaaattgaaagagaattttttgtattaggtttaaagctaattcgtgcagttctattattttcttttaatggtcttacttccatttgaagagtataaccatcaaatttcagattctttaagttaatatcagaaccttttaatcgactagcagtagacaaaatttgctttaattgtctacggaacagagcaataaatctccattcaatacgataatgatttggattgaaaaatccagatgataaatcgaccttactttgaccaacgccttgaacaaatagaggatttttataatcaatagttttacagaaatcggtgagctgctcacgagcagtcatttgtgtaatatatcccgctttactaaaatgacgtaaccattcactgctattcatatacttaaagtgaatatcacgattaactttatcagggtctaaattattttggcacaaaaatgtcataacatcacgagtatagctggcattacgaaccatatcttcaatttgagaacgagttttcatggtgttccttaagatttaagtaaatcaacaattttaattaatttttcacgctcagatttagctttactactcaatccagatagtctgaaaatttcatcgtcatactgttgaatagaaatattcagctcttcaatctgcttattaaaataatcaatttgttcagaatgtttttcgttactacgaactggtacaggttttgtaggcaatttagttgaactggattcatccgggcgataaattaaaatacaacttgaaccaatagggcattttgcaccagatgaatattctaatgttccagcttcttttaaaacttcaaaagctaaacagagatgatgccccatattaacataatctgtagagcgagctctgatgtaataatcatctccgcgaatactaaatttaaagcatttaaggtcttctgtattattagttttaaaaatcatttgtttatctagacctttagctaatcgagcgcctaatgctaataatcgtcgttgattttcccacaaatccgcaatcatttgatcaaatgataatttcggcattagtcgaccataaaggtcgtatcctttattataattacgaagaatttcactcgcattaatacgagacaacgctccaattttattaagggctttcataatgcgattagataaactcattccagatccgtttgttcgctgcaaatgtttttctaatccaaatccaatatcaactttaaatttatctaaaatttcagcatgaacatctctgtcaataacattcaaatccaaagttgtgttaaatctatgaaaaaatttatctggctctccacgacgaaatacagtccattcattcatcatttttttattaactaaagatttaattactgcattgacattattaattacgactgacatattttcctcactcaatttcaattttactaaatacgcagaatatgatggaaaagactatataagcaccacacacagattgaactaataccattccaaagaaccaaacaatattatcaaacaatgtctgttttacgtcgaaaggacgtaaacttacagtaatattatcgcctttttctattgatgaatacatctctggtgaaatatattcgctaaatctataaccgtcattgagttcatatacagcaataaacgataaactagacccctttccttgagttcctgtaagggtattaactacagtaacatcataatctttataatgcatataatcattaattgcgtaataaccatatgcaattactatacataaacaacatatcaataaattcattcttttaattatcaactgtttcataataatctcagttaaaagggcttagaaccattataccatccttggtataaagcggttatgcgagtaccgtctttaaccgttcttcaaacttccgaagagtattctggcgttcagctctttgctttttgtaagtttcaatacgctctgaaatgagagtgtatcgttcatttactgattctttcataaaatcaggaatttcacgagaagctttaatctcatcaaatttatcaataacagcttgctcttcagcaattaagttatcatacatcaaaatatctttcttgatgaactcaatatcttcttgagttacacgagataatttagatgctttatcctttttgtactgttcgttagtatcacgagaccagtgtaatgtacgatttttattcgtattcttgtaaatttctacaataccgatctcatcaataataacgatccaattccaacgggatttgtaaatttgtcctccatcaacagtgatttcacctccgattgagatgtcattaaaaaacttgctttgtgcttcagatttaaatttaccatcgttgtaatttaccaggttgaaaatatctttagcgttcattttgtgttcctccgtagttgatagttgtatagtaccacagaggaacggtcttgtaaacaactaaaagaaacttctttcacaattttttccactgaaccatgcgctcactgctttcttagtctcaggagcagtgttatccataaaccattcaaaggcagcctttttatgattctggagggcttctcgggctttaatctgctcacggtctattaacactaacatatgagcctttcttgtcaccaggggcttcttatgattcttggagtattcccagtcatttgtccaacgcattgtcgttgcgaactgaaatactgcttctttaattttagtttcgtaaatttcacgagcctttgagtataacatcattacctccatttaccagtttaattctagtcatctttttgatggcagtccatataatctatttctgaactgcctttttgtcttacgattcttctaaatgtcttttctgaaaagttgataccatactacgataaggttcatttggatacccgtgttttatagcttcctttgtaaattttctccatccgtatttagtttctttccaaagctcgaataattcatcttcatactgccatatagttaaatgagaacgctttgcagctttaattccattaatgtgcttttcttttactgtaggattgcttagtgtctttttaataatattactaacttttctaacaaaagctgggtccttatatcgttgtgaagtttttattgaagtgtttaatttagcttccggcgtggatgtgacctctttcatctttttcttcatatgctctatatgattaggatttttccataaatttatagaatgctttttacattttatcctagtttcatctgcaacctttcctccttcacccccatatgacaggttaacacagttttttccatatttcaatttacctgccatgatatataatatttcggcttgtaccattttatcataattatcaaaaacttctaaaaccgtttttgataatatatggtcatttgacacttttacacgttctatataatttccactaccaacatacgaatcattgatgttattagttatatgtcgaccataatagtatttcttaatacttgtctttaaatttaatatttcagttttatagatagtaaaatatttttcattttaataataccgtttcagcaatttcttcccaatggtttttgtcggtcataataaagtcagcaagataaagagcagtacgcagtgaaacattgcgtaaacgattaacattgactttcatccatgataatgctttataagtttcttcatcagaaagaccgcgcttttgcatcatgtcagttgaaagaataacatcttcaaccctgaccataatttcttcattagtgtgaacacccaaatccaaataaactgagcgggacactaatgcttgtaaatgtggggcaagtttagtaccacggtctaattcgcggtcaatatcaacgtttgtgataaaaacaatcgttcctttaaattcaaactcacggtcaatgcctttttcttctaagtaagaagacgcagtgctccagcagactttacgggtttctccagtgtccagagcagctttcagaagattaagaatgtccatatcagagaaaacatccacatcatcaatcaaaaggacagaattctcttcacgattattccaaagctgctcataaagaccgataccggagattttaccgttaatgcttttatattcaatgtatccattatcatttgctttatttaaagctttatctaaagaatacgttttaccaatacccgccgcaccagagataattaatgaacgaatgtttccgttaataataccattcgtcatcattcccataacattaaatcttttattaatgcgggttttcatatcttcatatgattctttaacttcttcaacttttacaccatcatatgaaatatctgatttgtaaacccaaacaccgcgacgtttaccgtcaatttcaacaaaaactttaccatctccttgtgcatctaccggagcattatctgggaaccattcgcctaagagctcaaaagttccagagatttctttaccgaagtagatacccttattgatagttacagttttcattttattctccaaatccgtatcagttgatagttgtatagtaccataaagctttatgcttgtaaacagttttgtgaaaaaatttttgaaaataaaaaaggggacctctagggccccctttgtgttgatttattccatttctactatatgcatgttctttttgctatcaaaatatatgtttttaactattaactcagaattaattggcagtaaaaactctctttcataatctaccatacaaagattatcataaagcttgttaagcttatcatcgtcagtttggccagattcttcaattgcgattaaattttctaaaatgtcaatcatagcagtcgaatagtcaaaaacgtttgcattttttaacactactaaaacattagtcatatagcgttctgcagcaaacgtttcagctatatgagactcactgctaaaggaagttattcttttaaatttgattctcctattaacttcaaacttataagatagcacttcctctattgtaagtcctctaaaaagtatgtctttaatctcaagtttgtctttaatgtaatcattaacacgcttatgattaaaatcattaattttgttgccaaggcattgcattaaaatatgcattgtattctcctcaatttttaaagagcaattaattaactacacatatattataatatgctttgcgacagaagtaaacaactttgtgaaattattttaaacaaaaaaaagggagcccgaaggctccctatcatttataataacttcggtggttttcaagataaaccctctcaaggaagtcatcccagaaacccatgtctactttttgctgcataccgttcttagaagcttcaatggatgctgcttctacttgatcgaccacatcttccaaaaactcttgaacagttttaaatggatgcttacccaacttcacgtcgagaataaacggagcatcttggagtggatagactaagtcgccagttttgtaaatttccaatagttgaagtccaccacgacaagcatgactcagagctttccagtcaataccttcattggcttcggccttacgagcacgttcaccatattcagcatctaatttgttcagtgactgcttaagctcaataagagaaagcgttgtctgatatttacgacccaacacagtgtagaacgtttgtggaccggttttctcatgattatggaatacccattcgcagaattcgttctctggaagacgatgcttaatatcttcaactttagtgcgacgctgcttaatagaaccatcttcttggtaatcaacccattgctcagggatttgattaactactttcaatacatcgcgtaatgcagccaaacgagaacccttgacaccgtatttagaagcttgcttgcggacatatcctaaatatgatttcatgttagtcgtataaaaacgagaacggttgtcttgaataaacttccacacatcaggcaaatcagatttaaccactagttcaggtggagtgtgaagcatatccaatgctacagtttcaccatctgctgctaatttaaagaaatacttaagactgtataattcatggtcaatatcatctttagtgtttttagatgatgtattgttagtgtttttactcatatgctctttaacatttccgataagaatatcacgagcaggaggaacaaagatttctttaaaatctacatcagattctggggtagaagttccataaagatgactaccaaaatagcttttcattactgttttcatcattcagccttatattcaataacaggacatactttagctttacgagcttttaaaaattcaacgataatcgatttcttgggttgaataggaggtaaacctttatacgctctatcaatattttctacgtgtaaagcataatcctttttccatttataatctttatatttttcacgcaaatgtgcaggaataacaaatgaaccgataataagtaaaacaaccaaaagcgcaagtataaatgctgatggaagaagagtccataaactaccgaaaataagccaacgttgtaaactttctgtacaaataattgttaaccctacgagtatagcacacccaaaaatagaaacgaaaaatgtaggaatggcaatagaccaaaaatatgcgcatagtgtcttaggtcgttgccattcatcgttaaacaatttgaataatttatagtgccaagagttttcattaataatcataattatcctttcattgaaggcgtaacggttgttaaatacttaatcatagcttcagcttctgattttgataatgaaatttctccattgttttgacgaatagaaataaaatccggatgacggtcaccaccagcttttaaaacacacatataagtatcagtttcatcttcaatatttgaaatgattgaagcagttccacatgaatgtggtttttgataaattaatgcagcttttcttccgccatttgactgttcataaacttttaatacatcaagcaaatcagttcttttatcaatagctaaaatgttgttttcatcttcaatgttaaatccttcggatacttcataaagcgttacccataaatcacctatatcgatagtagcattttcctttccatgactttcaagagcatgacaaattttcttgatttcatcataactcattttaataatatcatctccttgaataaggaagatgtcatttttaaattcaacacgaattaaaccacttccacttgaaataaacatatttcctcactttgaaatcatagttggaatgacagaatcaagataagtctttagcgcaatagcttcgtcttttgtaaatgtgacaatatgtgatcgaaaatcgtcaatttggcgaatagttaagacatctccatcttcatagcattttgatacgtttaaaacagtttcatcattctgattgcaagcgttagtaataatagcattgcaatttttaagccattttaaactgtgttttctttcattagaatcataaaaatatttaatgtaagttataaaattatcccaattattaattgataagcacattgactcacttttaatattaaatcctgggcatgaagaataaaaatgaattttgtgctcatcattgatgcttactattttatcagtataaggatattcaatttgggttaaatgaatgatttcactaggcgtaaaatatagcatatcgtcttcttgcgtcaaacgatacatgttatttactttttctatagccaattcaccaaaaagcggactaacttctaatactaatcgtttcatattaatcctttttatttgcgctgatttgttctaaaattttagagtattcctttgtatcagatttacgtacaatcgatacactatacggcatactatcggtgtcttttataaagcgttccaaatgacactctaataaaatttctggattataaatcgtgtacatcaaattacctgttgctccacgatattgacagatttctactgattgaacatcattccataattttgttaagatcaaatcacctacttctaatttaggaaagcccatgttattcaccaattaaagtttcaatataagaatcaagatttactttagcttcttccataagagttttgtatttaatcttgttggcatgtccggagaaagctgattcatcaataattgttgatgtatgaacagctttactatacgtctcaattaattctcttaatttaaaagcctgctcacttgtcattacatactcctttgaataatatcaataatgttgttcaccagattataagtaaacattgggtaattatattgaatcatcacatacacaacaaacaaaactttcattctcttctccttgacagttgacaagattactataccataaccttgccaacttgtaaactgttaaatgacgttttcaataaaattctggagttttgtgtgagcatcaaccatgattttcatttcttcctttgcgaaagctatgcctctttcccgagaagaacactcatagtcagaaactgcattagcatattcttcaattaatttcattaaaaacatctgcttttcagttttcattattccacctaatcatttcaagatattgaactaacttagctttagatttatccaaatcctttttagctgcttctataccgtcgtatgaatatccttcacaatgctcaactgctaattgatatgaatctatttcaatatcacgtgctaatttaatgattttttcaaactgttcgcgtgttagcataattaaactctcgtattatgatcgataatttcatcaagaaacatatctaacgcttctaaagcattatccactttagtttcaaagtctttaatgcctttattcgaaatacccgatgaataccaagcaaagtcaatcagctcttcatctgctttacgaattaaagctactaattccttaattttatccgcttgttcgatactaatcattattccaccacatatgaaagagagaatattgcacacgccaagtgagttgcaacttcatcacacatattataacgtttcttaagaagttctacaagttcttcactagtaacttcatccatgtcgacgaaaaaatcaccattaatgatgacgtagatatttccttcttgattaagtgcttcaattttcatgatgttctcctctttatccgatggttgtatagtaccacggctcaaacgaaaagtaaaccggtaaaatgaaaaaagtctcccgaaggagactattgttattcgagggaaagaagatacttactctggtaaaacattccagtaatatcatctatcgtgctttgaatggctggaggcatttctttataaatgctgttagattggtctagtatgcgatcaatcattttaactgtatcagtaggaagtttactagcatctggaattgaaggtgtgtattttctaccagaataccccaaatattgctcaccaaatttatcaatcaaatctggcaactcagagaaaataaaatcgtatgctttgtgtctagcataacttttagtttcaaaatgtgcagaatgaaaataagcttgtgcagccattaataaacctaagtattcatctgcctttgaaggttttccactttgtgaaaagtcgctgaatttcattcagtctccaatttaatgttcataattctagcgtatgattgtgccatctccgcgcctcgttctatacattcaaaatcagaagagcacgggtcatttttataggtcgttctcataaaactatagaattgttcagacgattctacgcttttattttcaaaaagtgtataaacgtgcctaataccagattccataaatttatcaaaatgaggatcgacattcgcttcaatcgatggagataaagcaaatgacaatcctagcatggcaaatagtgccgttgcttttaaggccataaaggcctcctatcatttttgtcctgtatttactttatgccgatgcacggccttaactttatcaaggtatttttcaaaatttcgcaatctagtatagtctgccggagattggttgagtgatacttctcgacgcaaagctgaaatgatatttccaacttccctacgaatttcatctaattgaagcacagtaagattgcgaagttgcttttcagttaattgtagcatatatacccctttagttagataaacctatttataacttttgcactaaccgagttttttagttaattcattccaatgttttctacacaaagaaacataaatttcatcaccaatacagatttgattaccttctttaactggtgttccatcttccattaatcgagctgtcataatagcttttttaccacaatgacaaactgccttcagttcaataagtttatctgcaatcgctaaaagttctttagaaccttcaaataattttccagcgaaatcagtccttagtccataagccataacaggaacattatatgtatcgacaattcggcttaattgatgtacctgttcagtttttaaaaactgagcttcatctacaaatacgcaatgaatatctttttgtgcttcagcccatttatagaactcaaaaatatccatatcatccgtaataatattcgcttcctgtttaattccaatgcgagaaacgacttcacagacagaatcgcgagtatcaatagcaggcttaagaactaatacactcattccgcgttctttataattatgcgcagcagtcaaaagagaagcagattttccagcattcattgctgcataagtaaaaattaaactcgccatatcaccttcttaaagcgtattcacataagctattaattcgttttctttcttatcaaaccgatcagcaaattcttcctgctgttcgggagatagcgggccgtattcatcataaaaggtgtttgcttctatatgctcatctagaagttcatgaataagctcaaataatctacttttctgactaatgcttagactcataaccattgcacctttaaacaatattcttctacatgctgtttacgtttatttttatctataaaagtatattcaacatattcgccgatataccatttatcggtgttgtgttgactttttatagggcatttagttactcgtgtttcggtccagtgtcgaataatttctgctttgtttttaggatcaaacggatgcgggtaatgtgctttcataatccaccactattaaatcaatatcaggagtaaacatgtcgattaatttagaaaccttatcccaatcaccgccagcaataccacaacctatgcgtggaatgtaaattactggtttaaacaaaagggtttctgcctgtagatttaattctatcatgcagtttactaaagcaccataatcaagattaggacccggttcgtattgcgtatacaggttatagcatataccaaatcccgtaggactatgtttaaaaacaatagacatatcgcctaatttatcacgagaaccgtactcagtagtggttttatctatttctaaaattttaggataggctcttgctaattgacccgctacgccagagcccattgtgtggaagcaattgcacccgtgcgcaataatattaccttgaagaaatagggcgacaatatcgcccttgatatattttacaatcatctagtactcaatcctcgattataagaatctaccaaacggtcaaccattgaatgacaagcggctttatctttctcctccgcaactgaacattctaaggtattccactttttagcatatcgttttaataaagtatcgttcttgtatctacttgttttatctctttctccgtctttatatgcatatattaatttctgcgcaaattcagcttggcatgctttatttttcccacaataatccgcggcagtacggtttacatactctctaatttcagtatatgatgtatctgctaacgcagaaaatgaaattaatcctatacataaaaccaaaattttagtcatttactatttccaaaagtttattatttttaaggtaattagccttttctaggacttcagaagcatatttagaaccagctttaacattccatcccgaattataagaggatattgcttttcttatatcgcccttatgtatatttaaccaataagaaagttcaatgtacgcccaggaagctgaattggatcgtttattcaacattctttttatttcagcatcggtcatgttataaccaagttccttaactcttgctcgcatagtaggcaaataattttggaacattccataagcgtgatgctttggtttagattttaaattaactccgccagagctttcttgccataaaatagcagccattatatgacctaatccgctcttgtggatatttttgtgtgttttatattttccatccttagaaaactgttccccgaattgatacgcgtaacgcatgttatcgagttggacattactgaaagtatgctcggagctatgtgccatcattgaaatggccaatagaccagcgagtagtgcttttctcatgcttacctcattgagttttaattactgctttagaagcctttcctggtaaacgacgactgttaataattgccatcctgcattgaagcgacgggtctttgaacttcgcattaggtttacaaactgtaaatccaagccaaagatttccatctgtgatttctaaacgtccaggacgatattcaactccatcaataaaatcctcgtcaatgtcaggacgcggaggcatactcaggaattcattaacttctaaaacatggtcttttattttgtggaataattcaaaaacatatgtctcatcaatctcccgttgaattgcacgatcaagaagatgctgagaatattttagatgaaacgatgagactcctgctgcttttgatgcctcacgaatctcattgttaatttgacgaaactccgactcaaaatgacgacgaagcttatttcgacggataaaaacttctgtgttgatagtcatgttattctcctcttaactgatagaaaaattataccacagtcaagaggaaaagtaaacagttattctttaaatctaatcaatttattcatagactttgaaacttctgcacgaacctcatgtagatttttgagctgttcaaggcgctgcgtatagtaagcaatttcatcttcttcgagacagtcctgtgaatcttctttaagataacgtgcatagtcctgaaaagcgttacggactacttcctggaagtcatcaagactttgaattttcttaggagcaacagatacacgacgaggggcagtataatactcataaccaaaccctgcgcttaattgagccattagtatttttcctctggttggaacacagcacggcaagcccacatacttgcttctttgagtttcgttttagcaatagttaactgatcgaggctttcggcgtaattcttcgcgagttcatcatcttcacagctatcaaatgcttcccaaaattcatcgtataaagcatcaaagataagtcctaaacgaacttcagcgtctttaatagcatttactttaccgattttttcgtcggtatgtggcttataacctttaatatcttcaatcatatttgacttcctcaccagtacataaatcatattcaactaaacgaataggttcatgaatgccatatccctgaacagaaatttctgtcgtaggataaattccatcaatatcacccatattccaggcttcattaaattgttgttcgcctgaattactaaaccattcggcgaaagcatttagcacatcttcagaaccttcaataattatctttgccattacaaactctcggtaaaggtacgagcgataacgtcgcgctgctgttccggagtcagagagttaaagcgaactgcataaccggatacacggatggtcagctgcggatatttttccggatgcttaactgcatcttccagagtttcacgacgcagaacgttaacgttcaggtgttgaccaccttcaattttaactgtaggttgtgtttcaatttcaatttcacgggcatgcaaaccgtagaaaatttccgggtctacaaaagagtcctctttaaaggttttagagacaataattcgtgcttgaataccatcttcaaaataaatagtacctttatgtgtgccttcaagaatttgatatgctttcatataaacctcaattagaaaataaatttatccaagattgttctttaattaaaaatggctcagaatcatatgccattaaactttgggtgattagtcctttaaaaggtccatcaataaattccatggtaaaatatggaattttattcattagccgtgcattaggagcagtgcacaaaactctgcatcctttgaatacgcctttttgtaatttgtattgcttgggataaaattcgctcaaaatgttattatttgccaaaatttcaaaatgattcaccaatttatttttaatagtttttggcgaaaaataaagatattcgaaaagctgtgtgtctgtcatcattgcattccaatcacaaaaaattgaggacgaactgtttcacctgtttcagcattatagcttcgacaacagtgttgtaccgttttaatatggatattgtaaatcttatccatatcaggagctttaataggttcgtcaattatgtacaagatacgagaaagcgataacccacggaatttatgaccttcattaccgataaaactacggacagaatcagtaaataaacgaaaacgtatatcatcattagaataacgcgaaaattcctttttaatgttatttgcagaaattttagcgtaagctgaagtattagaaagaacaataactgttccgccatcatacagccaattagcagcaaagttagtcacagcaattgatttaccggattgacgtccaccatctatacgaagtgtgcagtactgtttgagcacatcttccattggtggaagataatcattcttacaaatttcttctactctagcatcagaatggtgtgtaaaagcattcatcagggatagataaggaccagttaaaaatgttctcattttgttctctctaggtttgggccattccatggcgcatgaattgtccatttctgtatttacccattaccgcgcttgggctcgaccttattacaggttggcgggaatccctcaaagaatcatgaggtccagcttgttcccatatttcttatttgcttatttgaacgatttaacgtactgaatagaacccttactattcacaaaggcaattttaccatttttattatacattgtagcagtacgctgataaccataggtttgtttaccagattgataaccaactaatgcaaaattatcttcacccattttattctgtttagcgcgaatgcgttcatgaccatgtgccataagaaccttagcatcaccagttgcaatggatcgacgagttttttcatcttcaactgtattaacaaagtcgtcaaatgaatcaaatttagcgtgagatttattatacagttttccatctactgcataattgtatccttgtacatccatctcaacttctgtaccatcatctaatacagcagtaattttttgaccttttttaaatttcaaaagatcagtaaaagattcagcaataatttgagaattaatagctgcttcagtgataaattcttgatatgttttcatgggtttcctttaaatgtaaatatttttaccgtaatacttataccattgtggtttcattaaaattttttcatcaagtcgttgttgactcaatttaatagctgatttgcatggattataatcatttttccattctactggaatatcgctaatgtcagaaacttcagtatcttttatactgaatccgcgttttaagcattccgttataatgtctgattgacgctttcgcaaaaattctaacttatcgtaaaagaaagtaacatgaccagaacctaaaataaatttagaagatattttaaaatctttaacgcgcttaccgtttgccacatgcttacgaactataccaaaaacacgtggcaattcacgatattctgcaattaaatgctgatcagtaagttcagatactaaagtcaaattaatacgagtcattttatccctccaagtagatgtgaatatactatcacaattctaggagaaagtaaacaactttatagatttttatacgcgtcccaagtgccagttctaaacgttgcaatgactcgttttgcgcgattaggtgtttgattataccatctacttttagctaagttaactgctgcttcatcccagcgtttttgttgaagcatacgtaaagaattagtaaatcctgccacaccggtttctcccatttggaaaaccatattaatcaatgcacagcgacgaacagcatcaagagaatcataaactggttttaatttagcatttctcaaaattccacgaacagcagcatcaacatcctgattaaagagtttttcagcctcatcttttgtaattacaccattgcaattacgcccaatagctttatctaattcagatttagcaacattaagtgatggactttttgtaagcaaatgaccgatgccaatagtgtaatagccttctgtgtctttatagattttaagtctaagaccttcatctatacgtaacatttcaaatatattcataatacctcctaagtatttatagaaggtatttataaaattaaaagaggttgttcattattcggtaaagtgaaggacccatcacatattgccactgagtgcgaggaataagagcaaaagcatccatctctggaatcataacgccatctttattttcaaaataagactcacaatggcaatttctaaacatctcatgctctactggaatcgtataataaaataactgtaggtctttattactagaatatttaaatacacctaggtcttctagaaggtctggattataattgctaaagccagtctcttctaaacattctcttcgtgctgcatctagcgcgcttaaatcagaattttctacacggccctttggaatatcccagcgatgggccatcattccaggcttacgagaaccggtaacccgacccataaataaatctttatcttctgtcatgaagataataccagctgataatgttttcattttaatttcctgcaatcactcacaaactctttcattgattcattttcaatataagacatgtagctattatattcttttaattgtattttgtaatccttttttctttgccaatttattttaaaattatcataatgaaaatataacatggtaccaaagaatgaaaataatgaaataattttagtatagtgaagttcactccaaacttctgttatatttactgtgccgtcgatgtttaaaataagacagtcaattaacaatccaaaaagactacccgcaagagctgcagccaacgccacagcaaaaattaaaaatgactcaggaagcgaatatttgactttatttagttttggcttttgcatcgtgattccttaacaaatttcataatttcatcaaattcatgcgcagcaagtttaagctggtgttcctttttaatctttttgcactgtgctttccaatcacgtacgcgtttacgataatgtcttccttgataccagtatcctacccaatttacaggtactaataaaaatggaactatcattggaagaattaatgttgacgcaaatattatattagattcaatatcagtcataacatctataactattccaacccccagtagaattacaaatgatacagctattacaggacctattaatacatcggtagaaattatctggcgctttaattcatactttaagggtttacttggaagatgcattgatggctttgacatattctctacattccttaacaaatttttctaataataaatcgctttcaaaattgggattttctacgaatttatcaaaaagatcatcaacaatagttaagatattctttttactaagaatacgtttattttcatgcttcgtttcagaatcaactataagagtaaagaaatatttcttgccctgaaattttacagtagtatcaatatagaataaatttgacttttgtaaattacgtttaaaccatgcgtcacttaaactataaacgccgagataatcataatcgtcgtttaaataacagaccgtccattcaggagaaacaaaatcagtaaattcagcatcaaaatcgcatgttaataaatgaattgattcaatactgttaataagtattccaggacgtattaaagactttttacctctagaaaatcttccagaaagactttcatcagtttcatatgaagaaccccaataataattacgtccttctgccatacgtttaagagcattcaataattggtctggaacatcaacttgtctttggaactcttcaaacattgaattgaaatcactttgcattttcattcctatttactccaagtaataggggccgaagccccttatcattatttcagagaattaatatattcctgaacatcggcagaggtagtttcaaccccagaaatattgccattaaaggtttcaactcgagcaagagtatcttcaatatcaaccttagtcagcgctgcaatttcaactacatcatcagcagtactaattccaagggcatttgctgcacgagtttcacggatatattccaatttaaccgcaagttcttgacgagcatcatctaactcaactactttcttagcgatttcaattcgcatttcagcataaccatcagctttagtagtcaactgctcagctgttcgacgatatagtaaaccaagtttagcatgcattgttacatcttgaccttcggaaagaagcttgcgaatttcacgctcttttgattcggcttgtcgattcttttcaataacaagttcacgaatacgtttttcttcattaatagatttaacagaagcagtttttaggtctttaattttatcaagtaattttgctgctgcagcagtatactgttcttcaacagatagatttttagccatagcagaaccaagtttagtgcgaataaactcaacaattttcttcagtgtgttcatagtatttcctttagttaattaagtgttttataatccgtgggagtattatactctactcccaagagtttgtaaacttattcttcgtccaattcatcaataaatttatcgatactactattaatagactcatcgatgattaacaaagcatcatcatccataatattaatattttctaaagcatcaatataagcttgattgactatagaccatgccctttgaaaatatggggcttcatcatcaggactgaaccaacgtacaccttcaaagatacgtttggcgtaatctaacacccattgtacaggcatgttttgagaacgttcgttaaactctttaaaatccttagattcaaaaagctcttcaggataattatttctattacaaaaagctttgctaaagttgcgtttcataatgttctcctcaaagttataggctcataatatctcaatcatgagcctgtgtaaacttatttcatattattgaaatattcttctgcgatttcgtcgttatcatggtaaactttagaagacagtttaacataaccttctgccgtgaacatattaatcacaacctttacagtataccactgaccgtcttcattacccattactgcataggtttcaaacatcggatgatcaggaccgataactttaatatcattcactgtacgaccgaaatcttctgaaacacatttcataaaaaagttgaacagttcgccgtaattatccatttcgttctccaagttgttttctgtatcagtagttgatattgatatagtaccacggaagaacagggatgtaaacagttttgtgaaaaaatttttaaaaagttttggggaattctagggcagggagaggaaattaaaaggtaggataatatattataaagggtagaaactaaatgatgtctagagaggcctggaaaggcctagataccaaaaagccccaacctttcggctagggctaagaatgttatttgatttgtttagcagaccaaatgcggtctttaataattttttggatgtcttcaacatactcaagagagtgaacatgcgggttatctttgaaactataagcacgagctagcttttggccttcagttttgattactaaaagctctttaaggatagcttcatatttggagataattcctttaacaatatttttctcttgtgcgactttaggatctgctttaggagcaggtttacctgaagcctttgcaaaagcagctccagtagcaactaaacttttccaagccatactaactgcattccctgtaaatccttcggctttcatatcacgagcaaattggaatcgtgattcatcggaagcatctttataggaatatttacccgcggcaatggcagcttttgcaacagcttgaatttcggtgctagatgcttcatttaacaccgcttcatttaaaaattgagcatatgatttcatcttatttcctgttttaattcgtggttttaatatacttatttatactaaaaagccccaacctttcggtcggggctaagccttgcggcaaccttgtcggggttccacctgctaaggcaagtgtttgtacgaaacgccgggattcgaacccggttattaagcagttgacgctactcaatatttttaaaaggccatatctcgaccatatccgaacgttccgtcaaaaacgctactcggcttacggcaaagatatttcctcgaatcgataattctgtgcgccgtttctgctgtgatgtaaggggatattaacgaatcataaagatttattaagaccagtccttactcagggaacatcagtccgacgacttgccggtagcgacccggcttcttgtctggtcgaggcagtagggatcgaacctacgacccaggacttagaaggtccttgctcttccttctgagctatgcctcggatttggcggacgtgataggattcgaacctataaccaatcgcttaacaggcgatcgctctgccattgagctacacatccaaattggtggggagtgatggagtcgaaccacccgagtcgcaatgacaatggatttacagtccacaccgctacctctacgggataactcccctaattaatttggtggccctgggtggaattgaaccaccatctggcgattatgagtcgcttgcttgaaccttccagctacagggccttggtgctgattgacggaatcgaaccgccgaccttctcattacaagtgagttgctctacctactgagctaaatcagcaaaactggcggaggcgataggatttgaacctatgagtcgccggagcgactgccggttttcaagaccggtgcattcaaccactctgccacgcctccagtctccatacaaggatttgaaccttggacctcctgatcccaaatcaggcgctctaccaaactgagctacacggagtaaattaaattggagcggataatgagaatcgaactcacatcatcagattggaagtctgaggtaatgccattatacgatatccgcaaatttggtgcgagaagtgggactcgaacccacaaggaaatcattccgcagcattttaagtgctgtgcctttaccaatttgaccattctcgcgctgggaataaaggactcgaacctttgcatcctggaatcaaaatccagtgccttaccaacttggctaattcccaattattaacaaaggctctcaaacaagaacccttgatgatagagggtattaatcagttcggtatgagttaataataacaaatatttcttaaagcaaatcaatcattttaacagttggcaaaacgatttcttcttcaatataagcgaattcaacacgttcaactacacgcaagaaatagtaatcatagtattcagaagcataaccaagaatattaatgagaccttctgataccaaatatccattctcatggaacaagtcgaatacgcgggcttcgtcttcttcagatttatcaccaaggtcaacttcaatatcaaagacctttttaatgaattccggggtgagctgatcagagaacagtccttcaaccaagtattcatagataatagatgagcaatcgctgaatagtgtattaccacaataatgttcagctttggtactagaatgacgactcttaaacttctttaagagatatttaaactgttggagctcatgctcttctacgccaaacagtgttttggttttatagttatcaccatcattttcccaggtagtgacatcaattacgtaacccttaggaattgtgctacctaaacgaatatacatttgctcaccatattaatgtaagtatatttaatacattcaagacccaaaggattcttgaaaatatcatattcaagaggacctttttccgtttcaataaagaaatcaaagttaactgtgttaaatttacggtcttccttcactaatttaacttgagaagatgaacggtcaatgtaaaccttttcaacttcaaaacatgttaaaatgccataatcatcgatcaaggctttagctgcttcttgatcatatttatatccattttcaatggacgatactttcgcataaagaatcattatcagccttcatcaacaatagtatgagtatgggcatttacaatttgccaccaatcaaagcgattgaaaccatacatcggtttgttttcattttctttgataatatcacgaagttcatcttcagtagcggctttcgcgattaaatcagcatatccaccacgaggataataattatcacctgcaaaaagtaaaaagtttggtttaatgttattgaactcttcaagagtaataactgttcctgatggtagttgaacaatctctacatatttatatcctaatttttgagcagcatctactgcttcaagcaaagtatcatgagcccatccaatttgacaatttggctttttagatggattagcctgataatccgcatacactttatacattctattcacctttagaaattttatccataacgatagcaattaaaccaattaaaaatgctactacaagtgaaaacacattttctgctgtagtcaataatccgcatataaatccaacaaacattgaaaaactaaaagcggaagcagaaattgcaatagcaacatttcgaattaattcacaacgtttcattttattctcctcagtagttgatagggtaatagtatcactaccccatctaaaagtaaacggttttataaactattttattccgcgtgatgcaattgtgttctgccgtttaacaccagtttgtttaaagtcatgattgtcgatttgatcggtacgagcaactccgaatgatgatttgattttagctttagatcctttagttatagaaataaacatctcggaagcccctttcttaaagtccgaggcgattacttcaacgccgttcttagcaagtgacttcagaattgcctctgcatactcatcgtcaagactcgtctgagtattaataacgaatgtctttggcgcagccgcttcattgataaattctttaaatgttttcattttattttcctaattaattttgataggataatagtatcactactaaaaccccatgtaaacaactttgtgaaattattttaaatcttctaatcgtttcttcatcttagaaccgttcttagcgatttcgcctgcatcagagcataatgctaaaagcgctttaactttagtttggtctcctttaaaagatgaaggatcgactgcagcagcaagttctttaatacgggagaaaagacgctcagcttcagctaaagccattccaagctttacttccataccatgagaagattcagtaatagtagtttttgtagcaaactctttgaaagttttcattttattttcctaattaattttgatgaggtaatagtatcactacctcatcagtatgtaaacaactttatgaaattattttaaatcatctgcccaatcgagtttaagaggctctttgtattcacggtcaagtacaaccggaatttgtacatcaccgctaaatgataagggcccaacattataagacaatgttatatgcggtgtgtaatcatcaaaatcatgtgtagcacctagtgcccgcgcatacatgtgtcgacagcgcagatattcagaatctaacacaagtacaagagtcgatccatcttgtgttttccatacttctaaatgtccagaagaagctacttcaaaacttccactcgatggaacatatggaacatttactctcgaataacatatagtcgaatgaattttttctctaggaactggattaggaacacgtaaagagcgctggagttcttccagcgcgtcaagtgttaattctgaaaacttagctgctacataaagacccgttgaaaagtctttaaattccatcattcttcatcttttgcttcatctgcagattcagcagtaagattcttaacagcttcaacgatttcttcaactttaatggtatcgccagtgatacctactgcacgagcaatttcagccaaagttccttgcagaaatttggattcttccatcagacgagccgcttggtcctgcgtatcaagaatgcgagatttcagagttacgatttcagcagacagtttttgttcaatagtttgttcagacattatagtacctttagtgtatttttaattttagaaaaaagttcttcaagagaaccatcgtttgtaattactaaatcgccaccacgaattggcaatccagcttctgtaatgtgtgtatcattggatttttgaccaggacgaactacatgaattactgtagcacccatcgccctagccgcatccatttcatgatcttgacgagtatcaggaacgatataataatcataacccgagttaaatttatcaagataatctaaagcaaataattttacccagtacatgcggtcgaagttattaacaatcaaatccgtacctagggcttgcatcagacgacggactgaccattgatcttcaatattatttataacgtcagtaattttgttaaatgctacgaaattaactgattcttttccttcgtcatcaaaaacaaacacacctttaattgggcttttaccattaagatagcaaaatgcttgttccataatcgcgattacttctgatttagtcagatttaaattagtctcacgatcatagtcaattccttcaaactctttacgagttaagcaaggatagtcagtgtttgctgcaaatactccccatgcataagccaatgcatccttaataggaccagcaagttggtatttaactgcagaataattgctcatgataaaatcagcagtagtatcttttccactacgctttacaccgcttaaaaagattagtttcatgtgtttctcctcaaatttaattaagattataacacacaaaactgaagcattaaacttctgctataatttttccatctttttctacttgaaaataggtgtaaggaatcgttgcagtacatactaaagccgggtctgaatcttccgtatagctaaattctacttcagacaggtcagaaacccaaggcttataaaaatttattgacatcacgatttcagttttgctattatctaagatgtaaagcgtaatgtactcaggacctgttttttgggcagtattttcacctgtaagatagttgctagttcctagcatccattcatacattcctatccacgacttaagttcttcatcaactataaatctcacaatgagtgggtcatactcgaatgtaacacctggacgttgtgctcggcccagtccaaacggcccagtcacggtatcagtaacaggtattctaattcctggaataggaactgactgagcatttaaagtaaaagcagatgtagtattactatgcggtattgatactacaaagttagttgtatttgcttggttaaaaatttgttgcagagcttgcgacatatattcctcataatgctttataactgttggtggtataatgggtctaagtcccttccattcaattccatttagaacaaacaacagaaaagaatggaagataatagaattagatatttgaccagactttgtttgcagagaaacgttttccttttgaaacgaactgctgaagtggcatcaacacaacgttcgcccagtctttcggggcgatttcaacaaggctacccataatattaccaggtatatacgccttaatcatttggtctgcacccctaaatcctttcacttgactccaatcaatttttaatttcgttttattagtaatagtaggtgtatttgcatattgctttaaaagctcttctagaaattgctgacgagctttaggtggaatatagtgcaagtttaatccgtacattaaattatgcttacctaaaccaagataaattatcaaaggaaatttatcccagtaaggaagagtttccttgtgtttagcatcgtaagcaaaagcatatattcgtcccggctgtgggcgaacaactttatgtccttttacttgcttaatagtttcagcaaaccactttctggttttattattaattgctgcaccttcattacgaattttatcgcgtaatgtttgtctgaatgaatttatcataagcagttgtctttcttgcttattgagtttattcattggttttgattcaagcttttgaatcttttcagccgttttaattcctgaagcatattttgacattgctgaagtaaacgtagagtatttgattcctctttcttcagcaaattgctttcctgtcattccttttgctttggcctttttatattcaagacctatctgaatccatttcttttcgtttaatgattgcttaacctttggaacttggggagtgctttcattaattatttgaaaaatagccattatgcccccttaaagccaagagctcgtaatccatcttctgttagaattctaaattttattccacgcttttcagctaaagattgtgctgctttccatttgtcagtattaacagaatatgtataaatttcattcataaatcttttcttcgctgcggttgttagatgtgctggtttaactggtggttgtgtttcttttttaggttttatttcaataaaaaattcttgtccagaagaatctttcatccaaatatccatgaagtatctacgttttttcccttctgcattacaaaaataaggaattactgctgtttcactaccccatgcaataatttctggatttttatctaaccattcaaaaaagaatttttcccaatttgatctatacgtaatttttttagggtcacctctatattttgatatatttttaggaacccattttccagaatatgccattggattctccttataaatagataatatatttataaacaggagggcccatgctctttacattttttgatccgattgaatatgcggccaaaacggtgaataaaaacgcgccgactattcctatgacagatatttttagaaactataaagactattttaaacgcgctcttgcgggataccgcttacgtacttattatatcaaaggttcaccacgcccggaagaattagcaaatactatatatggaaatccacagttgtattgggttttattgatgtgtaatgataattatgatccgtattatggatggattacttcgcaagaagctgcttatcaagcatctatacaaaaatataaaaatgtaggtggagaccaaatagtatatcacgtgaatgagaatggtgaaaaattttataatttagtatcatacgatgataatccatatgtttggtatgacaaaggcgataaagctagaaaatatcctcaatatgaaggagcacttgctgctgttaatacgtatgaagatgctgttcttgaaaatgaaaaacttcgtcaaataaaaataatagcaaaatcggacatcaattcatttatgaacgaccttatacgtataatggagaaatcttatggaaatgataagtaataaccttaattggtttgtcggtgttgttgaagatagaatggacccattaaaattaggtcgtgttcgtgttcgtgtggttggtctgcatccaccacaaagagcacaaggtgatgtaatgggtattccaactgaaaaattaccatggatgtcagttattcaacctataacttctgcagctatgtctggaattggaggttctgttactggaccggtagaaggaactagagtttatggtcattttttagacaaatggaaaactaacggaattgtccttggcacgtatggtggaatagttcgcgaaaaaccgaatagacttgaaggattttctgacccaactgggcagtatcctagacgtttaggaaatgatactaacgtattaaaccaaggcggagaagtaggatatgattcctcttctaatattatccaagatagcaatctagacaccgcaataaatcctgatgatagaccactatcagagattccaaccgatgataatccaaatatgtcaatggctgaaatgcttcgccgtgatgaaggattaagactaaaagtttattgggataccgaaggatatccgacaattggtattggtcatcttatcatgaagcagccagttcgtgatatggctcaaattaataaagttttatcgaaacaagttggtcgtgaaattactggaaaccccggttctattacaatggaagaagcggtaactttatttgaacgtgatttagctgatatgcaacgtgacattaaatcacattctaaagttggcccagtttggaaagcagttaatcgttctcgtcaaatggcgttagaaaatatggcatttcagatgggtgttggtggtgtagctaaatttaacacaatgttaactgctatgttagcaggagattgggaaaaagcatataaagccggtcgtgattcattgtggtatcaacaaacaaaaggccgtgcatcccgtgttaccatgattattcttacgggaaatttggaatcatacggtgttgaagtgaaaaccccagctaggtctctatcagcaatggctgctactgtagctaaatcttctgaccctgctgaccctcctattccaaatgactcgagaattttattcaaagaaccagtttcttcatataaaggcgaatatccttatgtgcatacaatggaaactgaaagtggacatattcaggaatttgatgatacccctgggcaagaacgatacagattagttcatccaactggaacttatgaagaagtatcaccgtcaggaagaagaacaagaaaaactgttgataatttgtatgatataaccaacgctgatggtaattttttggtagccggtgataaaaagactaacgtcggtggatcagaaatttattacaacatggataatcgtcttcaccaaatagatggaagcaatacaatatttgttcgaggcgatgaaactaagacggttgaaggtaatggaactatcctagttaaaggtaatgttactattgtagttgaaggtaatgctgacattacagttaaaggagatgctaccactttagttgaaggtaatcaaactaatacagtaaatggaaatctttcttggaaagttgctggaacagttgattgggacgttggtggtgattggacagaaaaaatggcatctatgagttctatttcatctggtcaatacacaattgatggatcgaggattgacattggctaatatacttccaatgagcgctgatttaggggaatccatggaaggttcttctatcgacgtcacctttaccgctcaattagaaacaggtgaaacgttagtatctataaatataactagttacgaagaaactcctggggttttagtagaagaaaatcgcttatatggaacatatgaatctgtatttggtttcggaaatgacgcgttgaaatatcgtttagatgatgaatttaaaactgctgcttcatgggaagaccttccaactgattctgacactcagttgtatttgtggaaagctcctcagaatctccagaagacattcacttacgaagtaacattaatatatgactaccaagaacaaagtgaatctgggggttctggcagtaattctaggtcatcttctgatactactgaaccaacgaatcctccagctccagtaagaaaaactttagttaaaaattatactaaaactatagttggaaattggagtcgttgggctaataaattgagaagctatgtgtatgagaggtcatagatgtcaggattaagttatgataagtgtgttactgctggccatgaagcgtggcctccaacagttgtgaatgctacacaaagtaaagtattcactggaggaattgctgttctcgtagcaggtgatccaattacagaacatacagaaattaaaaagccatatgaaacacatggcggagtgacacaacctagaacttctaaggtatatgtcacgggaaagaaagctgttcaaatggctgatccaatatcatgcggtgatactgtggctcaggcatcatctaaagtattcattaaataggatttaaaatggcaaatacccctgtaaattatcaattaacaagaacagcaaatgctattcccgagatattcgtcgggggtacatttgctgaaataaaacaaaacctcattgaatggcttaatggccaaaatgaatttttggattatgattttgaaggctcaagattaaacgttctgtgtgaccttttggcttataatacattgtacattcagcagtttggtaatgctgctgtgtatgaaagctttatgcgtactgctaacttacgaagttcagttgttcaagctgcacaagacaacggatatttacctacttcaaaatccgctgcgcagaccgaaattatgttaacatgcaccgacgcattgaataggaattacattactattcctcgcggaactcgctttttagcatatgcaaaagatacttctgttaatccatataacttcgtttctaccgaagacgttattgctattcgtgataaaaataaccaatattttccacgtttaaaacttgctcaaggacgtatagtaagaactgaaatcatttatgataaattaacacctattatcatttatgataaaaatattgatagaaaccaagttaaattatatgttgatggagctgaatggattaactggacgagaaaatcgatggttcatgctggttctacatcaacaatttactacatgcgcgaaacgattgatggaaatactgaattttattttggtgaaggtgagatttccgttaatgcggcagaaggagctctaactgctaactatattggaggtcttaagcctactcagaactcaactatcgttattgaatatatcagtactaatggcgcagatgcgaacggagcagtcggattttcatacgcagatacattaacaaatataactgtcatcaatattaatgaaaatccaaacgatgacccagattttgttggggcagatggcggcggcgatccagaagatattgaacgtattcgcgaattgggtactattaaacgcgaaacccagcaacgctgcgtaactgcgactgactatgatacattcgtttcagagagatttggttctattattcaagccgttcagactttcactgattctactaaacctgggtatgcatttattgctgctaaacctaaatcaggattgtatttaactactgtgcagcgtgaagatattaaaaattatctcaaagactataatttagctcctattacgccatcaattatttctcctaattatctttttattaagactaatttaaaagtcacatatgctttaaataagctgcaagaatctgaacagtggcttgaaggtcaaataattgataaaattgaccgctattatactgaagatgtagaaatttttaactcgtcttttgccaagtctaagatgttaacttatgtagatgatgcagatcattctatcattggttcatcagcgactattcaaatggttcgtgaagtacaaaatttctataaaactcctgaagcgggtattaaatacaataatcaaataaaagaccgttctatggaatctaatacgttttcatttaattctggacgaaaagttgtaaatcctgatactggtttagaagaagatgtattatatgacgttcgcatagtatcaacagaccgagattctaaaggaattggtaaagttattattggtccatttgcttctggcgatgttacagaaaatgaaaacattcagccatatacaggcaatgattttaataaattagcaaattctgatggacgcgacaaatactatgttatcggtgaaataaattatccagctgatgtgatttattggaatatcgctaaaattaatttaacatctgaaaaatttgaagttcagactattgaattatattctgacccaaccgatgatgttatctttactcgcgatggttcactgattgtatttgaaaatgacttacgtccacaatacttaactatcgatttggagcctatatcacaatgacagtaaaagcaccttcagtcactagtctcagaatttccaagttatccgcaaatcaggtgcaagtacgctgggatgacgttggtgctaatttctactattttgtagaaatcgctgagacaaaaacagactcgggggaaaaactcccgagtaatcaatatcgttggattaatttaggatatacagcaaataatagtttcttttttgatgatgctgatccattgacatcgtacattattagagtagctacagctgcgcaggattttgagcagtctgattggatttataccgaagagtttgaaacttttgctacgaatgcttacacatttcaaaacatgattgaaatgcaattagctaataaattcattcaggaaaagttcactcttaataattctgattatgttaattttaataatgacaccataatggctgcattgatgaatgaatcgtttcaattcagcccatcatatgttgatgtttcatcaatcagtaattttattattggtgaaaatgagtatcatgaaatacaaggttccattcagcaagtatgtaaggatattaaccgagtttatttgatggaatcagaagggattctatatctttttgagcgctatcaacccgtagttaaagtatctaatgataaaggacaaacctggaaagctgtaaagctcttcaatgaccgtgtaggatatcctttatctaagacagtatattaccaatctgcgaacactacatacgttctaggatacgacaagattttctacggccgtaaatctactgatgttagatggtcagctgatgatgtcagatttagttcacaggatataacatttgctaaacttggtgaccaattgcatctaggatttgatgtagaaatttttgccacttacgcgactttacctgcgaatgtatatcgtatagctgaggctattacttgcacggatgattatatctatgttgttgccagagataaagttagatacataaaaacgagtaatgcacccatagattctgatccattatccccaacatattcggaaagactttttgaacccgatacaatgactataaccggaaatcctaaagcagtatgctataaaatggattctattggtgataaagtttttgctcttattattggtgaagttgaaacattaaatgccaatccgagaacttcaaaaataattgattctactgataaaggaatatatgttttaaatcatgacacgaaaacatggaaaagagtttttggtaataccgaagaagaaagaagacgtattcaacctggatatgcgaatatgtcaactgacggtaaattagtttctctatcttcgagtaattttaaatttttaagtgataacattgttaatgaccctgaaactgtggtgaaatatcagttaatcggtgctgttaaatatgaatttcctcgtgaatggttagctgataagcattatcatatgatggcatttatagcggatgaaaaatctgattgggaaacttttacgcctcagccgatgaaatactatgcagaaccattctttaactggtctaaaaaatctaacacgcgctgttggataaacaactctgatagagctgtagtagtttatgctgatttaaaatacaccaaagttatagaaaatattccggaaacatcaccagatagattagttcatgaatactgggatgatggtgattgcactatagtaatgccaaatgttaaattcactggatttaaaaaatacgcatcaggaatgcttttctacaaagcctccggtgaaataatttcttactatgattttaattatcgtgtgagagatacagtcgaaattatttggaaacctactgaagtatttttaaaagcatttttacaaaaccaagagcatgaaactccttggtcgcctgaagaagagcgtggattagctgaccccgatttaacaccattaattggcacaatgatgcctgattcttatttgttacaggattcgaattttgaggcattttgcgaagcatatattcaatacctttctgatggatatggaactcagtataacaatttacgaaatttaattcgtaacaaatatccacgagaagagcatgcatgggaatatttgtggtcagagatatataaaagaaacatttatttaaatgctgacaaacgtgatgctgttgcaagatttttcgaatcacgtagctatgatttttattctactaaaggaattgaagcatcatacaaatttctttttaaagttctttataatgaagaagttgaaattgaaattgaatctggggctggtactgaatatgatataatcgttcaatctgattctttgactgaagacttagtaggacaaacgatttatacggcaacaggaagatgtaatgttacttatatagaaagaagctattctaatggtaaattgcaatggaccgtaactattcataatcttttaggaagattaattgctggtcaagaagttaaagcagaaagactccctagttttgaaggcgaaattattcgtggggttaaaggaaaggatttgcttcaaaataatatagactatattaatagaagtcgatcatattatgtaatgaaaattaaatccaatttaccttcttctcgttggaaatctgacgttattcgttttgttcatccagtaggatttggatttatagcaattacccttttaacaatgtttattaatgttggtttaactcttaaacatacagagactataattaataaatacaaaaactataaatgggattctggattgcctactgaatatgctgatagagtagctaaattgactccaaccggtgaaattgaacatgatccagtaacaggcgaagcaatttatgaacctggtccaaaggctggtgtaaaatatcctcttcctgatgactataatgctgaaaataataattcaatatttcaaggtcaattgccgtctgaacgacgtaaattaatgagtcctttatttgatgcatctggaacaacatttgcgcaatttagagatttagttaataaacgtctaaaagataatataggaaatccaagagaccctgaaaatccaacacaggttaaaatagatgaatgattcaagtgttatctatcgtgcgatagttacttcaaaatttagaacagaaaaaatgttgaatttttataattcaattggaagtggtccggataaaaacactatctttatcacatttggaagatcagaaccatggtcatcaaatgaaaatgaggcgggctttgccccgccttatccaaccgattctgtattaggtgtaactgacatgtggactcatatgatgggaacagtaaaagttcttccatcaatgcttgatgctgttattcctcgcagagattggggagatactagatatccggatccatacacatttagaattaacgatattgtagtgtgtaactcagctccttacaatgctactgaatcaggcgcaggctggctagtatatcgttgtttagatgttcctgatactggaatgtgttcaataacatctttaactgataaggatgaatgcctcaaattaggtggaaaatggactccttctgctaggtcaatgactcctcctgaaggtcgaggagatgctgaaggaacaattgaacctggggacggatatgtttgggaatatctatttgagattccacctgatgtatctataaatagatgcacaaatgaatatatcgtggttccttggcctgaggaattaaaagaagacccgactagatggggatatgaagataatctcacttggcaacaagatgattttggattaatttaccgtgttaaggcaaatactatccgttttaaagcatatttagattcagtttattttcctgaagctgcattgccgggaaataaaggatttagacaaatatcgataatcacgaatcctcttgaagctaaagttcatccaaatgacccaaacgttaaagctgaaaaggattactatgatccggaagatttaatgaggcattcgggcgaaatgatttatatggaaaataggccacctattattatggcaatggatcaaacagaagaaatcaatattctgtttacattttaaattaagggagcccatgggctccctttttctttataaatactataaactcataaggaaaccgctatgttcattcaagaaccaaagaaattgattgataccggcgaaattggtaacgcttctactggtgatatcttattcgacggtggtaataaaattaatagtgattttaatgcaatttataacgcgtttggcgatcagcgtaaaatggcagtagcaaatggtactggcgctgacggccaaattatccatgctactggatattatcaaaagcattctatcacagagtacgcaactccggtgaaagttggtactaggcatgatattgatacctctactgttggtgttaaagttatcattgaaagaggagaactcggtgactgtgttgaattcattaattctaacggatcgatatcagttactaatcctttaacaattcaagccattgattcaattaaaggtgtttcgggtaatttggtagtaactagcccatatagtaaagtaactttgcgctgtatttcatctgataattctacgtcagtttggaattattctattgaaagtatgtttggccaaaaggaatcaccggccgaaggtacatggaatatttctacatctggatcagttgacattccattatttcatcgtactgaatacaatatggctaaattgctagttacttgtcaatcggtagatggaagaaaaattaaaacggcagaaataaatattcttgtagatactgttaattcaacggtcatttcttctgaatatgctgtcatgcgggttgggaatgaaactgaagaagacgaaatcgctaatattgcatttagtattaaagaaaattatgtaacggcgactataagttcttcaactgtcggtatgagagcagcagttaaagttatcgctacgcagaaaatcggggtggctcaataatgaaacaaaatattaatatcggtaatgttgttgatgatggtaccggtgactacctgcgtaaaggtggtataaaaataaatgaaaactttgatgaactttattatgaacttggtgatggagatgttccatattcagccggtgcctggaaaacttatgatgcttcatctggacaaacactaacggcagaatggggaaaatcatacgctattaatacctcttctggaagagtaactctacaacttcctaaaggaactgttaatgattacaacaaggtaattagagctagagacgtattcgctacatggaacatcaatccagttactttagtagctgcttccggagatacaattaaagggtcgtcatcgtcagttgaaattaatattcaatttagtgatttagaactcgtttattgcgctccaggacgctgggagtatgtcaaaaataagcaaattgataaaattatcagttcagacattagtaatgtagctcgtaaagaatttttagtcgaagttcaagggcaaacagactttttagatgtttttaatggaactagttataatgtcaataacatcagagtaaaacatcgtggtaacgaattgtattacggcgatgtatttagcgaaaacagtgactttggctctcctggagaaaatgaaggcgaattagttcctcttgatggatttaacattcgattaagacagccttgtaatattggtgacactgttcaaattgaaacatttatggatggtgtatcacaatggagaagttcatatacaagacgccaaataaaagtactggattcaaaactaacatcaaagacttctttagaaggaagcatttatgttactgatttatcagcgatgaaatcaattccattttctgcatttggattaattcctggtgaacccattaatcctaactctcttgaggttcgttttaatggaattttacagcagcaggctggaacagctggatatcctctgtttttgtgtgaaggtgctaattcagatacgcaagaaggatgtatatctcttggtggcgaatggaaagaatcaaacaccgattattctatagaatatgaagacggaaaacctatcagtcttttatttgatagaaaatttgaatccggtgacattatcgttataacatggttcaataatgatttaggaactcttttagaaaaagatgacatcattgaattgactgatgaccgttatgttagtaaaggatcatctactgaagttactggtgatgtggccttaacagattttgataaaatcggttggccaaatgttgaaaaagttgattcttatactagaacgtataattcaatatcatctattttcgacagcatttatcctgttggttcaatttatgaaaatgctataaacccaaataatccggtgacttatatgggatttggttcatggaaattatttggtaaaggacaagttttagtaggatggaatgatgatgttacggatccaaactttgctttaaacaataatgatttagattctagcggaaatccttcacatactgcaggtggaacagttggaacaacatcagtaacgcttgaaaacgcaaatcttcctgcaactaaaaccgacgaaagagttttaattgaagacgaaaatggatcggttattattggaggttgccaatatgacccagatgaaactggtcctatatatacaaaatatcgtgaagactacgcaacaacaaactcttcacatactcctcctgctaatattagtaatattcaaccgtctattactgtataccgttggataaggattgcataatgagtttacttaataataaagcgggagttatttcccgcttagcagattttcttggttttagaactaagaaaaatgatatttcggttatgaataatcagccagtaggtgctgtaacaatttcacaaatagcaaaaggtttttatgacccaaatgtagaatctgctatcaatgatgttagaaatatggcagagcaacaggttggagctgtattagttaatataagtggcgtatctcctactggcgtgcagcaaacagactattggtcatttgaaggaactgtcaatgatacttcagccaaaccaggtgacacagttattgttaacatgtttggtattccagttaaagctactaatggaatgacttcaatcgaatttaccagtgccgttagaacagctctacaggaaatggttgcaaaatttattgcaattgattcatttgaagaccatcctaccataggaaataaaatacaagttaagtatttagataaccaagaacatatcttagaacaatactctgataaaggaattactttcaaacaagaaataatttctccttctaaacccggatacggaacttggcaattattaggtgcgcaaactgttacgctagatagtcacacacaacctacggtattttattattttgagagaatagcatgagtaacaatacatatcagcacgtatcaaatgaatcaaaatatgttaaattcgatccagtaggatcgaattttcctgacactgtcacgacagtgcagtctgcattatcaaaaataagtaatatcggcgtaaatggtattcctgatgcaactatggaagttaaaggaatagcaatgattgcgtcagagcaagaggttttagatggaactaataattctaaaatcgttacaccagctacattagcaacaagattattgtatccaaatgctactgaaactaagtatggtttaacgcgctattcaacaaatgaagaaacattagaaggctcagataataattcatcaataacgccgcaaaaactgaaataccatactgacgatgtgttccaaaatagatattcgtctgagtcatcaaacggggttattaaaatatcatctacacctgcagctttagctggagttgatgatactacggcaatgactccactgaaaacacaaaaacttgcaataaaattaatttcacaaatagctccttccgaagatactgcatcagaatctgtgagaggtgtagttcaattatctactgttgcgcaaacacgtcaaggaactctccgcgaaggatatgcaatttctccgtatacatttatgaattctgttgcaacacaagaatataagggcgttatacgtttaggaacacaatcggaaattaacagtaatttaggagatgttgcagtaacaggtgaaacactaaatggtcgaggagctaccggttctatgcgtggggtagtaaaattaacgacgcaagctggtattgctcctgaaggtgatagctctggggcattagcatggaacgcagatgtaattaatactcgcggtggacaaactattaatggttctttaaatttagaccatcttacagcaaacggaatttggtcgcgcggcgggatgtggaaaaatggcgatcaacctgttgccactgaaagatatgcgtcagaaagggttccggttggaactattatgatgtttgctggagattcagctcctcctggttggattatgtgccatggcggaactgtgtcaggagatcaatatcctgattatagaaacacagttggaacgagatttggtggcgattggaataatcctggcattcctgatatgcgaggtcttttcgtcagaggagctggtactggtggtcatattttaaatcaacgagggcaagatggttacgggaaggatagacttggtgtaggatgtgacggaatgcatgttggcggtgttcaagcacaacagatgtcataccataaacatgctggcggttggggagaataccaaagacatgaagctccatttggcgcgtccgtttatcaaggatatcttggaactagaaaatatgccgactgggataatgcttcatacttcactaatgatggatttgaattaggtggaccgagagatgcccttggtacacttaatcgtgaaggattaattggttatgaaaccagaccatggaatatatcattaaactatattattaaaattcattactaaggattacaaatgattgaattaaaagatttaccttttgttgatagcgttcctggcgaaggtcaggaacgtatttcatggattaaaaatggtgaagaaatactaggagctagtactaagtatggaaacgatggatcaatgaatagaccaactgtttccgtgtttaaaaatgttgaggttcttgacgaaaatataggaattcttaaaacagcattagaaacatcccaggaagatattaaaaccattcagggtatcttagatgtatctggtgatatagaagctttatcgcaaataagtatcaataaaaaggatatcactgatcttaaaacgcttacgagtgaacataccgaaatattaaatggaactaataatactgtcgatagcattcttgctgacattggtccatttaattcgcaagcaaattcagtttatagaacgattagaaatgatttgttatggattaaaagggaattaggacaatatgctgggcaagacattaacggtcttcctgttgtaggaaatagcagcacgggtatgaagcaccgtatcattaataatacagatgctataacttcccaaggaatacgtctaagtgatttggaagaaaaatttattgaatctgatgtaggttcactgacaattgaagtcggaaatcttagacaagaacttggacaaagaccatcttcatttagtgaaagcatatattcacgtgtgcataatttagatcaatcacagattaatcttagttccgaaattaaatctatcaaaacttctattggatatccaggaaatacttcaataatcacagatgttaacactaatacacgagaaatttcagctttaaatgatgaactaaataaaagcggaggtattaaacaacgattgactgtcattgaaacatcaattggctcagatgatattccttctagtattaaaggtcaaattaaagataataccacatcaattgagtttttaaatggaattgttggtgaaaacacttcatctggactacgagcaaatgtttcatggctaaaccaaatcgttggaactgattctagtggaggtcagccttctcctcctgggtctcttttaaatagggtttcaactattgaaacctctgttaatagacttaacaatgatgttcaaaacctgcaagttgaaattggtaataacactactggaattaaaggacaggttgttgcactaaataaactagtaagcggcacaaatccaaatggttcaacggtagaagagcgtggattaactaattcaataaaagctaatgaaactaacatttcttctattaatcaagaaatgcgtagtattaaaagtaatgtatcttcattacagggggatgttcagactttacaggaagcaggttatatccctgaagctccaaaagatggccaagcttacgttcgtaaagacggcgaatgggtactactttctacctttttatcaccagcataacatggggccgcaaggccccaaaggattttaaatgtcaggatataattctcagaatccaaaagaactcaaagatgtcattctaagacgtttaggggctccaattatcaatgttgagttaacacccgatcaaatttatgattgcatccagcgtgccctagaattatacggtgaataccattttgatggacttaacaaaggttttcatgtattttatgtaggagatgacgaagaaaaatataaaaccggagtcttcgatttaagaggttcaaatgtattcgcagtaactcgcattctccgcacgaatgttggatcaataacgtcaatggacggaaatgctacatatccatggtttactgactttcttttgggaatggctggtattaatggtggcatggggacttcttgtaatagattttatggaccaaatgcctttggagctgatttaggatattttacccagcttaccagttacatgggaatgatgcaagatatgctttcgcctattccagatttttggtttaattcagcaaatgaacagctaaaagtcatgggaaacttccaaaaatatgatttaattatcgtagaaagctggactaaatcatatattgatactaataaaatggttggaaatacagtaggatatggaacagtcggtccacaagatagctggtcattatctgaacgatataataatccagaccataatttagtaggtcgtgttgtcggtcaagacccagatgttaagcaaggtgcttataataaccgttgggtgaaagactatgctacagctttagctaaagaactgaatggccaaattttagcacgtcaccaaggtatgatgcttcctggcggtgttacaattgatggacagcgcttaatagaagaagctcgattggaaaaagaagcactacgcgaagaattatacttgcttgaccctccgtttggaattttggtaggttaatatggctacttacgataaaaatctttttgctaaattagaaaaccgcacaggttattctcagactaatgaaactgaaatactaaatccttatgtaaatttcaatcattataaaaacagtcaaatattagctgatgtattagtagctgaaagcattcaaatgcgaggcgtagaatgctattacgttccaagagagtatgtatctcctgatttggtattcggtgaagacctaaaaaataaatttactaaagcttggaaatttgctgcatatttaaattcgtttgaaggatatgaaggagctaaatcgttctttagtaattttggtatgcaagtacaggatgaagtaactttgtccattaatccaaacctgtttaaacatcaagtaaatggaaaagaacccaaggaaggtgatttgatatattttcctatggataacagcttatttgaaattaactgggttgaaccatatgatccattttatcaattaggccaaaatgctattcgtaaaattacagcaggtaaattcatttactctggagaagaaattaatccagttctgcagaaaaatgaaggaattaacattccagaatttagtgaattagaattaaatcctgttcgcaatcttaacggtattcatgatattaatattgatcagtattctgaagtagatcaaattaattctgaagctaaagaatatgttgaaccttatgttgttgtcaataacagaggaaaatctttcgaatctagcccatttgataatgatttcatggattaataaatattataaactaattaaagcccagattaggagaaatcatgtttggttatttttataattcgtcttttagacgatatgctaccttgatgggcgatttgttttcaaatatccaaatcaaacgtcagttagaatctggtgataagtttatacgtgttcctattacgtatgcatcaaaggaacactttatgatgaaattaaataaatggacatcaataaattcacaagaagatgtagctaaagttgaaactattctacctcgtataaatttacatttagttgattttagctataatgctccatttaaaacaaacattttgaatcaaaatttactgcaaaaaggcgcaacttctgtagtatcacagtataatccatctcctattaaaatgatttatgaattgagtatatttactcgctacgaagacgatatgtttcaaatagttgaacagattcttccatattttcaacctcattttaatacaaccatgtatgagcagtttggaaatgatattccatttaaaagggatattaaaattgtactgatgtctgctgctatagacgaatctatagatggagataatttatctcgtcgtagaattgaatggtcactaacatttgaagtaaatggatggatgtatcctccagtagatgatgcagaaggattaattcgtactacttatacagattttcacgccaatacaagagatttgcctgacggtgaaggcgtttttgaatctgtcgatagcgaagttgttcctcgagatattaacccagaagactgggatggaacagtaaaacaaactttcactagcaatgtaaatagaccaacaccgccagaacctcctggcccaagaacatagaggttattatggaaggtcttgatataaacaaacttttagatatttctgacctccccggaatcgacggggaggaaattaaagtatatgaacctctgcaattagtagaagttaaaagcaatcctcaaaaccgtactcctgacttagaagatgattatggagtagttcgtcgaaatatgcattttcaacaacaaatgctaatggacgcagccaagatttttcttgagacggcaaagaatgctgattctcctcgtcacatggaagtatttgcaactcttatggggcaaatgactacgacgaacagagaaatactgaagcttcataaagatatgaaagatattacatctgagcaggttggcactaaaggtgctgttcctacaggtcaaatgaatattcaaaatgcgacagtattcatgggttcaccaacagaattaatggacgaaattggtgatgcttacgaggctcaagaagctcgtgagaaggtgataaatggaacaaccgattaatgcattaaatgatttccatccgttaaatgaagctggaaaaattttaataaaacacccaagcttagctgaaagaaaagatgaagatggaattcattggataaaatctcagtgggatggaaaatggtatcctgaaaaattcagtgattaccttcgtctgcataaaatagtaaaaattccaaataattctgacaagcctgaattatttcaaacttataaagataagaataataaaagatctcggtatatgggtcttcctaacttgaaacgagctaatattaaaacacaatggactcgtgaaatggtagaggagtggaaaaaatgccgagacgatattgtttattttgcagaaacatactgtgccattactcatattgactatggtgtcataaaggttcaattacgtgactatcagcgtgatatgctcaaaataatgtcatctaaacgtatgactgtttgtaatttatcacgccagctcggtaaaacaactgtagtagctattttccttgcacactttgtgtgttttaacaaggataaagctgtaggtattcttgctcacaaaggctcaatgtctgcggaagttttagatcgtactaagcaagcaattgaactgcttcctgactttttacagcctggtatagttgaatggaataaagggtctattgaactagataatggttcttcaattggcgcttatgcttcctctcctgacgcagttcgtggtaactcgttcgcaatgatttacattgacgaatgtgcatttattccaaacttccatgattcctggcttgctattcaaccagtaatttcatctggtcgtcgttcgaaaattattattactacgactcctaatggattaaaccatttttacgatatttggactgcagctgttgaaggtaaatcagggtttgaaccatatactgctatttggaattcagttaaagaacgtctttataatgatgaagatatttttgacgatggatggcaatggagcatacaaaccattaatggttcttcattagctcaattccgtcaagaacatactgcagcgtttgaagggacttctggtacattaatttcaggaatgaaattagctattatggattttattgaagtaacaccagatgatcatggttttcatcgatttaaaaaccctgaaccagatagaaaatatattgcaactctagactgctcagaaggtcgtgggcaagattatcacgctttacatattattgatgttaccgatgatgtgtgggaacaggttggtgttttgcactcaaacactatttctcatttaattctacctgacatcgttatgcgttatttagtagaatacaatgaatgcccagtttatattgaattaaatagtactggtatgtcagttgcgaaatcactttatatggatttagaatacgaaggtgttatctgcgattcatatactgatttaggaatgaaacaaactaaacgcacgaaagcggtaggatgctctacattaaaagaccttattgaaaaagataagcttattattcatcaccgagcgactattcaagaatttagaacgtttagtgaaaaaggcgtgtcttgggcggctgaagaaggttatcatgatgatttagtaatgtctttagtgatttttggatggttatcaacgcagtcaaaatttattgattatgcggataaagatgacatgcgattagcatctgaagtattttcaaaagagcttcaggatatgagcgacgactacgcgccagttatatttgtggattcggttcattctgctgagtatgttccagtatctcatggtatgtcaatggtataaatatattaaagcatattaaagaggattaaaaatgactttattatctccgggcattgagctcaaagaaactacggttcaaagcaccgtggttaataactctactggtacagcagctttggccggtaaattccagtggggtcctgcttttcagattaaacaggttacaaatgaagtagatttagttaatacttttggtcaaccaaccgctgaaactgctgactattttatgtctgcgatgaatttcttgcagtacggaaatgacttacgagtagttcgtgctgttgatagagataccgctaaaaactcatcgccaattgctggtaatattgaatacacaatttctaccccaggtagtaactacgcggttggagataaaatcacggtcaaatatgtttcagatgatattgaaactgaaggtaaaattactgaagtagacgcagatggaaaaattaagaaaattaatattcctactgcaaaaattatcgctaaagcgaaagaagtaggcgaatatccaacactaggttctaactggactgcggaaatttcttcgtcttcctctggtttagctgcagtaataactcttggaaaaattattactgattctggtattttattagctgaaattgaaaatgctgaagctgctatgacagcggttgactttcaagcaaatctcgaaaaatacggaattccaggagtagtagctctttatccaggcgaattaggcgataaaattgaaattgaaatcgtatctaaagctgactatgcaaaaggagcttctgcattactcccaatttatccgggcggtggtactcgtgcatctactgctaaagcagtgtttggatatggaccacaaactgattcacaatacgctattatagttcgtcgtaatgatgctattgttcaaagcgttgttctttcaactaagcgtggtgaaaaagatatttacgatagtaacatctatatcgatgactttttcgcaaaaggtggctcagaatatatttttgcaactgcacaaaactggccagaaggcttctctggaattttaactctgtctggtggattatcatcaaatgctgaagtaacagcaggagatttgatggaagcttgggacttctttgctgaccgtgaatctgttgatgttcagttgtttattgcgggttcttgtgccggtgaatctttagaaacagcatctactgtccaaaaacacgtcgtttcaattggggatgctcgccaagattgcttagtattgtgctctcctccgcgtgaaactgtagttggaattcctgtaactcgtgctgttgataacttagtcaattggagaactgcaacaggttcatacactgataataactttaatatcagttcaacctatgcggcaattgatggtaactataagtatcagtatgacaaatataatgatgtgaatcgttgggttccattagcagctgatattgctggtttatgcgcaagaactgataacgtttctcatacttggatgtctccagctggttataatcgtggccaaattttgaacgttattaaactggctattgaaactcgccaagctcagcgcgaccgtttataccaagaagctatcaacccggtaactggtacaggtggtgatggttacgtattgtatggtgataaaacagctacttctgttccttctccatttgatcgtattaacgttcgtcgtctgtttaatatgttgaaaacgaatatcggacgtagttcaaaatatcgtttgttcgaattaaacaacgcgtttactcgttcatcattccgcacagaaactgcccagtacttacagggaattaaagctctcggtggaatttatgaatatcgcgtagtttgcgatacaacaaataacactccgtcagtaattgatagaaatgagtttgttgcaacattctacatccaaccggcgcgcagtataaattatattactttgaatttcgtcgcaactgctaccggcgcagatttcgatgagttaactggtcttgcaggttaatacggtgcattctaaaggcctgtttcggcaggccatataaatacactatatccttaattctttaattctatatgccctaggttaaacatagggatataaatactacagaggctaatatgtttgtagatgatgtaacacgagcgtttgaatctggtgattttgctcgacctaacttattccaagtagaaatttcttatcttggacaaaattttacgtttcaatgtaaagccactgctttaccagctggtattgtagaaaaaattccagtcggatttatgaaccgtaaaattaacgtagcaggcgatcgtacattcgatgattggactattacagtaatgaatgatgaggcgcatgatgcacgccagaagtttgttgactggcaaagcattgctgctgggcaaggaaacgaaattactggtggaaaaccggcagagtataaaaagagtgctattgtacgccaatacgctcgtgacgctaaaactgtaacaaaagaagtcgaaattaaaggcctgtggcctactaacgtgggtgaacttcaattagattgggattcaaacaatgaaatccaaacctttgaagtaactctcgctctcgattattgggaataaaatgaatggggagaaatccccatcctgcttaaagcagagaagtccattataaatataactataattcccatttggagaatacaatgaaatttaatgtattaagtttgtttgctccatgggctaaaatggacgaacgaaattttaaagaccaagaaaaagaagatcttgtttccattacagccccaaagcttgatgatggagcaagagaatttgaagtaagctcgaatgaagctgcttctccttataatgctgcattccaaacaatttttggttcatatgaaccaggaatgaaaaccactcgtgagcttattgatacatatcgtaatctcatgaataactatgaagtagataatgcagtttcagaaattgtttcagacgctatcgtctatgaagatgatactgaagtcgttgcgttaaatttggataaatctaaatttagcccaaaaattaaaaatatgatgttagatgaatttaatgatgtattaaatcatttatcatttcaacgaaaaggttctgatcattttagacgttggtatgtcgattcaagaattttctttcataaaattattgatccaaaacgtccaaaagaaggcataaaggaattacgtagattagaccctcgccaagttcagtatgttcgtgaaattataacagaaactgaagctggcacaaaaatagttaaaggttacaaagagtattttatatatgatactgcgcacgaatcatatgcgtgtgatggtagaatgtatgaggctggcacaaaaataaaaattcctaaagctgccatcgtttatgcccattctggattagtcgattgttgcggtaaaaatatcatcgggtatttgcatcgtgctgttaaacctgctaaccaattaaaattattagaagatgctgtagtcatttatcgcattactcgtgctcctgaccgtcgtgtatggtacgtagacacaggtaatatgcctgctcgtaaagctgccgagcacatgcaacatgtcatgaacacgatgaaaaaccgtgtagtatatgatgcatcaacaggtaaaataaaaaatcaacagcataatatgtctatgaccgaagactattggttgcagcgccgtgatggtaaagctgtgacagaagttgatactcttcctggcgctgataatactggtaatatggaagatgttcgttggtttagacaagctctttatatggcattacgtgttcctctttcacgcattccgcaagaccaacaaggcggtgtgatgtttgattctggaactagcattacacgcgatgaattgacgtttgctaaatttattcgtgagttacagcacaagtttgaagaagttttcctagatccgcttaaaacaaatcttttgcttaaaggtataatcacagaagatgagtggaatgatgaaataaataatattaagatagaatttcatcgggatagctactttactgaactcaaagaagcagaaattttggaacgaagaattaatatgctaaccatggcagaaccatttattggtaaatatatttctcacagaactgctatgaaagatattttgcagatgactgatgaagaaatagaacaagaagccaagcaaattgaagaagagtctaaagaggctcgtttccaagaccccgaccaagaacaagaggatttttaatggaaggtttaattgaagctattaaatcaaacgacctcgtagccgctcgtaaattatttgctgaagccatggctgcaagaacgattgatttaattaaagaagaaaaaatcgctatcgctcgtaatttcttaattgaaggtgaagaacctgaagacgaggatgaagatgaagatgatgacgaagatagcgatgataaagacgacaaaaaagacaaagactctgacgaagacgaggatgatgaataatgcttctgatccctgaaactcatgaattagttctcgagaatgtcgaagcacttattcctgaagcacagggtcgctttgacgaattgtcttctgctttaaataaagacgatataaatacaattgtcgagaatatgcttgatgatgaaactgatttagcggttgcattagcttctattaatgaaaatatgccgttaaatgaattcatcgttaaacatgtttctgcccgtggtgaaattactcgcactaaagatcgcaaaacccgcgaacgaaatgcatttcaaaccactgggctgtctaaagcaaaacgtagacaaattgctcgtaaagctaccaaaacgaagattgccaatccagcaggtcaatctcgtgctcagcgtaagcgtaaaaaagctcttaaacgccgtaaagcattaggattaagctaatgaatgaaccccaattactaattgaaacttggggtcaacctggcgaaattattgatggcgtgccaatgcttgaatctcacgatggaaaagacttaggtttaaaaccgggtttatacatcgaaggaatattcatgcaagcggaagtcgtcaatagaaataaacgtctttatccaaaacgtatattagaaaaagcggtaaaagactatattaatgagcaagttttaactaaacaagctctaggagaattaaatcatcctccacgcgctaatgttgacccgatgcaagccgctatcattatagaagatatgtggtggaaaggaaatgacgtatacggacgagctcgtgttattgaaggtgaccacggtcctggagataaattagcagctaatattcgtgccggatggattccaggagtttcttctcgtggattaggttcattgactgacacaaataaaggttatcgtatcgtaaacgaaggattcaaattaactgtaggtgttgatgcagtatggggtccaagtgctccagatgcatgggtaactcctaaggaaattaccgaatcacagacggcggaagccgatacaagtgccgatgacgcctatatggctctcgcagaggccatgaaaaaagcgttataaatattattatctaaacaacaggactacaaaatgcttaaagaacaactgattgctgaagcgcaaaaaattgatgcttccgttgctcttgatagtattttcgaatcagttaatatttctccggaagcaaaagaaactttcggcactgtattcgaagctaccgtcaagcagcacgccgttaaattagctgaatctcatatcgctaaaattgctgaaaaagcagaagaagaagtagaaaaaaataaagaagaagctgaagaaaaagctgagaagaaaatcgctgagcaagcttctaaattcatcgaccatcttgcgaaagaatggctcgctgaaaataaattagcagttgataaaggcatcaaagccgaactgtttgaatccatgcttggtggattaaaagagctctttgttgaacacaacgttgttgttccagaagaatcagttgatgttgtagctgaaatggaagaagagctgcaagaacataaagaagaatcagctcgtctgttcgaagaactcaatatgcgcgacgcatatatcaattatgtgcagcgtgaagtggcattgagcgaaagtactaaagatctgactgagtctcaaaaagaaaaagtctctgctctggtcgaaggtatggattattcagatgaattctcaagtaaattgagtgccatcgtagaaatggtgaagaagtctaataaagatgaaagcactattactgagggtataaatactcctgatactgaagcagccggactgaatttcgtcactgaagctgtagaagataaatctgcatctggtgcagaagatattgtaagtgtatatgcgaaagtcgcatctcgtttctaattttaaaggttaacacaaatgactatcaaaactaaagctgaacttttgaacaaatggaagccattactggaaggtgaaggtttaccggaaattgctaatagcaaacaagcgattatcgctaaaatctttgaaaaccaggaaaaagatttccagacagctccggaatataaagacgaaaaaattgcccaggcattcggttctttcttaacagaagctgaaatcggtggtgaccacggttacaatgctaccaacatcgctgcaggtcagacttctggcgcagtaactcagattggcccagctgttatgggtatggtacgtcgtgctattcctaacctgattgctttcgatatttgcggtgttcaaccgatgagcagcccaaccggtcaggtattcgcactccgcgcggtatatggtaaagatccgatcgctgccggtgctaaagaagcattccacccaatgtatggtccagatgcaatgttctctggtcagggtgctgctaagaaattcccagctctggctgctagcacagaaaccacagtaggtgatatctatactcacttcttccaggacactggtactgtgtatctgcaagcttctgctcaagtaacaattagtgcaagtgcaactgatgcagataaattagatgctgaaattaagaaacaaatggaagctggtgcactggtagaaatcgctgaaggtatggctacttctatcgctgaactccaggaaggtttcaacggttctaccgataacccatggaatgaaatgggcttccgtatcgataaacaagttatcgaagctaaatctcgccagctgaaagctgcttactctatcgaattagcacaagacctccgtgctgttcacggtatggatgctgatgctgaactgtctggtattctggctacagaaatcatgctggaaatcaaccgcgaagttgttgattggattaactactcagctcaggttggtaaatctggtatgaccctgactccgggttctaaagctggtgtatttgacttccaggacccaatcgatattcgtggtgctcgctgggcaggtgaatcctttaaagctctgttgttccagattgacaaagaagcagttgaaattgctcgtcagactggtcgtggtgaaggtaacttcattatcgcttcccgtaacgtagttaacgttctggcttcagttgataccggcatttcttatgctgcacagggtctggctaccggctttaacactgatactaccaagtcagtatttgctggtgttctgggtggtaaataccgtgtatatatcgaccagtatgctaaacaggattatttcactgtaggttataaaggtccgaacgaaatggatgctggtatttactacgctccatatgtagctctgactccattgcgtggttctgatccgaagaacttccaaccagtaatgggattcaaaactcgttacggtatcggtatcaacccatttgcagaatccgctgctcaggctccggcttctcgcattcagagtggtatgccttctatcctgaacagccttggtaaaaacgcttactttagacgtgtatatgttaaaggtatctaagatataaccttattatgggagacttcggtctcccattcttgtttctatactacgcaatcttaactcgacggttgatgatgtcacggaagtcaatacgattttcttggattttcagccagttaccagatttgtctttggtatgggtagaatattcaccgttccaccagaagtcagtagcataagccatggtttcatatttcttaactagggcattcactgcattaccgttaggattggaaccatatttttctaccagggctttgatgtctttatcaagagcggacagagtagtacgaataaagtttaacttgttcatttttaatctcctcatgtttttgataggtctatagtaacatgtgataaccttgctgtaaacaacttttataaataaacatatactctcaacaaggaaagcgcaatggctaaaatcaacgaacttctgcgcgaatcaaccacaacgaatagcaactcaatcggtcgcccaaatctcgttgctttgactcgcgctaccactaaattaatatattctgacattgtagcaacgcaaagaactaatcaacctgttgctgctttttatggtatcaaataccttaatccagataacgaatttacttttaaaactggtgctacttacgctggcgaagctggatatgtagaccgagaacaaatcacagaattaacagaagagtctaaattaactctcaataaaggcgatttattcaaatataataatatcgtttataaagtattagaagatacaccatttgctaccattgaagaaagcgatttagaattagctcttcagattgcaattgttcttttaaaggttcgtctattttctgacgcagcgtcaacgagcaaatttgaaagctctgatagcgaaattgcggatgctagattccagattaataaatggcaaaccgcagttaaatctcgtaaacttaaaactggcatcacagttgaattagcacaagatttagaagcaaatggattcgatgctcctaatttcttggaagatttgcttgcaactgaaatggcggatgaaatcaataaagatattctacagtctttaattactgtatcgaaacgttataaagttactggaattactgacaccggatttattgacttgagctatgcatccgctccagaagcaggtcgttcattatatcgaatggtgtgtgaaatggtttcgcatatccaaaaagaatcaacttatacagcaacgttctgtgttgcttcagctcgtgctgctgcgattcttgctgcatcaggttggttaaaacataaaccagaagatgataaatatctttcacaaaatgcctacgggttcttagctaatggtttaccgctttattgcgatactaacagcccattagattatgtaatcgttggcgtggtagaaaatattggcgaaaaagaaattgttggatcaattttctatgctccatacacagaaggtcttgacttagatgaccctgaacatgttggtgcatttaaagttgtagttgatccggaaagcttgcaaccatctatcggtttattagttagatatgctttatcagcaaatccttatactgtagcaaaagatgaaaaagaagcaagaataattgatggtggagacatggataaaatggcgggtcgttcagatttgtctgttttattaggtgttaagctaccaaaaattattgttgatgaataaaacaaagggaccgaaaggtccctttttatttagctcaccaactcaatccaggctggacgaagtacatcttgtaccattttaactaattcctttttaatcaaagaaggattatctgcttgagtcagagtaataccttcacgagaagtttcttccaaaatatcttgaacagttagtcccatcacctttccaaaatctttaggaccaatttcaccaattttagagataacgttatttactcggttcagtgtaacgtagcaagctaaaattctcagcaatttattatcagcttctgacaactcaactttagctttaataggcttatcagactttttcttttcgctaaatttagagttcttgcatttgatggctacacgattgccattaggcatccaagaaggataacaaggtttcaatacatatccttcagcggtaaatacttcgccttttgcttcggcattccaaacgcatttatttgcatcagctaatccagcatggtctactgtaaaattataatcttggacgacagaatctaaatcatttggcaatttaataagctcttcaaatttaccgcgacctaaaagtggagccattttaaatttgaatgtattacagaatgattccatcatataatcatcgacataagtcacgtcaccactttctgtagtgacaataatgtcaaatacataaaaatctttatcgccataatcaacattcttctgaatgccaggtccagcgaattcgccaaagacttgataagatacaactgctgaagtttccataatatcttgcactgctttaatagaatcagcataattctttaaaataatttcatacccaaagaaatcttcagcaggaagaataggaccagtacgtttagcacaagttactttatcacgctcaataatcaatgagaaatttgtaccatgaatcttttcacgagctacccactccccaccagtcaatcccaagctataaagtttttcaataaatttagagttgtaatgattttcaagactgctatactttttaaacataattaatcctcaaaatgtaatttctaaccaatcaccatcacgctggtcactattggctttaaagctaaatccttcttttctcagccaatcaccaatttcttcagtaatcaatttatcgcgagcaatgcaataataactaaaatatgttttaccttgttcagctgctttattagcaagttctgaaaaatctttaataaaacattctagtttaaactgtttacttttaagtgctttttctcgcaattgattagcaaaagattcattttcataaagatcatactgttccatttttcacctttttattgatatgtctttttctatagacaactttttctcgagtttcaaatttattcttagcagtcatagctcgagcccataatacagccacttcttttgcctgtaagtttaattcacgagcaatttcaatgaatgactttccagactcatgaagagtaaacaccacaacctcagttctcataatcaatctcatgttatcgagttggtgccattatatacatcattttctgattgtgttttgcgtgctttcaaaatgaagaaagggggccgaagccccttacgattatgggtatgtatagatgataccagtttccaaagcagttttatggatgatgtatccattacgtgattcctgaacatcaacttccggatagtctttcatcatcttctgaagagtgtaacgatgcaggtagtatttactatctggatcttcagttttccaatctttaccttcttcagtcattttttggatttcatcaataacccaccaaccgcaccaaatgtaagctgaagtacgatgtggaagaggatgaacataaggtagttcaccttctggttctggagcaactttatcagtcacttgaacttgaccttctgctgtaatagttttgctatcgtaatcagttgcagtaatagttgcagtaacttcaatagtttgacttccaatagatgaggtatcaacggtatatacattagttgacccttctacaggagaagaatctttcttccatgaatacacaatttgcgcttcttctggagcatcagtgacattagcggtaaatgtagccgaagcatcttgttgaacattaatagaaggaggagtcaatgtaacctgtggattcattgtcttcttattaactgttaatgatacttcattcgaagtaacttccttttcattgtaattttcagcagttacttgggctacgcatttaattctttttactccacttgtagttggagtatagctaaatgtagagttagtttctccaccaacttgtgaatcatctacataccactgatacgtagcagatgctccatcaggttgagaagctaaggcagcagtaaattgaactggggttccaattactccagctgaaggactatcgggagttactgccaaagtagttgtctgtgtctttttattaacagtcagtgatacttcattagaagtaacttcttttgcgtcataatccgttgccgtcacttgggctacacactcaattgttttaactccgcttgtgtcaggagtgtaattgaatgtagcgctagtcgcttcgctcacaggagaaccgtcaacataccactgatacgtagcagatgcgcctgatggctgcgaagccaaagcagcggtaaattcaacagctgttccaattactccagccgcaggactagcaggagttacgactaaggtagtcgtctgtgtcttatttttaactgtgatagttgttgtcgcttcagccgtttccggacctccttcagaaagtgtatttgttgcaactactttaatagtcttttgaccggcaggtccttttaatacataatcaaaagttgcttcagctccatcttgtggagcatcatctacagtccaagcatatgtaatagttccgtctccagtttgaccactgggtgtagcagtaaactgcttagtttcatcaataacccctgtcggtgttttaggagttatatcaactgtaaaagccataagttatccttattttaatgttacgaaagaagaattgcgtgtttcacgaattagaactgatccgtcgcggttaatgtaataaattaagctaaataaagtttggtgtgctgacgcatgttcaaaacttgttgggtgagatttccaatctggagtttcagcaatccattgataaatccaccaaggaacagtgcagaatcctggattttttccaatcagctgaagatttgggctaaagttttctggaagagtaaatacagacggcttttcagattcaataatctcagctacagcctgttcgaatttttcttcaacaaaaggagtgtcttcaatcaaaacatcggtattttcaggaattttatccgtttctactacttcaattttaatgtcagatttaaccggagaatcaatcaaaagtgctgcttccggattgacttcttcatcgtcatattttaatccctctgcggcatcagcagcatcaattaagtctttaatagataacccatcagtctctggcataggttcactagcgagcttctggagggcttcttcaatatcaacaacgatattatcaaaagatttattctttttgacctttataccaaactgttcagcatattcagctaatttagctttagcttctttgttatcatcaagagccttcagctctgcaatataat

SEQ ID NO: 8 - DNA, 167772 bp, Bacteriophage
tattattaagtaaactcattatgcaatccttatccaacggtatacagtaatagacggttgaatattactaatattagtaggaggagtatgtgaagagtttgttgttgcgtagtcttcacgatattttgtatatataggaccagtttcgtctgggtcatattgacatcctccaataataactgatccattttcgtcttcaattaaaactctttcatcagttttagtcgcaggaagatttgcgttttcaagcgttactgatgttgtaccaactgttccaccggcagtatgtgaaggatttccgctagaatctaaatcattattgtttaaagcaaagtttggatccgtaacatcatcattccatcctactaaaacttgtcctttaccaaataatttccatgaaccaaatcccatataagtcaccggattatttgggtttatagcattttcataaattgaaccaacaggataaatgctgtcgaaaatagatgatattgaattatacgttctagtataagaatcaactttttcaacatttggccaaccgattttatcaaaatctgttaaggctacatccccagtaacttcagtagatgatcctttactaacataacggtcatcagttaattcaataatgtcatctttttctaaaagagttcctaaatcattattaaaccatgttataacgattatatcacctgattcaaattttctatcaaataaaagactgacaggttttccatcttcatattctatagaataatctgtgttcgattctttccattcaccaccaagagatatacatcctgcttgcgtatctgagttagcaccttcacacaaaaacagaggatatcctgctgttccagcttgttgttgtaaaattccattaaaacgaacttcaagagaattaggattaataggttctccaggaattaatccaaatgcagaaaatggaattgatttcattgttgataaatcagtaacgtaaatacttccttctaaagacgtttttgacgttagttttgaatccagtacttttatttggcgtcttgtatatgaacttctccattgtgatacaccatccataaatgtttcaatttgaacagtgtcaccaatattacaaggctgtcttaacctaatattaaatccatcaagaggaatcaattctccttcattttctccgggagagccaaagtcactgttttcactaaatacatcgccgtaatataattcattaccacggtgttttactcggatgttattaacattatagctagttccgcggaaaacatctaaaaagtctgtttgtccttgaacttcgactaaaaattctttacgtgctacattactaatatctgaactaataattttgtcaatttgtttgtttttgacatattcccaacgtcctggagcgcaataaacgagctctaaatcactaaattgaatattaatttcaactgacgatgacgaccctttaattgtatccccagaagcagctactaaagtaactggattaatgttccatgttgcaaatacatccctagctctaattactttattataatcattaacagttcctttaggaagttgtaaagttactcttccagaagaggtattaatagcgtatgattttccccacttagcttttaatgtttgaccggatgaagcattataagttttccaggcaccggctgaatatggaacatctccatcgccaagttcataataaagttcatcaaagttttcatttatttttataccacctttacgcaggtagtcaccggtaccatcatcaacaacattaccgatattaatattttgtttcattattgagccaccccgattttctgcgtagcgataactttaactgctgctctcatgccaacggtagaagaacttatagtcgccgttacatagttggttttaatactaaatgcaatattagcaatctcgtcttcttctgtttcatttccaactctcatgacagcatactcagaagaaataacttctgaattaacagtatccacaagaatatttatttctgctgttttaatttttcttccatctactgattggcacgtaactagcaatttagccatattgtattcagtgcgatgaaatagtggaatatcaactgatccggatgtagaaatattccatgtaccttcagctggtgattccttttgtccaaacatactttcaatagaataattccaaaccgatgtagaattatcagatgaaatacagcgtaaagttactttactatatgggctagttactactaaattacctgaaacacctttaattgaatcaatagcttgaatcgttaaaggattagtaactgatattgatccattagagttaatgaattcaacacaatcgccgagttcgcctctttcaataataactttaacacctacagtagaggtatcaatatcatgtctagtgccaactttcactggagttgcgtactctgtaatagagtgtttttgataatacccagtagcatggataatttgaccatctgctccagtgccatttgctactgccattttacgctgatcgccaaacgcattataaattgcgttaaaatcactattaattttattaccaccgtcgaataagatatcaccagtagaagcgttaccaatttcgccggtatcaatcaatttctttggttcttgaatgaacatagcggtttccttatgagtttatagtatttataaagaaaaagggagcccatgggctcccttaatttaaaatgtaaacagaatattgatttcttctgtctgatccattgccatgataataggtggcctattttccatataaatcatttcgcccgaatgcctcattaaatcttctgggtcataataatccttttcagctttaacgtttgggtcatttggatgagctttagcttcaagaggattcgtgattattgatatttgtctaaatcctttatttcctggcaatgcagcatcaggaaaataaactgaatctaaatatgctttaaaacggatagtatttgccttaacccggtaaattaatccaaaatcatcttgctgccaagtgagattatcttcatacccccatctagttggatcttcttttaattcctcaggccaaggaactacgatatattcatttgtgcatctatttatagatacatcgggcggaatctcaaaaagatattcccaaacatatccgtctccaggttcgattgttccttccgcatctcctcgaccttcaggaggagtcattgacctaacagaaggagtccattttccgcctaatttaaggcattcatccttatcagttaaagatgcaattgaacacattccagtatcaggaacatctaaacaacgatatactaaccagcctgcgcctgattcagtagcgttgtaaggagctgagttacacactacaatatcgttaattctaaatgtgtatggatccggatatctagtatctccccaatctcgacgaggaataactgcgtcaagcattgatggaagaacctttactgttcccatcatatgcgtccacatgtcagttacgcctaatacagaatcggttggataaggtggggcaaagcccacctcattttcatttgatgaccacggttctgatcttccaaatgtgataaagatagtgtttttatccggaccacttccaattgaattataaaaattcaacattttttctgttctaaattttgaagtaactatcgcacgatagataacacttgaatcattcatctattttaacctgtgttggattttcagggtctcttggatttcctatattatcttttagacgtttattaactaaatccctaaattgcgtaaatgttgttccagaagcatcaaataggggactcattaatttacgtcgttcagacggcaattgaccttgaaatattgaattattattttcagcattatagtcatcaggaagaggatattctacaccagccattgggccaggctcataaattgcttcgcctgttactgaatcatgctcaatttcaccggttggagttaatttagctactctatcagcatattcagtaggcaatccagaatcccatttatagtttttatatttattaattattgtctctgtgtgtttaagagttaaaccaacattaataaacatcgttaaaagggtaattgctataaatccaaatcctactggatgaacaaaacgaataacgtcagatttccagcgggaagaaggtaaattggatttaattttcattacatagtatgatctacttctattaatatagtctatattgttttgaagcaaatcctttcctttaactccacgaataatttcgccttcaaaactagggagtctttctgctttaacttcttgaccagcaattaatcttcctaaaagattatgaatagttacggtccattgcaatttaccattagaatagcttctttctatataagtaacattacatcttcctgttgccgtataaatcgtttgtcctactaaatcttcagtcaaagaatcagattgaacgattatgtcatattcagtaccggccccagattcaatttcaatttcaacttcttcattataaagaactttaaaaagaaacttgtatgatgcttcaattcctttagtagaataaaaatcatagctacgtgattcaaagaatctcgcaacagcatcacgtttatcagcatttaaataaatgtttcttttatatatctctgaccacaaatattcccacgcatgctcttctcgtggatattggttacgaattaaatttcgtaaattgttatactgagttccatatccgtcagaaagatattgaatatatgcttcacaaaatgcctcaaaattagaatcttgtaacaagtaagaatcaggcatcattgtgccaattaatggtcttaaatcagggtcagctaatccatgctcttcttctggcgaccaaggagtttcgcgctcttggttttgtaaaaatgcttttaaaaatacttcagttggcttccaaataatttctactgtatctctcacacgatagttaaaatcataataagaaattatttcgccagaagatttgtagaaaagcattcctgatgcgtattttttaaatccggtgaatttaacatttggcattactatcgtgcaatcaccatcatcccagtattcatgaactaatctatctggtgatgtttctggaatattttctataactttagtgtattttaaatcagcataaactactacagctctatcagagttgtttatccaacatcgtgtgttagattttttagaccagttaaagaacggttctgcgtagtatttcattggttgaggagtaaaagtctcccaatcagatttttcatccgctataaatgccatcatatgataatgcttatcagctaaccattcacgaggaaattcatatttaacagcaccgattaactgatatttcaccacagtttcagggtcattaacaatgttatcacttaaaaatttaaaattactcgaagatagagaaactaatttaccgtcagttgacatattcgcatatccgggttgaatacgtcttctttcttcttcggtattaccgaaaactcttttccacgttttcgtatcatggtttaaaacatatattcctttatcagcagaatcaattatttttgatgttctaggattggcatttaatgtttcaacttcaccaataataagagcaaaaactttatcaccaacagaatccattttatagcatactgctttaggatttccggttatagtcatggtatcaggttcaaaaagtctttccgaatatgttggagataatggatcagaatctataggtgcattactcgtttttatgtatctaactttgtctctggcgacaacgtaaatgtaatcatcggtgcaagtaatagcttctgcaatgcggtatacattcgctggtaaagtcgcataagtggcaaaaatttctacatcaaatcctaaatgtaattggtcgccaagtttagcgaatgttatatcctgtgaactgaatctgacatcatcagctgaccatctaacatcagtagatttgcggccatagaaaatcttgtcgtatcctagaacgtatgtagtgttcgcagattggtaatatactgtcttagataaaggatatcctacacggtcattgaagagctttacagctttccaggtttgtcctttatcattagatactttaaccacgggttgataacgctcaaaaagatatagaatcccttctgattccatcaaataaactcggttaatatccttacatacttgctgaatggaaccttgtatttcatgatactcattttcaccaataataaaattactgattgatgaaacatcaacatatgatgggctgaattggaacgattcattcatcaatgcagccattatagtgtcattattaaaattgacataattagaattgttaagagtaaacttttcctgaatgaatttattggctaattgcatttcaatcatgttttgaaatgtgtaagcattcgtagcaaaagtttcaaactcttcagtataaatccaatcagactgctcaaaatcctgcgcagctgtagctactctaataatgtacgatgttaatggattagcattatcaaaaaagaagctgttatttgcagtatatcctaagttaatccatctgtattgattgctcgggagattttctcccgagtttgtttttgtctcagcgatttctacaaaatagtagaaattagcaccaacgtcatcccagcgtacttgcacctgatttgcggataacttggaaattctgagactagtgactgaaggtgcttttactgtcattgtgatataggctccaaatcgatagttaagtattgtggacgtaaatcattttcaaatacaatcagtgaaccatcgcgcgtgaaaataacatcgtctattggatcagaatatagctcaatagtctgaacctcaaatttatcggatgttaaattaattttagcgatattccaataaatcatgtcagctggataatttatttcaccgataacatagtatttgtcacgtccatcggaacttgctaatttattaaaatcattgcctgtatatggctgaatgttttcattttctgtaacatcgccagaagcaaatggaccaataataactttgccaattcctttagaatctcggtctgttgatactatatgaacgtcatataatacatcttcttctaaaccagtatcaggatttacaacctttcgtccagaattaaatgaaaacgtattagattccatagaacgatcttttatttgattattgtatttaatacccgcttcaggcgttttatagaagttttgtacttcacgaaccatttgaatagtcgctgatgaaccaatgacagaatgatctgcatcatctacatatgtcaacatcttagatttagcgaaagatgagttaaaaatttctacatcttctgtataatagcgatcaattttatcaattatttgaccttcaagccattgctcggattcttgcagtttatttaaagcatatgtgacttttaaattagtcttaataaaaagataattaggagaaataattgatggcgtaataggagctaaattatagtctttgagataatttttaatatcttcacgctgtacggtagttaaatacagacctgatttaggtttggcagcaatgaatgcatacccaggtttagtagaatcagtgaaagtttgaacagcttgaataatagaaccaaatctttctgagacaaatgtatcataatctgtcgcagttacacatcgctgctgagtttcacgcttaatagtacccaattcacgaatacgttcaatatcttctggatcaccaccaccatcagcaccaacaaaatctgggtcatcgtttggattttcattaatattgatgacagttatatttgttaatgtatctgcatatgaaaatccgactgcgccattcgcatctgcaccgttagtactgatgtactcaataacaatcgtagagttctgggtaggtttaagacctccgatataattagcggtcaaagctccttcagaagcattaacagaaatttcaccttcgccaaaatagaattcagtgtttccatcaatagtttcacgcatatagtaaatcgttgatgttgaaccagcatgaaccattgactttctcgtccagttaatccattccgctccatcaacatataatttaacctggtttctatcaatatttttatcataaatgataataggtgttaatttatcataaatgatttcagttcttactatacgtccctgggccaatttcaatcgtggaaaatattggttatttttatcacgaatagcaataacatcttcggtagatacaaagttataaggattaacagaagtatcctttgcatatgctaaaaagcgagttccgcgaggaatagtaatgtaattcctattcaatgcgtcggtgcatgttaacataatttcggtctgcgcagcggattttgaagtaggtaaatatccgttatcttgtgcagcttgaacaactgaacttcgtaagttagcagtacgcataaagctttcatacacagcagcattaccaaactgctgaatgtataatgtattataagctaaaaggtcacacagaacgtttaatcttgagccttcaaaatcataatccaaaaattcattttggccattaagccattcaatgaggttttgttttatttcagcaaacgtacccccgacgaatatctcgggaatagcatttgctgttcttgttaattgataatttacaggggtatttgccattttaaatcctatttaatgaatactttagatgatgcctgagccacagtatcaccgcatgatattggatcagccatttgaacagctttctttcccgtgacatataccttagatgttctaggttgtgtcactccgccatgtgtttcatatggctttttaatttctgtatgttctgtaattggatcgcctgctactagaacagcaattcctccagtgaatactttactttgtgtagcattcacaactgttggaggccacgcttcatggccagcagtaacacacttatcataacttaatcctgacatttatggcctctcatacacatagcttctcaatttattagcccaacgactccaatttccaactatagttttagtataatttttaacgagagtttttcttactggagcaggaggatccgtcggttcagtagtatcagaagatgacctagaattactgccagaacctccagattcactttgttcttggtagtcatatattaatgttacttcgtaagtgaatgtcttctggagattttgaggagctttccacaaatacaactgagtatcagaatcagtaggaagttcttcccatgaagcagcagttttaaattcatcgcctaaacgatatttcaacgcgtcatctccaaatccaaacacagattcatatgttccatataagcgattttcttctactaaaaccccaggagtttcttcgtaactagttatatttatagatactaacgtttcacctgtttctaattgagcggtaaaggtgacgtcgatagaagaaccttccatggattctcctaaatcagcgctcattggaagtatattagccaatgtcaatcctcgatccatcaattgtgtattgaccagatgaaatagaactcatagatgccattttttctgtccaatcaccaccaacgtcccaatcaactgtcccagcaactttccaagaaagatttccatttactgtattagtttgattaccttcaactaaagtggtagcatctcctttaactgtaatgtcagcattaccttcaactacaatagtaacattacctttaactaggatagttccattaccttcaaccgtcttagtttcatcgccacgtacaaatattgtattgcttccatcgatttgatgtaaacgattatccatgttgtaataaatttctgatccaccgacgttagtctttttatcaccggctaccaaaaaattaccatcagcatttgttatatcatacaaattatcaacagtttttcttgttcttcttcctgacggtgatacttcttcataagttccagttggatgaactaatctgtatcgttcttgcccaggggtatcatcaaattcttggatatgtccactttcagtttccatcgtatgcacataaggatactcacctttatatgaagaaactggttctttgaataaaattctcgagtcatttggaataggaggatcagcagggtcagaagatttagctacagtagcagccattgcagataaagacctagctggtgttttcacttcaacaccatatgattccaaatttcccgtaagaataatcatggtaacacgggatgcacgaccctttgtttgttgataccacaatgaatcacgaccggctttatacgctttttcccaatctcctgctaacatagcagttaacattgtgttaaatttagctacaccaccaacacccatctgaaatgccatattttctaacgccatttgacgagaacggttgacagcttgccagactggtcctactttagaatgtgatttaatgtcacgttgcatatcagccaaatcacgctcaaataaagtcgtcgcctcttccattgtaatagaacctggatttcctgtaatttcacgaccaacttgttttgataaaactttattaatttgagccatatcacgaactggctgcttcatgataagatgaccaataccaattgtcggatatccttcggtatcccaataaacttttaatcttaatccttcatcacggcgaagcatttcagccattgacatatttggattatcatcggttggaatctctgatagtggtctatcatcgggatttattgcggtgtctaagttactatcttgaataacgttagaagaggaatcatatcctacttctccgccttggtttaatacgttcgtatcatttcctaaacgtctaggatattgcccagttggatcagaaaatccttcaagtctattcggtttttcgcgaactattccaccatacgtgccaaggacaattccattagttttccatttgtctaaaaaatgaccataaactctagttccttctactggccctgtaacagaacctccaattcctgacatcgctgcagaagttataggttgaataactgacatccatggtaatttttcagttggaatacccattacatcgccttgtgctctttgaggtggatgtagaccaaccacacgaacacgaacacgacctaattttaatgggtccattctatcttcaacaacaccaacaaaccaattaaggttattacttatcatttccataagatttctccattatacgtataaggtcgttcataaatgaattaatgtctgattttgctattatttttatttgacgaagtttttcattttcaagaacagcagcttcatacgtatcgaccgcagcaagtgctccttcatattgaggatattttctagctttatcacctttgtcataccaaacatatggattatcatcgtatgatattaaattataaaatttttcaccgttctcatttacatgatatactatttggtctccacctacatttttgtatttttgtatagatgcttgataagcagcttcttgcgaagtaatccatccataatacgggtcataattatcattacacatcaataaaacccaatacaactgtggatttccatatatagtatttgctaattcttccgggcgtggtgaacctttaatataataagtacgtaagcggtatcccgcaagagcacgtttgaaatagtctttatagtttctaaaaatatctgtcataggaatagtcggcgcgtttttattcaccgttttggccgcatattcaatcggatcaaaaaatgtaaagagcatgggccctcctgtttataaatatattatctatttataaggagaatccaatggcatattctggaaaatgggttcctaaaaatatatcaaaatatagaggtgaccctaaaaaaattacgtatagatcaaattgggaaaaattcttttttgaatggttagataaaaatccagaaattattgcatggggtagtgaaacagcagtaattccttatttttgtaatgcagaagggaaaaaacgtagatacttcatggatatttggatgaaagattcttctggacaagaattttttattgaaataaagcctaaaaaagaaacacaaccaccagttaaaccagcacatctaacaactgcagcgaagaaaagatttatgaatgaaatttatacatattcagttaatactgacaaatggaaagcagcacaatctttagctgaaaagcgtggaataaaatttagaattctaacagaagatggattacgagctcttggctttaagggggcataatggctatttttcaaataattaatgaaagcactccccaagttccaaaggttaagcaatcattaaacgaaaagaaatggattcagataggtcttgaatataaaaaggccaaagcaaaaggaatgacaggaaagcaatttgctgaagaaagaggaatcaaatactctacgtttacttcggcaatgtcaaaatatgcttcaggaattaaaacggctgaaaagattcaaaagcttgaatcaaaaccaatgaataagctcaataagcaagaaagacaactgcttatgataaattcattcaggcaaacattgcgtgataaaattcgtaatgaaggcgcagcaattaataataaaaccagaaagtggtttgctgaaactattaagcaagtaaaaggacataaagttgttcgcccgcagccgggacgaatatatgcttttgcttatgatgctaaacacaaggaaactcttccttactgggataaatttcctttgataatttaccttggtttaggtaagcataatttaatgtacggattaaacttgcactatattccacctaaagctcgtcagcaattcctagaagagcttttaaagcaatatgcaaatacacctactattactaataaaacgaaattaaaaattgattggagtcaagtgaaaggatttaggggtgcagaccaaatgattaaggcatatatacctggtaatattatgggtagccttgttgaaatcgccccgaaagactgggcgaacgttgtgttgatgccacttcagcagttcgtttcaaaaggaaaacgtttctctgcaaacaaagtctggtcaaatatctaattctattatcttccattcttttctgttgtttgttctaaatggaattgaatggaagggacttagacccattataccaccaacagttataaagcattatgaggaatatatgtcgcaagctctgcaacaaatttttaaccaagcaaatacaactaactttgtagtatcaataccacatagtaatactacatctgcttttactttaaatgctcagtcagttcctattccaggaattagaatacctgttactgatactgtgactgggccgtttggactgggccgagcacaacgtccaggtgttacatttgagtatgatccactcattgtgagatttatagttgatgaagaacttaagtcgtggataggaatgtatgaatggatgctaggaactagcaactatcttacaggtgaaaatactgcccaaaaaacaggtcctgaatacattacgctttacatcttagataatagcaaaactgaaatcgtgatgtcaataaatttttataagccttgggtttctgacctatctgaagtagaatttagctacacagaagattcagacccggctttagtatgtactgcaacgattccttacacctattttcaagtagaaaaagatggtaaaattatagcagaagtttaatgcttcagttttgtgtgttataatcttaattaaatttgaggagaaacacatgaaactaatctttttaagcggtgtaaagcgtagtggaaaagatactactgcagattttatcatgaataattattctgcagttaaatatcaacttgctggtcctattaaagatgcattagcttatgcatggggagtatttgcagcaaacactgactatccttgcttaactcgtaaagagtttgaaggaattgactatgatcgtgagactaatttaaatctgactaaattagaagtaatcacaattatggaacaagcattttgctatcttaatggtaaaagcccaattaagggtgtgtttgtttttgatgacgaaggacaagaatcagttaattccgtagcatttaacaagattattgacgttataaataatattgaagatcaatggtcagtccgtcgtctgatgcaagccctaggtacggatttgattgttaataacttcgaccgcatgtactgggtaaaattatttgctttagattatcttgataaatttaactcaggttatgattattatatcgttcctgatactcgtcaagatcatgaaatggatgcggctagggcgatgggtgctacagtaattcatgtagttcgtcctggtcaaaaatccaatgatacacatattacagaagctggattgccaattcgtgatggtgatttagtaattacaaacgatggttctcttgaagaacttttttctaaaattaaaaatacactaaaggtactataatgtctgaacaaactattgaacaaaaactgtctgctgaaatcgtaactctgaaatctcgtattcttgatacgcaggaccaagcggctcgtctgatggaagaatctaaaattctgcaaggaactttggctgaaattgctcgcgcagtaggtatcactggcgatactattaaagttgaagaaatcgttgaagctgtcaagaatcttactgctgaatctactgatgaagcaaaagataaagaataatggaatttaaagacttttcaacgggtctttatgtagcagctaagttttcagaattaacacttgatgcgctggaagaactccagcgctctttacgtgttcctaatccagttcctagagaaaaaattcattcgactatatgttattcgagagtaaatgttccgtatgttccatcaagcggaagttttgaagtagcttcttctggacatttagaagtatggaaaacacaagatggatctactcttgtacttgtactagattctgaatatctgcgctgtcgacacatgtatgcgcgggcgctaggtgctacacatgattttgacgattacacaccgcatataacattgtcttataatgttgggcccttatcatttagcggtgatgtacaaattccggtcgtattagatcgtgaatacaaagaacctcttaagcttgattgggcagacgatttaaaataatttcacaaagttgtttacacactgatgaggtagtgatactattacctcatcaaaattaattaggaaaaataaaatgaaaacttataaagaatttgctacagaaactattatcactgaatcttctcatggtatggaagtaaagcttggaatggctttagctgaagctgagcgtcttttctctcgtattaaagaacttgctgctgcagtcgatccttcgtcttttaaaggagaccaaactaaagttaaagcacttttagcattatgctctgacgcaggagaaatcgctaaaaatggttctaagatgaagaaacgattagaagatttaaaataatttcacaaagttgtttacacggggttttagtagtgatactattaccctatcaactactgaggagaataaaatgaaacgttgtgaattaattcgaaatgttgctattgcaatttctgcttccgcttttagtttttcaatgtttgttggatttatatgcggattattaactacagcagaaaatgtgttttcgcttgtagtagcatttttaattggtttaatcgctatcgttatggataaaatttctaaaggtgaataaatgagtattaacgaatattatgtttatgccggggattatgcaaatccttctcattttgaaggtaatttaatacctgataaagtttttaatactccttttgaagcgtggagttggattgaaagtaaaaatggattttcttaccgttatgttgaagtaactgattggagaggaactaaataccctaaagaccattattacgtaaatccatctaaggtaaattttcttttattcgcaggtgataattattatccttgcggtggatatgatgatttaattgcgtatgctgaaacagaagataagctgcgtgatatcattaaagaaaatgaaaataaaccagattatgattccaatcgtttcgactggtggcaaatcgtaaatgcccatactcatgctatcgttgatagaggctgacaatgattctttatgctaaagtactaccttataggaatgatattgcttaaattaatattgaggtagctgagactatgaaattaattaaatcgggtggaaccagatgggtactactaacacgtaagtatgctattaagttccctatccccaagacatggaaacacttcgtgcagggtatgctcagcaatcttacagaaggtcagtggaaggggtatgataacaagcacctatgcccgatagcatactcaaacagatttggtctcatggttgtgatgcacaaagcagagccagttgaggataaggagctttttaaatctgatttgcaaaagctctataatgttgatggtgatgaatgtagaacgcttgaccgtgatttctttgagtatgatgcctttccaaagaactttggctactacaaaggtagattggtcaagatagactacggagtgtgataatgattctttatgcaaaagtatcatccattgaaaatggatataaatatgatcaagacgcggctaaagccttgattgatgattatggcgttttaacatgttttgaagttgaaaaggtttacattgaccgttcatcttcacaagttaaattagtgaaggaagaccgtaaatttaatacagtaaattttgatttctttattgaaacggaaaaaggtcctcttgaatatgatattttcaagaatcctttgggtcttgaatgtattgaatatacttacattaatatggtgagcaaatgaatatttgtttaggtactacaattccacagggttacgtaattgatgtcactacctgggaaaatgatggtgacaactataaaactaaaacactgtttggcgtagaagagcatgaaatcttacaatttcaatatcttttaaagaagtttaaaagtagacattctagtactaaagctgaacgttattgtggtaatggcttgttcagcgagcaatcgctttttatttatgaatacttggttgaaggactgttctcagaacaactttatccagaattcattaaaaaggtctttgatatagaagttgatcttggtaataaatctgaagaagatgaagaacgtgtatttgacttattttttgtgaatggtaataaagtgcttgaaggacttattaatattttaggtaatgcttctgagtattatgattatgattttttgcgtgtagttgagagtgttaaatactcttatatagaagaagaaattgttttgccgaccgttaaaatgtttaatttgctttaagaattatttgttattattaactcataccgcactgattaataccctctatcatcaagggttcttgtttgagagcctttgttaataattgggaattagccaagttggtaaggcatagcactttgactgctagatgcaaaggttcgagtcctttattcccagcgcgagaatggtcaaattggtaaaggcacagcacttaaaatgctgcggaatgatttccttgtgggttcgagtcccacttctcgcaccaaatttgcggatatcgtataatggtattacctcagacttccaatctgatgatgtgagttcgattctcattatccgctccaatttaatttactccgtgtagctcagtttggtagagcgcctgatttgggatcaggaggtccaaggttcaaatccttgtatggagactggaggcgtggcagagtggtttaatgcaccggtcttgaaaaccggcagtcgctccggcgactcataggttcaaatcctatcgcctccgccagttttgctgatttagctcagtgtattgaataagtagagaaatttgtgatgaaagaagattatgcaaaatatatttctcagcggaattctgctatacgtagaaacattgaatggaatttaacttttgatgaatggctgcattggtggaaatcaacgggaaattatgataagcgtggaagaaagggtcatgaatactgcatgtgccgtttcggcgataaaggaccatattcattaaataacatatattgcgcaactaataatcaaaatacaaaagatgcgagactaaatgctagatttcctccaaaatctaaaaattttaattttaatggtcgaaaacactcagcacagtccttagaaaaaatttctaaaaataatgcaagtaccttaagtcaagatgatataactagacgattaaaaatattagaaaattttaatatggatgaacgaggttttattaaaaattatgcaaacgctataaatgttagccatactcaagctagaaagtttttaaataaatattacataaaataagaaaatttggccctgtagctggaaggttcaagcaagcgactcataatcgccagatggtggttcaattccacccagggccaccaaattaatttggggagttatcccgtagaggtagcggtgtggactgtaaatccattgtcattgcgactcgggtggttcgactccatcactccccaccaatttggatgtgtagctcaatggcagagcgatcgcctgttaagcgattggttataggttcgaatcctatcacgtccgccaaatccgaggcatagctcagaaggaagagcaaggaccttctaagtcctaggtcgtaggttcgatccctactgcctcgaccaattaagtgaggaaaatatgaaaggtaatgtttatttagtagttcatgatttaacattctattttaatcataatgacactgttatttctgaacgtgtaattaatttgctttatcagcacgcagattatgtttatgtcgaaaacgaatacggtcattggcaatttcttaaaaatcgttcatttggcttagatggttatgaatactttgaacataaagaccttttagataaaattccgttatctacgcaatatcaaaatcacaagtctttatataaatgccgtccaattcgaaatgctgaatctgcgtatgaagcaattgatttatggcgtaaacgccgtgagcagattgatgctttaaaagaatattaagaaaccgggtcgctaccggtaagtcgtcggactgatgttccctgagtaaggaattgcgttaataatctttgcgtttattgatgccctcttacatcacagcagaaacggcgcaccgaattatcgattcgaggaaatatctttgccgtaagccgagtagcgtttttgacggaacgttcggatatggtcgagatatggccttttaaaaatattaagtagcgtcaactgcttaataaccgggttcgaatcccggcgtttcgtacaaacacttgccttagcaggtggaaccccgacaaggttgccgcaaggcttagccccgaccgaaaggttggggctttttagtataaatacagtagtatattaaatccacgaattaaaacaggaaataagatgaaatcatatgctcaatttttaaatgaagcggtgttaaatgaagcatctagcaccgaaattcaagctgtcgcaaaagcagccattgcagcgggtaaatattcctataaagatgcttctgacgaatcacgattccaatttgctcgcgacatgaaagcagaaggatttacgggaaatgcagttagtatggcctggaaaagtctagttgctactggcgctgcttttgcaaaggcttctggtaaacctgctcctaaagcagatcctaaagtcacacaagagaaaaatatcgttaaaggaattatctccaaatatgaagctatccttaaagagcttttagtaatcaaaactgaaggccaaaagctagctcgtgcttatagtttcaaagataacccacatgctcactctcttgagtatgttgaagacatccaaaaaattattaaagaccgcatttggtctgctaaacaaatcaaataacattcttagccctagccgaaaggttggggctttttggtatctaggcctttccaggcctctctagacatcatttagtttctaccctttataatatattatcctatcctttgatttcccctccctgccctagaattccccaaaactttttaaaaattttttcacaaaactgtttacatccctgttcttccatggtactatacaactatcaactactgatacagaaaacaacttggagaacgaaatggataattacggcgaactgttcaacttctttatgaaatgtgtttcagaagatttcggtcgtacagtgaatgatattaaagttatcggtcctgatcatccgatgtttgaaacttatgcggtaatgggcaatgaagacggtcagtggtatactgtaaaggttgtgattaacatgttcactgctgaaagttatgttaaactgtcttctaaagtttaccatgataacgacgaaatcgcagaagaatatttcaataatatgaaataagtttacataggctcatgattgagatattatgagcctataactttgaggaaaacattatgaaacgtaactttagtaaagctttttgtaatagaaataattatcctgaagagctttttgaatctaaggactttaaagagtttaacgaacgttctcaaaacatgcctgtacaatgggtgttggattatgctaaacgtatctttgaaggtgtacgttggttcagtcctgatgatgaagccccatattttcaaagggcatggtctatagtcaatcaagcttatattgatgctttagaaaatattaatattatagatgatgatgctttgttaatcatcgatgagtctattaatagtagtatcgataaatttattgatgaattggacgaagaataagtttacaaactcttgggagtagagtataatactcccacggattataaaacccttaattaactaaaggaaatgctatgaacacactgaagaaaattgttgagtttattcgcactaaacttggttctgctatggctaaaaatctatctgttgaagaacagtatactgctgcagcagcaaaactacttgataagattaaagatctaaaaactgcttctgttaaatctattaatgaagaaaagcgtattcgtgaacttattgtcgaaaagaataagcaggccgaatcaaaagagcgtgaaattcgcaagcttctttcggaaggtcaagatgtaacaatgcatgctaaacttggtttactatatcgtcgaacagctgagcagttgactactaaagctgatggttatgctgaaatgcgaattgaaatcgccaagaaagtagttgagttagatgatgctcgccaagaacttgcagttaaattggaatatatccgtgaaactcgcgccgcgaatgccctcggaattagtactgctgatgatgtagttgaaattgcagcgctgactaaggttgatattgaagatactcttgcccgagttgaaacctttaatggaaatatttctggggttgaaactacctctgccgatgttcaggaatatattaattctctgaaataatgataaggggcttcggcccctattacttggagtaaataggaatgaaaatgcaaagtgatttcaattcaatgtttgaagagttccaaagacaggttgatgttccagaccaattactaaatgctcttaaacgcatggcagaaggacgtaattactattgggggtcttcatatgaaactgatgaaagcctttccggaagattttctagaggtaaaaagtctttaatacgtcctggaatactcattaacagtattgaatcaattcattcattgacgtgtgattttgatgttgaatttactgatttcatttctcctgaatggacggtttgttatttaaacgacgattttgattatctcggtgtttatagtttaagtgacgcatggtttaaacgtaatttacaaaagtcaaatttattttatattgatactactgtaaaatttcagggcaagaaatatttctttactcttatagttgattctgaaacgaagcatgaaaataaacgtattcttagtaaaaagaatatcttaactattgttgatgatctttttgataaatttgtagaaaatcccaattttgaaagtgatttattactagaaaaatttgttaaggaatgtagagaatatgtcaaaaccatcactataccttccaagtaaacctgtgaagtatgaaccaaagcgtcagataatttctactgatgtgttaataggtcctgttatactcatatcatttgtaattctattgattattggaggtgttttagatgttatgactgatattgattctggcgaaatacttgtgttaatgctaattcttccattaatagttccacttttattagtacccgtaaattgggtaggatactggtatcaaggaagacattatcgtaaacgtgtacgtgattggaaagctcagtgtaaaaagattaaaaaggaacaccagcttaagctagatatgtatgaatttgatgaaattatgaaatttgttaaggaatcacgatgcaaaagccaaaactaaataaagtcaaatattcgtttcctgaggcactattaattcttgctgtatcagtatttacagctcttgcgggtagtcttattggattgttaattgactgttttattttaaatatcgacggcacagtaattataacagaggtttggagtgaacttcgttttactatagcgatttcattattttcattttttggtaccatgttatattttcattatgataattttaaaataaattggcaaagaaaaaaggattacaaaatacaattaaaagaatataatagctacatgtcttatattgaaaatgagtcaatgaaagagtttgtgagtgattgtaggaaaattaaatgattttaaaaactcgctggtatgatttagatgatggggatgatggcatttcagttgatagagttgactggaatggttgttccgaagatatgaaaaatttgttgattagggagtttagaatgggatatcaagcagctaagccatttactgtaacagatgataagttcgtatgtattcaaaacggtcgcgctaagttaacgaatgctgattggttcacagataagaaggttcttctgtggtatatcattagtcttcctatatcatcgttcgtattttacttttttataaaaaatccaatggacagaataggagattgggttcttttaactatacttgttaatatttttacagcagcagtattatcaggaatatggcgtatgttcattgaaatgccatggcgtttacgcagacaacaaaagatttttgatgaaaagaaatatactcaaaatttaaataactttatcactgaatgcaggaaattaaaatgaaaacactatcagctggtattatctttatgacagaagataaagatttatttatgggtcgggttactggttctcgtaagcctggaatgatggcacatcgctgggatattccaaagggccgcgtagaaagttctgatttgaatgcactggaagctgcaaaaagagaatgctcagaagagactggttttatcgattataatccagaccttctagaagacttaggtgtatttaaatattctagtaataaagacttacagttattttattatacgattccagtagagcatgagatgtttagaaattgccattgcgagtcttattttgaaaataaagatggcgttatgattccagagatggatgcttttgctcttattcctcgtactcagtggcaatatgtgatgggtccttcactttaccgaataatgaacagcctcttttaatttataaataccttctataaatacttaggaggtattatgaatatatttgaaatgttacgtatagatgaaggtcttagactcaaaatctataaagacacagaaggctattacactattggcatcggtcatttgcttactaaaagtccatcattaagtgttgctaaatctgaattagataaagctattgggcgtaattgcaatggtgtaattacaaaagatgaggctgaaaaactctttaatcaggatgttgatgctgctgttcgtggaattttgagaaatgctaaattaaaaccagtttatgattctcttgatgctgttcgtcgttgtgcattaattaatatggttttccagatgggagaaaccggtgtggcaggatttactaattctttacgcatgctacagcaaaaacgttgggatgaagcagcagttaacttagctaaaagtagatggtataatcaaacacctaatcgcgcaaaacgagtcattgcaacgtttagaactggcacttggaacgcgtataaaaatctataaagttgtttactttctcctagaattgtgatagtatattcacagttacttggagggataaaatgactcgtattaatttgactttagtatctgaacttgctgatcaacatttaatcgcagaataccgtgaattgccgcgtgtttttggtatagttcgtaagcatgtggcaaacggtaagcgcgttaaagattttaaaatatcttccgagtttattttaggttctggtcatgctacgttcttttacgataagttagaatttttgcgaaagcgtcaattagacattataacggaatgcttaaaacgcgggttcagtataaaagatactgaagttcctgacatcagcgatattccagtagaatggaaaaatgattataatccatgcaaatcagctattaaattgagtcaacaacgacttgatgaaaaaattttaatgaaaccacattggtataagtattacggtaaaaatatttacatttaaaggaaacccatgaaaacatatcaagaatttatcactgaagcagctattaattctcaaattattgctgaatcttttactgatcttttgaaatttaaaaaaaggtcaaaaaatcactgctgtattggatgatggtacagaagttgagatggatgtacaaggatataattatgcagtagatggaaaactgtataataaatctcatgctaaatttgattcatttgacgactttgttaatacagttgaagatgaaaaaactcgtcgatccattgcaactggtgatgctaaggttcttatggcacatggtcatgaacgcattcgcgctaaacagaataaaatgggtgaagataattttgcattagttggttatcaatctggtaaacaaacctatggttatcagcgtactgctaccatgtataataaaaatggtaaaattgcctttgtgaatagtaagggttctattcagtacgttaaatcgttcaaataatatgggaacagcctggacctcatgattctatgaggtattcccgccaacctgtgataaggtcgagccaaagcgcggtaatgggtaatgcaggaatggacaactcatgtgccatggaatggcccaaaaattaagagagaaaatatgagaacatttttaactggcccgtatctatccctgatgaatgcttttacacaccattctgatgctagagtagaagaaatttgtaaaaacgaatatatcccgccatttgaagaattacttaaacagtactgtacacttcgtatagatggtggacgtcaatccggtaaatcaattgctgtgactaactttgctgctaattggctgtatgatggcggaacagttattgttctatctaatacttcagcttacgctaaaatttctgcaaataacattaaaaaggaattttcgcgttattctaatgatgatatacgttttcgtttatttactgattctgtgcgcagttttattggtaatagaggtagcaagttcagaggtttatcgctttcacgaattttgtatataattgatgagcctgttaaatctcctgatatggataaaatttacgatattcatattgaaactgtgcaacattgctgcaatagtaaatgttgcattggtggtattacttgtccacagtttttcgtaatcggaatgcaatgatgacagacactcagcttttcgaatatctttatttttcgccaaaaactattaaaaataaattggtgaatcattttgaaattttagcaaataataacattttgagcgaattttatcccaagcaatacaaattacaaaaaggcgtattcaaaggatgcagagttttgtgtactgctcctaatgcacggctaatgaataaaattccatattttaccatggaatttattgatgggccttttaaaggactaatcacccaaagtttaatggcatatgattctgagccatttttaattaaagaacaatcttggataaatttattttctaattgaggtttatatgaaagcatatcaaattcttgaaggcacacataaaggtactatttattttgaagatggtattcaagcacgaattattgtctctaaaacctttaaagaggactcttttgtagacccagaaattttctatggtttgcatgcccgtgaaattgaaattgagcaacagcctacagttaaaattgaaggtggtcaacacctgaacgttaacgttctgcgtcgcgaaactctggaagatgcagttaagcatccggaaaaatatccgcagctgaccatccgtgtatccggttatgcagttcgctttaactctctgactccggaacagcagcgcgacgttattgctcgtacctttactgagagtttgtaatggcaaagataattattgaaggttctaaagatgtgctaaatgctttcgccgagtggtttagtaattcaggcgaacagcaatttaatgaagcctggaatatgggtgatattgatggaatttatcctacgacagaaatttctgttcaaggatatggcattcatgaacctattcgtttagttgaatatgatttatgtactggtgaggaagtcaaatatgattgaagacattaaaggttataagccgcatactgaagagaaaatcggtaaagtgaatgctattaaagacgctgaagttcgtttaggacttatctttgacgctttatacgatgaattctgggaagcactagataattgtgaagatgatgaactcgcgaagaattatgctgaaagcctcgatcagttaactattgctaaaacgaaactcaaagaagccagtatgtgggcttgtcgtgcagtgttccaaccagaggaaaaatactaatggctcaattaagtgcagggtttggttatgagtattatactgcacctcgtcgtgtatctgccgctcctaagaaaattcaaagtcttgatgacttccaggaagtagtccgtaaagcttttcaggactatgcacgttatcttaaagaagattcacaggactgtctcgaagaagatgaaattgcttactatgagcagcgtcttgaacagctcaaaaacttacatgaggttcgtgcagaagtttcaaagtctatgaataaattgattagatttaaagaataactgtttacttttcctcttgactgtggtataatttttctatcagttaagaggagaataacatgactatcaatacagaagtttttatccgtcgaaataagcttcgtcgtcactttgagtcggagtttcgtcaaattaacaatgagattcgtgaggcatcaaaagcagcaggagtctcatcgtttcatctaaaatattctcagcatcttcttgatcgtgcaattcaacgggagattgatgagacatatgtttttgaattattccataaaataaaagaccatgttttagaagttaatgaattcctgagtatgcctccgcgtcctgacattgacgaggattttattgatggggttgaatatcgtcctggacgtttagaaatcacagatggaaatctttggcttggatttacggtttgtaagcctaatgagaagttcaaaaacccgtcacttcaatgcaggatggcaattatcaacagtcgtcgtttaccaggaaaggcttctaaagcagtaattaaaactcaatgaggtaagcatgagaaaagcactactcgctggtctattggccatttcaatgatggcacatagctccgagcatactttcagtaatgtccaactcgataacatgcgttacgcgtatcaattcggggaacaattttctaaggatggaaaatataaaacacacaaaaatatccataagagcggattaggtcatataatggctgctattttatggcaagaaagctctggcggagttaatttaaaatctaaaccaaagcatcacgcctacggaatgttccaaaattatttgcctactatgcgagcaagagttaaggaacttggttataatatgaccgatgctgaaataaaaagaatgttgaataaacggtccaattcagcttcctgggcgtacattgaactttcttattggttaaatatacataagggcgatataagaaaagcaatatcctcttataattcgggatggaatgttaaagcaggttctaaatatgcttctgaagtcctagaaaaggctaattaccttaaaaataataaacttttggaaatagtaaatgactaaaattttggttttatgtataggattaatttcattttctgcgttagcagatacatcatatactgaaattagagaatatgtaaaccgcactgcggcagattattgtgggaaaaataaagcatgtcaagctgaatttgcacagaaattaatatatgcatataaagacggagaaagagataaatcaagtagatacaaaaacgatacattattaaaacgatatgctaaaaagtggaataccttagaatgttcagttgcggaggagaaagataaagccgcttgtcattcaatggttgaccgtttggtagattcttataatcgaggattgagtactagatgattgtaaaatatatcaagggcgatattgtcgcccttttcgctgaaggtaaaaatattgcgcatggatgcaattgttttcatactatgggttcaggcgtagcgggtcaattaactaaagctttccctaaaattttggaaactgataaattacagactgaatggggtgatgtaactaaactcggttcttactcagtctatgaaaaatactttaggactcataaagcttactgcttcaatctttatactcaatttcaaccagggccaaattttgagtattccgctttaatgaattgtatgttagaattaaatgagtttggtgaaaataaactgattaaacctacaatctatatgcctaggattggtgcaggcataggtaaagggaactgggatattattgaggggattttagatacatattcctctaaattagaaattgtgattgttgattgggaaccgttattatgaatatacattatccacatccgtatgacccaaagaataaggcagtaattattcgtcaatgggaacgcatttgccgtactaaatgtccaattaatagtccacatgatgtagataaagactacattggaacattcgttgaatatacctttattgataagaaaggtcgtaaacagcatgtagaagaatactgcttaaaggtgacatggttatgagccaaactagtattcttaaaaatgcccactgtgaaaagtgtaaatggccggttgtttttgctttatgcaacgatgaaatggcttgtgatttcgattattggtgctattgttctaataaaggatgcatcaatcataaaggtgaaggattttattcgggattttatccttatccagatttcgttaaagaaggtaaaccgaaatgaatagttctgagttacaatatgaagtgttacgtgaacttgataatttaattgaactcgctgttaataaaggttttgccattggaattggtcaaaaagatactgatcatttaactgtggaaatatttaagcaaaagcgaattattttaaaacttttggaaattaatatatgagtttaagcaaagaacaaaaagacaaactcttttctcttatccacgaagttatggataaaaacagtgaattggaaaaagtttgtgatgaatgcggtccttttaatgcaaatgaatacgaagaactttctaaagaattcgataataaagaacaagaactcattgattatataaattctttatgattactcgcgaacaaaagaacgaaatattatttttagttggtgaaattattagtttagaaaaggatttgtcttttgaattatcttctgattatggagatgccgaaacatattacgaattagtaaaatctatcgataaagctgaaaatgatttagaaacatatttagaaaatttaactaaggactaaaatggcgagtttaatttttacttatgcagcaatgaatgctggaaaatctgcttctcttttaactgctgcacataattataaagaacgcggaatgagtgtattagttcttaagcctgctattgatactcgcgattctgtctgtgaagttgtttctcgcattggaattaaacaggaagcgaatattattacagatgatatggatattttcgagttctataaatgggctgaagcacaaaaagatattcattgcgtatttgtagatgaagcccaatttttaaaaactgaacaagtacatcaattgagccgaattgttgatacatataatgttcctgttatggcttatggattaaggactgatttcgctggaaaattgtttgaaggttctaaagaacttttagcgattgcagataaacttattgaactaaaggcagtttgtcattgtggtaaaaaagcgattatgacagctcgattaatggaagatggaacaccagttaaagaaggtaatcaaatctgtattggtgatgaaatttatgtttctttgtgtagaaaacattggaatgaattaactaaaaagcttggttagtgcaaaagttataaataggtttatctaactaaaggggtatatatgctacaattaactgaaaagcaacttcgcaatcttactgtgcttcaattagatgaaattcgtagggaagttggaaatatcatttcagctttgcgtcgagaagtatcactcaaccaatctccggcagactatactagattgcgaaattttgaaaaataccttgataaagttaaggccgtgcaccggcataaagtaaatacaggacaaaaatgataggaggcctttatggccttaaaagcaacggcactatttgccatgctaggattgtcatttgttttatctccatcgattgaagcgaatgtcgatcctcattttgataaatttatggaatctggtattaggcacgtttatatgctttttgaaaataaaactatagaatcgtctgaacaattctatagttttatgagaacgacctataaaaatgacccgtgctcttctgattttgaatgtatagagcgaggcgcggagatggcacaatcatacgctagaattatgaacattaaattggagactgaatgaaattcagcgacttttcacaaagtggaaaaccttcaaaggcagatgaatacttaggtttattaatggctgcacaagcttattttcattctgcacattttgaaactaaaagttatgctagacacaaagcatacgattttattttctccgagttgccagatttgattgataaatttggtgagcaatatttggggtattctggtagaaaatacacgccttcaattccagatgccagtaaacttcctaccgacacaattaaaatgattgatcgcatactagaccaatctaacagcatttataaagaaatgcctccagccattcaaagcacgatagatgatattactggaatgttttaccagagtaaatatcttctttccctcgaataacgttagtctccttcgggagacttttttcattttaccggtttactttccatttgagctgtgatactatacaaccatcggataaagaggagaacatcatgaaaattgaagcacttaatcaagaaggaaatatctacgtcatcattaatggtgattttttcgtcgacatggatgaagttactagtgaagaacttgtagaacttcttaagaaacgttataatatgtgtgatgaagttgcaactcacatggcgtgtgcaatattctctctttcatatgtggtggaataatgattagtatcgaacaagcggataaaattaaggaattggtagctttaattcgtaaagcagatgaggaacttagtgactttgcttggttttcatcaggcattgcaaataaaggcattgatgaacttgaagctaaagttgataatgctttagaagcgttagatatgtttcttgatgaaattatcgatcataatacgagagtttaagtatgctaacacgtgaacagtttgaaaaaatcattaaattagcacgtgatattgaaatagattcataccaattagcagttgagcattgtgaaggatattcatacgacggtatagaagcagctaaaaaggatttggataaatccaaagctaagttagttcaatatcttgaaatgattaggtggaataatgaaaactgaaaagcagatgtttttaatgaagctaattgaagaatatgctaatgcagtttctgactatgagtattctgctcgggaaagaggtacggctttcgctaaagaagaattgaaaatcatggttgatgctcatacaaagcttcagaattttatcgaaaacgtcatttaatggtttacaagttggcaaggttatggtatagtaatcttgtcgactgccaaggagaagagaatgaaagttttgtttgttgtgtatgtgatgattcaatataattacccaatgtttacttataatttggtaaacaacattattgatatgattcagaggagtatgtaatgacaagtgagcaggcttttaaattaagagaattaattgagacgtatagtaaagctgttcatacatcaacaattattgatgaatcagctttctccggacatgctaacaagattaaatacaaaactcttatggaagaagctaaagtaaatcttgattcttatattgaaactttaattggtaaataatatgaaagctgtaattgaaacaactgatttgttcggtgacctagttatcgaaaaacgcggtaatgtatacgttctgacgcaggaagacgatagtattactattcttcctatggaactggctgcgattttatcttatgctcccccaggagttaccggtgtaactaatattacaggtgacctccaagttcgtttttatcgtggcctttacggcggtaatattgaaactgaatttatgtgtctttctatcaacaattgggcaacattcgttgccaaggtgaaagaattcttagaatctgaaacagccgaaacacccgaaaaggctaaacttcaatgggctaaagatcgcggtgctaacattattaatccagtagctgcaaactatactacgactttggatgtcaagacttcttatgaagatggcgatgtcgtacttgttcgccaaaatgatgattctcgagcacatattgtcacatttaccaaagacgaagctattgcgctaaagacttatcttgattctgtcattccaactatgatttcaaagtgaggaaatatgtttatttcaagtggaagtggtttaattcgtgttgaatttaaaaatgacatctttcttattcaaggagatgatattattaaaatgagttatgacgaaatcaagaaaatttgtcatgctcttgaaagtcatggaaaagtgaacgctgttattgatattggcgatttatgggtgacactttatgaagtatccgaaggatttaacattgaagatgaaaataacattttagctattgataaaagaagtgatttgtttgatgtattaaaagtttatgaacagtcaaatggcggaagaaaagctgcattgatttatcaaaaaccgcattcatgtggaactgcttcaatcatttcaaatattgaagatgaagttgatacttatatgtgtgttttaaaagctggtggtgaccgtcatccggattttatttctattcgtcaaaacaatggagaaatttcattatcaaaatcagaagctgaagctatgattaagtatttaacaactgttacgccttcaatgaaaggataattatgattattaatgaaaactcttggcactataaattattcaaattgtttaacgatgaatggcaacgacctaagacactatgcgcatatttttggtctattgccattcctacatttttcgtttctatttttggatgtgctatactcgtagggctaacaattatttgtgcagaaagcctacaacgttggcttattttcggtagtttatggactcttcttccatcagcatttatacttgcgcttttggttgttttacttattatcggttcatttgttattcctgcacatttgcatgaaaaatataaagattataaatggaaaaaggattatgctttacacatagaaaatattgatagggcgtataaaggtttacctcctattcaacccaagaaatcggttatcgttgaatttttaaaagctcgtaaagctaaagtatgtcctgttattgaatataaggctgaatgatgaaaacagtaatgaaaagctattttggtagtcatctttatggaacttctaccccagaatctgatgtagattttaaagaaatttttgttcctcctgctcgtgatattcttatcggaaatgtcaaagagcacatgagtaaaaacactaacaacacatcatctaaaaacactaaagatgatattgaccatgaactatacagtcttaaatatttctttaaattagcagcagatggtgaaactgtagcattggatatgcttcacactccacctgaactagtagttaaatcagatttgcctgatgtgtggaagtttattcaagacaaccgttctcgtttttatacgactaacatgaaatcctatttaggatatgtccgcaagcaagcttctaaatacggtgtcaagggttctcgtttggctgcattacgtgatgtattgaaagtagttaatcaaatccctgagcaatgggttgattaccaagaagacggttccattaagcagcgtcgcactaaagttgaagatattaagcatcgtcttctagaaaacgaattctgtgaatgggtgttccataatcatgagaaaacaggtccacaaacgttctatactgtattgggtcgtaaatatcagacaacgctttctcttattgagcttaagcagtcactgaacaaattagatgctgaatatggtgaacgtgctcgtaaggccgaagccaatgaaggtattgactggaaagctctgagtcatgcttgtcgtggtggacttcaactattggaaatttacaaaactggtgacttggtttatccactccaagatgctccatttattctcgacgtgaagttgggtaaacatccatttaaaacagttcaagagtttttggaagatgtggtcgatcaagtagaagcagcatctactgacgcttctaagaatggtatgcctaaaacagtagacatgggtttctgggatgacttccttgagaaggtctatcttgaaaaccatcgaagttattataaatgatagggagccttcgggctcccttttttatttcaaaaatttttcacaaagttgtttacaagcataaagctttatggtactatacaactatcaactgatacggatttggagaataaaatgaaaactgtaactatcaataagggtatctacttcggtaaagaaatctctggaacttttgagctcttaggcgaatggttcccagataatgctccagtagatgcgcaaggagatggtaaagtttttgttgaaattgacggtaagcgtcgcggtgtttgggtttacaaatcagacatttcatatgatggtgtaaaagttgaagaagttaaagaatcgtatgaagatatgaaaacccgcattaataaaagatttaatgttatgggaatgatgacgaatggtattattaatggaaatattcgttcattaattatctctggcgcggcaggtataggtaaaacatattctttagataaagctttaaataaagcaaatgatattggatacattgaatataaaagcattaatggtaaaatctctggtatcggtctttatgaacagctttggaataatcgtgaagagaattctgtccttttgattgatgatgtggatgttttctctgatatggacattcttaatcttctgaaagctgctctggacactggagagacccgtaaagtctgctggagcaccgcatcttcttacttagaagaaaaaggcattgagcgtgagtttgaatttaaaggaactattgtttttatcacaaacgttgacattgaccgcgaattagaccgtggtactaaacttgctccacatttacaagcattagtgtcccgctcagtttatttggatttgggtgttcacactaatgaagaaattatggtcagggttgaagatgttattctttcaactgacatgatgcaaaagcgcggtctttctgatgaagaaacttataaagcattatcatggatgaaagtcaatgttaatcgtttacgcaatgtttcactgcgtactgctctttatcttgctgactttattatgacagacaaaaacggttgggaagaaattgctgaggttactcttctgaaataattcataagaggatttctatgacaaaaaggcagttcagaaatagattatatggactgccattaaaaagatgactagaattaaactggtaaatggaggtaatgatgttatactcaaaggctcgtgaaatttacgaaactaaaattaaagaagcagtatttcagttcgcaacaacgatgcgatggacaaatgattgggagtattcaaaaaatcataagaagcccttggtgacaagaaaggctcatatgttagtgttaatagaccgtgagcagattaaagcccgagaagccctccagaatcataaaaaggctgcctttgaatggtttatggataacattgctcctgagactaagaaagcagtgagcgcgtggttcagtggaaaaaattgtgaaagaagtttcttttagttgtttacaagaccgttcctctgtggtactatacaactatcaactacggaggaacagaaaatgaatgctaaagatattttcaacttggtaaactacaatgatggtaaatttaaatctgaagctcaaagcaagttctttaatgacatctcaattggaggtgaaatcacggttgatggaggacaaatttacaaatctcgttggaattggatcgttattatcgatgagattggtattgtagaaatttacaaaaatacgaataaaaatcgtacattacactggtctcgtgatactaacgaacagtacaaaaaggataaagcatctaaattatctcgtgtaactcaagaagatattgagttcatcaagaaagatattttgatgtatgataacttaattgttgaagagcaagctgttattgataaatttgacgagattaaagcttctcgtgaaattcctgattttatgaaagaatcagtaaatgaacgatacactctcatttcagagcgtattgaaacttacaaaaagcaaagagctgaacgccagaatactcttcggaagtttgaagaacggttaaagacggtactcgcataaccgctttataccaaggatggtataatggttctaagcccttttaattgagattattatgaaacagttgataattaaaagattgaatttattgatatgttgtttatgtatagtaattgcatatggttattacgcaattaatgattatatgcattataaagattatgatgttactgtagttaatacccttacaggaactcaaggaaaggggtctagtttatcgtttattgccgtatatgaactcaaagacggttatagatttagtgaatatatttccccagagatgtattcatcaatagaaaaaggcgataatattactgtaagtttacgtcctttcgacgtaaaacagacattgtttgataatattgtttggttctttggaatggtattagttcaatctgtatgcggtgcttatatagtcttttccatcatattctgcgtatttagtaaaattgaaattgagtgaggaaaatatgtcagtagtaattaataatgtcaatgcagtaattaaatctttagttaataaaaattgaatgaatggactgtacttcgtcgtggagagccagataaattttttcatagatttaacccaactttggatttgaatgttattgacagagatgttcatgcagaaattttagataagtttaaagttgatattggatttggattagaaaaacatttacagcgaacaaacgggtctggaatgggtttatctaatcgcattatgaaagcccttaataaaattggagcattgtctcgtattaatgcaagtgaaattcttcgcaattataataaaggctatgatctttacggtcgactaatgccgaaattatcatttgaccaaatgatcgcagatttgtgggaaaatcaacgacgattattagcattaggcgctcgattagctaaaggtctagataaacaaatgatttttaagaccaataatacagaagaccttaaatgctttaaatttagtattcgcgaagatgattattacatcagagctcgctctacagattatgttaatatgggacatcatctctgtttagcttttgaagttttaaaagaagccggaacattagaatattcgtctggtgcaaaatgcccgattggttcaagttgtattttaatttatcgcccggatgaatccagttcatctaaattacctacaaaacctgtaccagttcgtagtaacgaaaaacattctgaacaaattgattattttaataagcaaattgaagagctgaatatttctattcaacagtatgacgatgaaattttcagactatctggattgagtagtaaagctaaatctgagcgtgaaaaattaattaaaattgttgatttacttaaatcttaaggaacaccatgaaaactcgttctcaaattgaagatatggttcgtaatgccagctatactcgtgatgttatgacatttttgtgccaaaataatttagaccctgataaagttaatcgtgatattcactttaagtatatgaatagcagtgaatggttacgtcattttagtaaagcgggatatattacacaaatgactgctcgtgagcagctcaccgatttctgtaaaactattgattataaaaatcctctatttgttcaaggcgttggtcaaagtaaggtcgatttatcatctggatttttcaatccaaatcattatcgtattgaatggagatttattgctctattccgtagacaattaaagcaaattttgtctactgctagtcgattaaaaggttctgatattaacttaaagaatcttaaatttgatggttatactcttcagatggaagtaagaccattaaaggaaaataatagaactgcacgaattagctttaagcctaatactaaaaattctctttcaatttgtgaatgccttaaatcacagttgacagaagcatttaagtatatggatgttgttgctgctgttcaatctaagattttacctcgttttgaacgatttaaattagacacaacaacatatgaacttgatatggttgtttcatttaaatatgattttttgagaaaggacgaagtcccgcaagagaaaaagcaggaagtgcaagataacttaaatttatccaattacttatcaaacgatcctaaattttggatgtatagctcaagcaatatagatgcatgtaaacttaataaagtgagttttcttcctactgaaaattcaaattttaaacctgtagaaaaatggcacgctgacgcgattgagaagtctcttaaggcagtagatgatgaactcgttaaagcgaccaatgaagtgctagaagctgaaaaggcgttagaacaagctcagtcaagggttcaaaatctgacaaagcaacgttctaaactgaacaatgcactaaatgcactgaactagtttactttgccacaaggatgtggtataatgttcttactttctactgaggagattaatatgactcgtaacgaatatatcaaatcattcaatagcgttattgatgataaagctataccgatgtttggtcaaaatatcgttctttctattatcaatcaatggctcaatagtgttgatgcaagtattgtttcttctactaaatttattcatgaaattcgtaaaatttctagccgtgtagataaagatgttatcaagaaaacctttaaagagtctcgtcttctttcatatttggttaatcgggatattcttggtaattttgggaaagaaattaaacgaactaaagatgtagtaggatataattggttcggtgatgttaattcttatcatcttaataataaagaagaccctgagaatatttttactcgtcgttggattagtaatttcagacttttcaaaggacaaattctaaaatcagcttctaaattatgttatggcgattatcgtcaaattcatcctttggcttctgatatgattatcgtaaaagaatatgagcttgataaaaataaagtagctatttttgtgaattatggattttttacaccagaaactaaccaaaagaatattaataaatttttctcaattgctagcactataactcgtcagttagagactgcattactttgtatggaaacagtagaaaatattcatacatatccttttaagaatatatgcggatgggaaggatataaaattgtaattagtcttcgtgaagtgaaatgtgcttattcacctactagtaaagaaatttaccaacaaaaatgtgatgaaattgtgaatactcctaaagaagaaactacccttgaggaactaatggaatgtcttgatgattcacctgaaccggcagaaattcgtccagaagttattgcactagaaaaagcttataaagaagttctagaaatttctaataaagcgcagaaagaatatgagcaggctaaaaagatttgggaagaatctgtcaatcgcttggatcgtcttgaacaagctttacagttaattaagtaatttaaagccaaggatggctcggagtataaatcattaaccaagtgagaagaacatgaaaactcgtaagcattatattgattattttgacagtcttattactaaacaccgtaattatcaaatcggacacagagcagtaatcaataatattcttcgtgattttcttcaatatgttggccaggaaaatcatatctgtaaagatactcaaaacgcttattcttattcggtaggcaatttgcttgaatggtttaaacgttctcgtatgttatcttctactgtagctcgtgataacattgaaaactttatgaagccgagcttcattaaatctgcgacatctataaccgatttggttgaatttactattgttaacgatgttaaaaagacccatttggctgattggttatctaccattcctgaaactaaatttgctgataagttcgcttgtcaattcaatgaccaagtgaatatgctttttaagcatgctcgtaaactatttaccgcgggcgatgaccgtacaaatacagttcatgttaaggactgggttattgctgatgaagtaacacacaagccaggtggttcatcagtattaattaatatccaggttccttattattactcacgtaatcttggcaccatgacagctaaagaaattaataagcacaacaaaactattcgttcgttgtcttataaactccgcatgatgttaaaaatcatggacgtagtggaaatgtatgacgaaaccgaagataatggttcaatgttatacagttcacgcattctaattaaactgaagaaccctaatacatataagacagttgtaaaagagcctaaagtagaaaaggttgataatctgagtgaagaacgtgaatatctcaatgcccgtttgattgaagttgaagcccaaattgcagaacacaccaaattgttaaaagctcttaatgcaaaagcaaatggtttacgtaatgctattgaggtattgaaatgaaaaagcgtttattagaagacattgcagcttcaagtaattccagtttaattaaaattattatggctggtgaggaagatgatatggaaatgcgtggaaagattcacggctgcgacgatttagattttaaacctccagcatgggatgctattatggctatggttgaacgacgtgaaagagcttctaaaaacgttcctaattgccctgaatgcggtactgaacaggtgcaattggtccattggcagactagtaatcttcgttataaatgtcgccattgtaaacaccgatttgaccgagaagaaaatgaccaagcgtaaagaatatatggaggctgctgaaaaggcagtccgtgaattagcaatagcttattataatgaacatggtaaatttcctgatagatacagcgtgcttaaatctgctttaactcgttcatataaaaatatgctatcagaagtaagtgatattatatacaaacataaagaacaaacgggccaaagtcttgattacgacgagacttttaaacaagtactaggaattaaggaataatatgtttaaagtatatggttatgatagcaacattcataaatgtgtgtattgcgataatgcaaaacgtcttttgaccgtgaagaaacagccgtttgaatttatcaacattatgccggaaaaaggtgtttttgatgatgagaaaattgctgagcttctgactaaactaggtcgtgatactcaaatcggcttgacgatgcctcaagtatttgctcctgatggaagtcatattggtggatttgaccaactgcgagaatattttaaatgatgctcgaaggaactgactatattcacgattaccgcggaagcgcggtatatgtaggtgatgaagttgcagtttattatgggtatggaactttgatgacagccaaggttattcaaattaaaaataatcgtgctaaactcgaagtttattattctaatggtgaaaagtctatttctaagtggaaatacggcgattgtatggttaaattggggtaaatatgatttacgatattaatgtatcacgagctccgtcaatggttactattcctgctgaagaactagatcgtcttcataaaattgaagaacttctttgggaaattgaatgtgccctgccatcaggactagaatcctggattgatgatgaagaacttaataaattgcgaaattaattggtgaaaaatgactattgaaaataaattagatgttgatgcagttctgagcgaaatcattgaagaccatgatgcattttcagaaaactatgatttcgatttttccgattatcttaaacctgtcgaaatagaagactgggtacaagacggcaaatgtcaatatcgtcagtgtgtttattttagtccaaaacataatgtacatgtagcggtaaatgaatctcggtcaggttcttatcattctgactggtattatgcagttccgactgttgaactagtcgagccccatgaacgtgtagtaactcagacagtacgagaatggattacgctataaaaccttggtgggcggctagatgggaaactgtagagccaaagccggaagaatcggtttacactgatgaagaaacaatatataatgaaccaacgataaatgacttaattgatatggagatgggacatgattacagtagataagtggtttagaattaatcgtgctgatacagggctgtgtaattactggccggaacttagtgcaggcactgtctttaaagttcgtgaacttgcaaaagaatgtgaagatgatatagagcctgatactggaattattgaaattgaactttctgatggaaagattattaacatctacgataagccaattacgtattggtgcttgtggaatactgaatcagtagaaaatggcgaaattgaagaagttgtagatagaactaatcaagttgttcagaagcctaaagctgattttcaaggtgaacgtatttcatacgcattagctaaattagctgcacaagaaaataacgatggctatgaaggaaatttgatgcaagctgcggcagaatatattgaatggcttgaaacccaaatttctttttctgaccaaaagattcggcaatataagcgattgaatcaaatgttttacaatacctgaaaataataaatacccttatctatttaaggtaagggttttattatgttattgactggcaaattatataaagaagaaaaacagaaattttatgatgcacaaaacggtaaatgcttaatttgccaacgagaactaaatcctgacgttcaagctaatcacctcgaccatgaccatgaattaaatggaccaaaagcaggaaaagtacgtggattgctttgtaatctctgcaatgccgcagaaggtcaaatgaagcacaaatttaatcgttctggcttaaagggtcaaggtgttgattatcttgaatggttagaaaatttacttacttatttaaaatccgattacacccaaaataatattcaccctaactttgttggagataaatcaaaggaattttctcgtttaggaaaagaggaaatgatggctgagatgcttcaaagaggatttgaatataatgaatctgacactaaaacacaattaatagcttcatttaagaagcagcttagaaagagtttaaaatgacaattgaaaaagaaattgaaggattgattcataaaactaataaagaccttttaaacgagaatgctaataaagattctcgtgtttttccaactcaacgggaccttatggctggtattgtgtctaaacacattgccaaaaatatggtcccgtcttttattatgaaagcgcatgaaagcggaattatccatttccatgatattgattattcccctgctcttccatttactaattgctgtttagtagatttaaaaggaatgcttgagaacggatttaagcttggtaatgcacagattgaaactcctaaatcaattggagttgctactgcaattatggcacaaattactgcacaggttgcttcccatcaatatggcggaacgacttttgcgaatgtagataaagtactttctccttatgttaaacgcacctatgcaaaacatattgaggatgcagaaaaatggcaaatcgctgatgcgttgaattatgctcaatctaaaacagaaaaagatgtatacgatgcattccaagcttatgaatatgaagtaaatactctctttagttcaaacggacaaacgccttttgtaacaattacatttggtacgggaactgactggactgaacgaatgattcagaaagcaattctgaaaaatcgtattaaaggtcttggtcgtgatgggataactcctattttccctaagcttgttatgttcgttgaagaaggtgttaatctttataaagacgatccgaactatgatattaaacagcttgctctagagtgtgcaagcaaaaggatgtatcctgatattatttcagctaagaacaataaagctatcactggttcatctgttcctgtttctccaatgggttgccgtagtttcttgagcgtatggaaagattcgactggtaatgaaattcttgatggacgtaataatcttggtgttgtaacactgaatcttcctcgcatcgcgttagattcttatattggaacacagttcaatgaacagaaatttgttgaattattcaatgaacgaatggatctgtgttttgaagctttgatgtgtagaattagttccttaaaaggagttaaagcgactgttgctcctattctttaccaagaaggtgcattcggggttcgtcttaaacctgatgacgacataattgagttatttaaaaacggtagaagttcagtgtctttaggatacattggtattcatgaattgaatattcttgtcggtcgtgacattggacaagaaattttaactaaaatgaatgctcgtcttaaacagtgggctgaaagaactgggtttgcttttagtttgtattcgactcctgctgaaaacctttgttatcgcttctgtaaacttgatacagaaaaatatggaagtgtaaaagatgttaccgataaaggatggtacactaacagtttccatgtttcagtagaagaaaatattactccgtttgaaaagatttctcgtgaagcgccatatcatttcattgcgacaggtggtcacatttcttatgttgaacttcctgatatgaaaaataacttaaaaggtcttgaggccgtgtgggattatgctgcacaacatttagattattttggtgttaatatgccagtagataaatgttttacgtgtggaagtactcatgaaatgactcctactgaaaacggatttgtttgttctatttgtggagaaactgatcctaaaaagatgaataccataagaagaacatgtggttatttgggaaatccgaacgagcgcggatttaatctcggtaaaaataaagaaatcatgcatagggttaaacaccaatgaattatgatagattttatccttgcgattttgtgaatggccctggttgcagggtcgttcttttcgttacaggttgtttgcataaatgcgaagggtgttataataaatcaacatggaatgctagaaatggtattccattcactggagagacactagagcaattaattgaatgtttgaataatgattatatagaaggattgactataaccggaggtgaccctctctatcctgataaccgagatgttattcattgcattgttcaaacggtaaaaaatctttatcccagtaaaagcatttggttgtggacaggatataagtttgaagatattaaacaactagaaatgcttaaatatgttgatgttattattgatgggaagtatgagaaaaatcttccgactaaaaagctgtggcgaggatcagataatcagcgactttggtcaaataccgatggggtgtggacacatgattaaattgaattacattatggatactataaatgatatgatttttcattttggtccagaattttattcgcaatatagtttagtgcttatcaatgcttggttaatcaattaagggtaaaatatgtataaatttcgtaaaggtttagctgattttcttacaactgtaacgttctttttgtttatggcagttggagctattttccttattccttttattgttgtatttttcgttattagtttaatttctccagaaaagggcttatcttctagtgagttcaataagcgtctggataaaattactaacaagctgaatgctgctcttagtaaggaatagttgtgaaacaaaataagattgaagtctatggaattccagatgaagtaggtcgttgtcctggatgtcaatcagttacaaaacttctaaaggagcttaatgctccttttactttctataaagttcttacaaataatggtaagattgagtatgatcgtccgctgattgtatctcttgctaaacgcgctggattcacatctcttaacattcgttatccggtcattttcattaatgattctagacaaaagaacattaaacacttcaaagaaactctcatttcacttggatatgataaagatatcatagaagactaagacgggccctctgggcctttctttctcacattctgtatattaccattctaagctatcgttcccttcttatcattccctaaaataattttcacaaagttgtttacaacaagttcaaaccgtggtattattaacatatgaattgcctttgaggatttgatatggttgtggttgataaagaaattaaaaagggacaatattattttattaatggtaatgttgttcgtgttacttacgtaaatggttatgatgtttattatcttatacttaagttacataaacacatgatttgtgatcgtgctgtatttagttcagttgctaaggaaattaaactccatgggtaaaacgtatcgtcgtaaagacttgaaagttcgtgattatgactatttcggaaagcgtaaagctcctgatgggataagtcataaagatatggttgaaaacatttttcgttcagataaatggcgacgtatgcgaggtgttgattcagaggttaagaatgaattgaatcgtcaactgcgtggtgaagtaagaaagttgaaaaaatcagtttacattgacgatgattttgattataatacatctcaacgagttgctaagcgcaaatcaaacgaatgttatcgttacagctgaggaaaatatgaatatcaaacgaatgctttttaagcaggggttatacactttaaatgttgctccaaaaggcgatacgaccaagtggtcagtaaatgactggattaaatttattgatgaaaatggtaattggaaaatttaaatgaatcctgaatctaaattatcgcaacgaattgctgaagctcgtcgccagttctttgaaaatatgatagcccagggtattgatgacgaagtttttctgaactggttttggaatcacaaatattcaaaatgcgcaggagcaatattaatatcagccgcaatgatgtacgaaggctggaagggtgccaaacagtttagctaagggcttcggccctttttggataataaaattttaacgcaattgaggataatgtatgactattcaaattaaaaacgccatcaattcttatgcatatgataaagtagtttctttgctagaaaaaggcgatattgtaactcctcaaagtttggataaatgggaaaaagagcttcatcagacgatgaaacagaatgatcagaagattggacgcaacactatccgcgaattgttggttcaatatatcttgtcagaatttgatgttaaagcttttggcgtagaatctaaagcttatcaaaaacatgaaatttccgataaaactattcgtcgtatgaaaaatcaacgcaagaaaaaatttgctgacctgaaaattactaaggtataattatgaacgaagctcttattaacgatttacgtcttgccggatatgaagtaaatacaaatggcattggtttaactcaaattgaaggaaatggattcatccttgagtatgaatttagccaatggtggttatatgccaattatggcgaattgattgaatatgttgaccaatttgattcactagatgcagctcttgaagcggctaagttgatgaatgtatgaaatttattaatatttctattactattgaaaattatggcattttctatgttgaccaatacatgaaaatttcatttttcccaaataagactggtgttggatattgggaaagccatgtttctgaattaaatgaaagtgaatatgttagtacacatgaaaagtttttagactttttatatcatgctgatctaactagtcattatatagatattcatgaatttaaaaagatgatggagaaagtgttccaagcatactgtttacttagataactgattcatcctctgtgctttaagatagatcttcaaatattatgatataatagatctatgaattgagctaagaggtgaaaatgtcagaaactaagcctaaatataattacgtaaacaataaagagcttttacaagctattattgattggaaaacagaattagcaaataataaagacccaaataaagtagttcgtcagaatgatactatcggattagccattatgcttattgcagaaggcttatctaagcgtttcaacttttcaggatacacccagtcttggaaacaagaaatgattgcagatggtatagaagcttctattaaggggcttcacaattttgatgaaacgaaatataaaaacccacatgcatatataactcaagcttgttttaatgcattcgtccaacgtattaaaaaagaacgtaaggaagttgcaaagaaatatagttacttcgttcacaatgtctatgacagccgtgacgacgatatggttgcgttagtagatgaaacttttattcaagacatctatgataaaatgacgcattacgaagaatcaacctatagaacaccgggggctgaaaagaaaagtgttgtagacgattctcctagtttggattttttatatgaggctaacgattaacctctccggattcttggaagaaatacctgaagttgaagctattccctatttacttaaaatgtatctcagggaagttttagctcttgacattgatattgatccagaaaatccgtatgataccgcttttaaatctaatggtgtagaattaaactatcggtatcatttaacagatgatgatttttattttatattagagaaataatatgactgataaacccgaaattaatgatgaagtggaaaagcttatttcttctattgaagaaaagaaccgtcttgaagcagaaagaaaagcaaataagttattgtctaaaaacaaacgcgaactgaatcgtctttataagcacgctcagactgcagctgaaaacaataattttgctcaatacgaatatgctatcaagaaaagtcgggatattctaaaacagccatataacgatgaactcatcagtattctttggaagactactagatcgcaaattgaggatatgattgatgcttacacacgtaaaattcaagcgtcttaaaattaatgcaggatttactgaatctttgaatggtcatctttgtgtgaaaatttctgaaaaagaataccatgatagttcaattaaagaagttaatcctcctattgtaagagcagaccctaatatgaaagtgtgggttgattcttatcaagtcaaaaaatggtggcagttatgaaagatgaacacccagacttctgaaatagattataataaaattcgttcctctaaagaggaaatgatgagactctttaaagcgtctcatgataaagctaaagcagaaggaactataaaatataagcgcataaaatttaaaagttctaacgagcctctgtatggcgtattatgtggataggagcttcggctcctatattgctttataaatttttggtaaaataaaccaaaacaaagaggatattaaatgaaagtatgtatttttatggctcgaggtcttgaaggttgtggtgtaactaaattctcactcgagcaacgtgattggtttattaaaaatggtcatgaagtgactttggtttatgctaaagataaatcatttactcgtaattgcgcgcatgattataaatcattttcaattccggttttattggcaaaagaatacgataaaacacttaagctggtaaatgattgtgatattctaattatcaattcagttcctgctacttcggttgaagaagacactattaataactataaaaaaattattgataacattaaaccttctgttcgtgttgtagtttatcagcatgaccattcttctctttctttgcgtcgaaatttgggattagaagaaactgttcgtcgagctgatgttatttttagccattctgataatggtgattttaataaagttctgatgaaagaatggtatcctgaaacagtttctctgtttgatgatattgaagaagcaccgacagtatataactttcagcctcctatggatattgcgaaggttcggtcaacctactggaaagatgtttctgaaattaacatgaatatcaaccgttggattggtcgtacgaccacatggaaaggtttttatcagatgtttgattttcatgaaaaacatcttaaacctgcaggactaagtactattatggaaggtctggaacgttctccagcgttcattcctattaaagaaaaaggaattccatacgagtattatcgtcttcatcaagtagaccaaattaaaattgctcctaatttgccaacgcaaattcttgaccgttatgtaaatagcgaaatgcttgaacgtatgagtaaatccggttttggttatcagttgagtaagttggataaaaaatatctacaacgttctttagaatatactcatctcgagcttggtgcatgtggaacaattccggtattttggaaatctactggcgaaaatttaaaattccgtgttgataatactcctttgacctcgcatgatagcggtatcatttggtttgatgaaaatgacatggaatcaacatttgaacgtattaaagaactgtcatctgatcgaactctttatgaccgcgaacgcgaaaaagcttatgaatttttgtatcagcatcaagattcaagcttctgctttaaagaacagtttgacattattacaaaataaagggcttcggccctttagctttatacggagtttgatataatgatatttcttggatatgtgatactttttcttgcattttatctattcactagagcatgttggattgggttctttagcacgccagatgggtttatttcaataattttattttgcatttcaatgacggttcttgatatatgaaaattttaaatttaggtgattggcatttaggcgttaaagccgatgatgagtgggttcaatccattcagttggatggaattaaacaagcaatagaatattctaagaaaaatggaattactacatggattcaatacggcgatatttttgatgtgcgaaaagcaatcacgcataaaactatggagttcgctcgtgaaatagttcaaatgcttgatgatgctggtattaccctacatactgttgtaggaaaccatgatatgcactttaaaaatactttaactccaaatgcctctactgagcttttggctaaatatcctaatgttaaagtatatgataagcctactacagtagattttgacggatgtttaattgatttaattccttggatgtgtgaagaaaatactggtgaaattcttgaacacatcaaaacttcatctgcttctttttgcgttggtcactgggaactgaacggattttatttttataaaggaatgaaatctcacggtcttgaacctgatttccttaagacttataaggaagtgtggtctggtcacttccatactatctctgaggctgctaacgtcagatatattgggacaccatggacactaactgcaggtgacgagaatgaccctcgtgggttctggatgtttgatacagaaacagaacgaatggaatttattccaaacaacactacctggcatcgtagaattcattatccatttaaaggaaaaattgactataaagattttacaaatctatcagtacgtgttatagtaactgaagtagacaaaaatctgacgaagttcgaatctgaactagaaaaagttgtgcattcattacgagttgtgtcaaagattgataactctgtcgagtcagatgacagtgaagaagttgaagttcaatctcttcagacgttgatggaagaatacattaatgcaattccagacatcactgattctgaccgcgaagcacttattcaatatgcaaatcagttatatgtagaggcaacacaatgacttttgatgaatttaaaaatgttatgatgagtcagcattttgaatgcgaagtaaaagatgatattgggcataaagaaattattgaatattggtttgaaccgctagaggttgaagataattgtattaaaaaggttacggtctgcactgactgggctgtatcttttaacttcaacattttagataatgacacacctaaatcattacgagatatggctgtatcttgtattaaggatgcatactgtgaagttttcgacatttgacattaacgatgaattcatagcaaatattgattataccgaagaagattctagatatgttggaataatttatattacatcaaaaacagcacaaggtgttgtttgcatggctgaatttgatgaatactttttagattatgatgatatgatagaatggtctaaaagatacattaaaaggaatcttttgtgaagaattttaaactaaaccgagttaggtatcaaaatataatgtcagtaggtggaaatcctattgacattcaattagataaggttcaaaaaactcttattactggccgaaatggcggtggtaagtctactatgttagaagccatcacatttgggctttttggcaagccatttcgtgatgtaaagaaaggtcaattaataaacagcacaaataagaaagaacttttagttgaactgtggatggaatatgatgagaaaaagtactatatcaaaagaggacaaaaaccaaacgttttcgaaatcaccgttaacggtacacgtcttaatgaatctgccagcagtaaagatttccaagcagaatttgaacagcttatcggaatgtcatatgccagtttcaagcagattgttgtccttggtacagcagggtatacccctttcatgggtttgtcgacccctgcacgaagaaagcttgtggaagacctgcttgaggtaggaacattagctgaaatggataagcttaataaagcactaatatgtgaattaaattcacaaaaccaagtgcttgatgttaaaaaagatagtattatccaacaaattaaaatatataatgataatgttgaacgccagaaaaaattgtctggtgacaaccttactcgtcttcaaaatatgtatgatgatttggcaaaagaagctagaacgctaaaatcagaaatagaagaagctaatgaaagattagttaatattgttttagacgaagacccgactgatgcatttaataaaatcggtcaagaagcagttttaattaaatcaaaaattgactcgtataataaagtcattaatatgtatcatgaaggtggattatgtccaacctgcttgtcacaattaagttccggtgataaagttgtttctaaaattaaagataaagtttctgaatgtacgcattcgtttgaacagctttcaacacaccgtgataatttaaaagttcttgttgatgaataccgagataatattaaaactcagcagtcgttggcaaatgatattcgcaataaaaagcaatctctaatcacgacggtagataaagctaaaaaagttaaaacagctatagaaaaagcatcttctgagtttattgaccatgctgatgaaatagcactgcttcaagaagaacttgataaaattgttaagacaaaaactaatttagtaatggaaaaataccaccgaggaattttgactgatatgctcaaagattctggtattaaaggtgctattattaaaaagtacattccattatttaataaacagattaactattatcttaaaataatggaagcggattatgtgtttacattagatgaagaatttaatgagacaattaaatcccgtggtcgtgaagattttagttatgcttcattcagtcaaggtgaaaaagcgcgaattgatattgctcttttatttacttggcgtgatattgctgaaaaagtttcaggtgttaaaataaacacactaattcttgatgaagtttttgattcagcgaccgacgttgaaggtgtaaaagctatttcaactattttagatagtttaaaaaatactaatgtttttgttatttcgcatagagaccatgacccacaagcatacggtcagcatcttcaaatgaagaaagttggtcgatttactgtaatggtttaatttataagagattatgctttaatttattagagtataatctctgtggaggaaaaacatggaatattcaactggacaacatctattaactattcctgaaataaaacgatatattctgagaaataatttttctaatgaagagcatatagttactgaatctatgcttaggaatgcatttaaagcagaatatacaaaaataatgtccaatagaaatgaagcttggactgttactgattattatgactaaaggtgtattatgactaaaattactgtgaattatactgttgacgtaaaagatattcagccaaaacacgtgcgttctgaatcaaatccacaaaaccaaaataaaattcgtcgagcatgggttttgtctctttctgataacgcaatggaagttattcagaacaaaattaaatctgcacctgctcgtcatgcgtattatgaagctatcgatcatgaagtaagtaataaatggattgaactaatgcgcaaacatactacagaatctctaaacgccggtgctaaatttattatgacttcatgtggtgaacgccttgaagatgaatattgcggtaatgcagatgaacgtctaattgttgctgctcaaattgttgccgaaacaattgcggctgattttaatcgttaattgctttattaaattagttataaaattaaatctcatttgaattgaaggaaattacatgaaactgtctaaagatactactgctctgcttaaaaatttcgctactattaactctggtattatgcttaaatcaggtcaatttattatgactcgtgcagttaatggtacaacttatgcggaagcaaatatttctgacgttattgactttgatgtagcaatttacgatttgaacggttttcttggtattctgtctctagttaatgatgatgcagaaatttcccagtcagaagatggaaatattaaaattgctgatgctcgttcaacaattttttggccagcagccgatccgagtacagtagttgctcctaataaaccaattccattcccggtagcatctgttgttactgaaattaaagctgaagaccttcaacaactgttgcgtatatctcgtggtctgcaaattgatacaattgctatcacggtaaaagaaggtaaaatcataattaacggttttaataaagtagaagattctgctttgactcgtgttaaatattctttgactcttggtgattatgatggtgaaaatacatttaatttcattatcaatatggcaaatatgaaaatgcaaccaggaaattataaacttctgctctgggcaaaaggtaaacaaggtgctgctaaatttgaaggtgaacatgcgaattatgtagtagctcttgaagctgattctacccacgatttttaatagagggcttcggccctttataatttacactaaaacttgaatgaggaaattatgattaccgtaaatgaaaaagaacacattcttgaacagaaatatcgtccatctactatcgatgaatgtattcttcccgcctttgataaagaaacctttaaatctattacaagtaaaggtaagattccacatattattcttcattctccttctccaggaacaggtaaaacaactgtagcgaaagcattgtgtcatgatgtaaatgctgatatgatgtttgtgaatggatcagattgtaaaattgatttcgttcgtggtcctttgactaattttgccagcgccgcttcatttgatggtcgtcaaaaagtaatcgttattgatgaatttgaccgctcaggattagcagagtctcagcgacatcttcgttcctttatggaagcttatagttcaaactgtagtattattattactgctaacaatattgatggtattattaaaccgcttcagtcacgctgtcgagttattacgttcggtcaaccgaccgatgaagataaaattgaaatgatgaagcagatgattcgtcggttgaccgaaatctgtaagcatgaaggaattgctatagctgatatgaaagttgtagcagctttggttaaaaagaattttcctgattttcgtaaaactattggcgagctcgatagttattcatctaaaggtgttttggatgctggtattttatcactggttactaacgatcgtggtgctattgatgatgttcttgagtctctcaaaaataaagatgttaaacaactcagagctttagcaccaaaatatgcagctgattattcgtggttcgtaggtaaacttgccgaagaaatctatacacgcgtaactccgcaaagtattattcgtatgtatgaaattgttggtgaaaataaccagtatcatggaattgcggctaatactgaattacatttagcatatcttttcattcaattggcatgtgaaatgcagtggaagtgatatgagcttatttgaagatgatattcaattaaacgagcatcaagttgcttggtattcaaaagattggacagctgtccaatccgctgctgattcttttaaagaaaaagctgaaaatgagttttttgaaataattggagctattaataataaaactaaatgctctattgctcaaaaagattattcaaaattcatggttgaaaatgcattatcacaatttccagagtgcatgccagctgtatatgctatgaatttaattggatcaggcttaagtgatgaagctcattttaattatctaatggctgcagttcctcgtggtaaaagatatggtaaatgggcaaaactagttgaagattccaccgaagtattgattattaagttaattgctaagcggtatcaagttaatacaaatgatgcaattaactataaatcaattcttactaaaaatggaaaacttcctttagtattaaaagaactaaaaggtttagtcacggatgattttttgaaagaagtgactaagaacgtaaaagaacagaaacaactcaaaaaactagcattggaatggtaaaatgattgaaattactcttaaaaaacctgaagattttctgaaagtaaaagaaactttgactcgtatgggaattgctaataataaagataaagttctgtatcagtcctgtcatattcttcagaaaaaaggactatactatatcgttcattttaaagaaatgcttcgtatggatggtcgtcaagttgaaatgacagaagaagatgaagttcgtcgtgattcgattgcatggttgttagaagattggggattgattgaaatcgttcctggtcaaagaacttttatgaaagatttaactaataacttccgagttatttcttttaaacaaaaacatgaatggaaactcgttcctaaatatacgattggtaattaaggtaaattatatgacacaatcagagattcagtttaccgaagcttttctaatattcgaaaatctaaaacaaacatatggtctgtcttctacccaactggtttttgacctcccggaagataaacaaatagaattccaaaaagaattccaacgattagtttacccacgccaacgcgcatttcatgcgattatcaaaaccacaaatacagatggcaagtccgttatatcgcgtcgtacaatagaaatttaaagcaaaggggcttcggccccttatttggagtataatatatcaagagcctaataactcgggctataaactaaggaatatctatgaaagaattttatatctctattgaaacagtcggaaataacattgttgaacgttatattgatgaaaacggaaaggaacgtactcgtgaagtagaatatcttccaactatgtttagacactgtaaggaagaatcaaaatacaaagacatttacggtaaaaactgcgctcctcaaaaatttccatcaatgaaagatgctcgagattggatgaaacgaatggaagacatcggtctcgaagctctcggtatgaacgattttaaactcgcttatatcagtgatacatacggttcagaaattgtttatgaccgaaaatttgttcgtgtagctaactgtgacattgaggttactggtgataaatttcctgacccaatgaaagctgaatatgaaattgatgctatcactcattacgattcaattgatgatcgtttttatgttttcgaccttttgaattcaatgtacggttcagtatcaaaatgggatgcaaagttagctgctaagcttgactgtgaaggtggtgatgaagttcctcaagaaattcttgaccgagtaatttatatgccattcgacaatgagcgtgatatgctcatggaatatattaatctttgggaacagaaacgacctgctatttttactggttggaatattgagggatttgacgttccgtatatcatgaatcgcgttaaaatggttctcggtgaacgtagtatgaaacgcttctctccaatcggtcgagtaaaatctaaacttatccaaaatatgtacggtagcaaagaaatttattctattgatggcgtatctattcttgattatttagatttgtataagaaattcgcatttactaatttgccgtcattttctttggaatcagttgctcagcatgaaaccaaaaaaggtaaattaccatacgacggtcctattaataaacttcgtgagactaatcatcaacgatacattagttataacatcattgacgtagaatcagttcaagcaattgataaaattcgcgggtttatcgatctagttttaagtatgtcttattacgctaaaatgcctttttctggtgtaatgagtcctattaaaacctgggatgctattatttttaactcattgaaaggtgaacataaggttattcctcaacaaggttcgcatgttaaacagagttttccgggtgcatttgtgtttgaacctaaaccaattgctcgtcgatatattatgagttttgacttgacgtctctgtatccgagcattattcgtcaggttaacattagtcctgagactattcgtggtcagtttaaagttcatccaattcatgaatatatcgcaggaacagctcctaaaccgagtgatgaatattcttgttctccgaatggatggatgtacgataagcatcaagaaggtatcattccaaaggaaatcgctaaagtatttttccagcgtaaagattggaaaaagaaaatgttcgctgaagaaatgaatgccgaagctattaaaaagattattatgaaaggcgcagggtcttgttcaactaaacctgaagttgaacgatatgttaagttcagtgatgatttcttaaatgaactatcgaattatactgaatctgttctcaatagtttgattgaagaatgtgaaaaagcggctacacttgctaacacaaatcagctgaaccgtaaaattcttattaacagtctttatggtgctcttggtaatattcatttccgttactatgatttgcgaaatgctactgctatcacaattttcggccaagttggtattcagtggattgctcgtaaaattaatgaatatctgaataaagtatgcggaactaatggcgaagatttcattgcagcaggtgatactgattcggtatatgtttgtgtagataaagttattgaaaaagttggtcttgaccgattcaaagagcagaacgatttagttgaattcatgaatcagttcggtaagaaaaaaatggaaccgatgattgatgttgcatatcgtgagttatgtgattatatgaataaccgcgagcatctgatgcatatggaccgtgaagctatttcttgccctccgcttggttcaaagggcgttggcggattttggaaagcgaaaaagcgttatgctctgaacgtatatgatatggaagataagcgatttgctgaaccgcatctaaaaatcatgggtatggaaactcagcagagttcaacgcctaaagcggtccaagaagctctcgaagaaagtattcgtcgtattcttcaggaaggtgaagagtctgtccaagaatattacaagaacttcgagaaagaatatcgtcaacttgactataaagttattgctgaagtaaaaactgcgaacgatatagcgaaatatgatgataaaggttggccaggatttaaatgtccgttccatattcgtggtgtgctaacttatcgtcgagctgttagcggtttaggtgtagctccaattttggatggaaataaagtaatggttcttccattgcgtgaaggaaatccatttggtgacaaatgcattgcttggccgtcgggtacagaacttccaaaagaaattcgttctgacgtactgtcttggattgactactcaactttgttccaaaaatcgtttgttaaaccgcttgcaggcatgtgtgaatcggctggtatggactatgaagaaaaagcttcgttagacttcctgtttggctgatagaataaatctagggacctccgggtccctttttcatacaagtaatataaatctatacttatgaaaaacagatgattctggacctttagaattccctaaaaaaatttcacaaaactgtttacaagactgttcttctgtggtactatacaactatcaactactgatacagatttggagaataaaatgaaaattgttatgggatgcttagcagtttgtttagttgcattagtagcagttccatttgttagtgttgaaaatgatactcaacctgtgattaaatctagcaccgttattcacactaatggtaaaatatcagttaaaattgatgataatcttcatgtgaatacaaatggatctttaggtgtgcaaatgggtaatacctgcataagcactactggagtaattactacttgcatttgaggaaattattatgaaaatcgctattttggttattgcattaggtcttactggttgtgtggctcaaggaccggtagtaaatcagtctgatgtaggaaaaattgtaaactgttcaagcaaattttataatcctaatgtcaagtgttataaagaagctccaaagcaaacagtagaacaaatgcaggcgaattttgacgaagctattcgtccagatgaatctgctcaagcatatcgtaattcggatgtaattacacgcgaagaaaaaattgaaaactactgcgctgagctttgggctaattgggctaataattaccaatggcgtactggtaaaaatgctccgatggagtatgtagtgaattcttataattcatgtgtaaaaaatttgactaagtgaggaaaacatggaaactttagtagcaggttcaatttttatggttttagtttcaggtgtgttggctattattatatacatgcttccatggtttatcgccttgatgcgtgggtcaaaatcgacagtaggaatctttttcacatctttactgtttaactggtcaattattggttggtttattacatttatttggtcaattgcgggtgaaactaaaaagtctgcacaaccaaatcaggtaattatcatcagagagaaggaatgaaaagcaaaattataacagtgttgcttttaatcttgatgattataataagtatatactatagtgtaacggttcctcttatgattccaactattattttaggttggggtttattactgttacaagttaaatatgaatgtatcaattgaggtttaaatgattagtgactctatgacagttgaagaaatccgtcttcatttggggcttgcattaaaggaaaaagatttcgtagttgataaaactggtgttaaaactattgaaattattggcgcatcatttgtagcagatgaaccgtttatttttggcgctcttaatgatgaatacattcagcgtgaacttgaatggtataaatctaagagcttatttgttaaagatattccaggcgaaacaccaaagatttggcagcaggtagcatcttctaaaggcgaaattaactcgaattatggttgggctatttggtcagaagataactatgcccagtatgatatgtgtttagctgaacttggtcaaaatcctgattctcgacgtggtatcatgatttatactcgtccatccatgcaatttgactacaataaagatggtatgtcagatttcatgtgtactaatacagtacagtacctgattcgtgataagaaagtcaatgcagtagtaagcatgcgctcaaatgacgtggtcttcggattccgtaatgattatgcatggcaaaaatacgtattagataaattagtatctgatttgaatgccggcgattcaactcgtcagtataaagcaggttctattatatggaatgttggaagtcttcatgtatattctcgtcatttttacttggttgatcattggtggaatactggcgaaactcatattgtgaaaaaagattataacggtgagtggaaatgattcaattcgtaattccaagttatcagcgtgtcggggcagtttctgcccttgatatgtttccgactgattatgaaccccatattgtagtgcgtgaacatgaagaaaaagcttatcatgacgcttatgggtctagagctaaaattataactattcctgatgatgtaaacggaattgccggtactcgtaaagcaattactgatatgtatgcaggtcaacgaatctggatgattgacgatgatactactattcgtatgagttcaatgcgaaaaagagatgaccgtcgttgtgtagataaagtcaatcaattaacccgtgaacagttctatgaattgattcaatacgttgaagatgccatggattgcgggtattatcatggtcatgctcgcctaccaatttttaaaattacttcatcttggggtaattatcgtgaaaattcatatggattcacgaatacatggtatgacctcggaaaacttactacagaacaaattgggtatggaaaaattgatttgtgcgaagatatgtatgcatttctcaatttaattaatcaaggttatccgcatttggccttgttcaaatatctggttgtatcaggtaaagcgcaagctcctggtgggtgtagttcaattcgtagtaattctaaacataatagagcgcttgagcaaatcaatagagagtttccagagcaagctcgttggaaaacgtcgaatattgaaaaacgaaaatcgttgggtgaagaagacgagccattaaaggttcttcgtatgtgtgtttcgcgcaaagaaaaatcagaagcatttcataagtttaatgctattcatccaatagcagttgattaatgcctaaatttattgtgttataattactctatctttaaccagtgaggaaaatataatgatgcctatggaaaaaatgaatgtctattgcagatttaaaatcccgtttgattaaagcttccacttctaaaatgactgctgaactgactacatctaaattctttaatgaaaaggatgtaattcgtacaaaaattccaatgcttaatattgctatttctggtgcgattgatggcggtatgcagtctggtttaactattttcgcagggccttctaaacactttaaatcaaatatgtctttgactatggttgcggcatatttgaacaaatatcctgacgcggtttgtctattctatgatagcgaatttggtattactccagcttatttgcgatccatgggagttgacccggaacgagtaattcatacgccgattcagtcagttgaacagctgaaaattgatatggtgaaccagcttgaagctattgagcgcggtgaaaaagtcattgtattcatcgactcaattggtaatatggcttctaagaaagaaacggaagatgccttgaatgaaaaatctgtggcagatatgactcgtgctaaatcactgaagtcattattccgtattgttactccttactttagcattaaaaatattccatgcgttgcggttaaccatacaattgaaacaattgaaatgtttagtaaaaccgtgatgacaggtggtacaggcgtaatgtattcggctgatactgtattcattatcggtaagcgccagattaaagatggttctgatcttcaggggtatcaatttgttctaaatgtagaaaaatctcgtaccgttaaagaaaaaagtaaattctttattgatgttaaatttgacggtggcatcgatccttattctggattgttagatatggctcttgaattaggatttgtggtaaaacctaaaaatggctggtatgctcgtgaatttcttgacgaagaaaccggtgagatgattcgcgaagaaaaatcttggcgtgcaaaagataccaactgtactacattctggggtcctttatttaagcatcaaccattccgagatgctattaaacgcgcttatcagttaggtgctattgatagtaatgaaattgttgaagctgaagttgatgaattgattaactcaaaggttgaaaaatttaaatctccagaaagtaaaagtaaatcagcagctgatttagaaactgacctagatcagttaagtgatatggaagaatttaatgaataaagatgatttggatttagatctagaaattatcgacgaatccccctcttcggagggggaagaagaaagaaaagaacgtctttttaatgaatctcttaagataattaaatctgccatggaaaatgttatccaggagattgtcattaaactagaagacggttctacacacattgtgtatgtgacaaaattagattgggttgatggaaaagtcgtaatggactttgctgttcttgaccaagaaagaaaagctgagttagctcctcatgtagaaaaatgtattacaatgcaactacaagatgcatttaataaaaggtcaaagaaaaaatttaaattcttttaaggagtaagtgtggtagaaattattctttctcatctcatatttgatcaagcttatttttcaaaagtttggccatatatggattcagaatattttgaaagtggtccagctaaaaatacattcaaattaattaaatctcatgttaatgaataccatagcgttccatctattaatgcgttaaatgttgcattagaaaatagttcatttactgaaacagaatattctggtgtaaaaacacttatttcaaaactggctgattctccggaagaccatagttggttaataaaagaaacagaaaaatatgttcagcaaagggcgatgtttaatgctacgtctaaaataatcgaaattcaaactaatgctgagcttcctccggaaaaacgaaataagaaaatgccagatgtaggtgctattcctgacatcatgcgccaagcattatcaatttcatttgatagttacgttggtcatgattggatggatgactacgaagcacgttggctatcttatatgaataaagctcgtaaggttccatttaaactcagaattctgaacaaaattactaaaggcggagctgagactggaacactgaacgttttaatggctggcgttaacgttggtaagtcattaggattgtgttcattggcagcagattatttgcagctcggacataatgttctttacatctccatggaaatggcagaagaagtctgtgctaagcgtattgatgctaatatgcttgatgtttctcttgatgacattgatgatgggcatatttcttacgctgagtataaaggaaaaatggaaaaatggcgtgagaaatctacccttggtcgtttaatcgttaagcaatatcctactggtggagcagacgctaacacattcaggtctctcttgaatgaattgaagctcaaaaagaattttgttccaacaatcattattgtcgactatctgggtatttgtaaatcttgtcgcatccgagtttattcagaaaatagttacacaactgttaaagctatcgcagaggaattgcgtgctctggctgttgaaaccgaaactgttctttggactgcagcacaggtcggtaaacaagcttgggactcttccgatgttaacatgagtgatatcgcagaatctgctggtcttccagcaacagctgattttatgcttgcggtcattgaaaccgaggagctagcagctgctgaacaacaactcattaagcaaatcaaatcacgatatggcgataagaataagtggaataagtttttgatgggtgttcaaaagggaaatcagaaatgggtagaaattgaacaagattctactccaactgaagtgagtgaagtagcaggttcacaacagattcaggctgaacagaatcgctatcaaagaaatgaatccactcgagcacagttagatgctttggcaaatgaattaaaattttagtttacaagctgacaagactatggtatagtagtcttgttggttaaatgaggagattgttatggaattggtaaaggtagtttttatggggtggtttaagaatgaaagcatgtttattaaagaaaccacaatgatgaaagatgacgttcaatgggctactactcaatatgctgaagttaataaagcattagttaaagctttcattgatgacaagaaagtatgtgaagtagattgccgaggataatatgcatattgttttatttaaacctactccgtataacgtcaggaaaaatacgcaattcaaagcgcttattgcggatacatgggaattggtgttagatattccggcagaagaaagccctccatttggtcgagtggaatttattaagtttgctgtacgtcctacgaaacggcagattcgtcaatgcaaaagatactttcgtaagatcgttaagctagagaaacagtttgtaacatgtgattatgcagaagttttaaaatagctgtttacttttgttggaaattgagatactatataaacataaactactgaggagattatcatgaaaaaatttatttttgctacaatttttactttggcttcttgtgctgctcagcctgctatggcaggttatgataaagatttgtgtgaatggtctatgactgcggatcagactgaagttgaaactcaaattgaagcggatattatgaatatcgttgagcgcgatcgtcctgaaatgaaagctgaagtgcaaaaacaacttaagtctggtggtgtaatgcagtataattatgttctgtattgcgataaaaactttaataacaaaaatatcgtaaccgaaatcacaggcgaataatatgatttattatatgcacaaaaatccaccgtttaaatacggtaaatttcctgatgcacaatgttataatataacgcctgatgaaaataaccgtggatatcttattggcacaatttttgtaattgttaaagataacgaaatcgttgcctgggcagattttaaaggtacaacacatgatgttaatccggtacctttcacatattataatataatggatttggcatatgattataattggtttaatcatgacgcgttggctcatattgaaggtgtaggatttgacatctcttattctagctactcattgtgtcctatgagtcgggctcataaagaacctgaatatttttcatttaggaaacgtgtaaactttaaacgcaacacagagtatgtcggtggaatctttgttaaagataatcgaattattcgtattaattatcctttgagcgttagtcaaaaagatattgatgttgatttagatttcactgaaaataatattaatcatattgcttctgtgtattttggtatcgatcacaaaattgtaatatgtggatatgaattaccatcagaaaaacagtctaaagtaaatgtttctattgatgaccaaatttttaatgcttttatgaataaaggttaatatgtatagttctgaattttcatatttaaaaatggaaaaaatttcatacgattttatagatgaaaaggtttattacagcttccatgaaccgcgttttaatagtgaggttgggtttattgtagtaaaagacaatttcattttaaaaatatattcagcattaaaggattttcattacgaaaatattaacctaaaatttaataaagaaaacgttcgtaattgtgcagtaacaattacaggaaataaaggcacatgtgttatgctatctgatgaaattaatgatttgctaaatgatgcagaaaatattactgtgccatctattgatgaccaaatttttaatgcttttatgaatagaggttaatatgaaaacatataaagaatttattaaagaagatatggtagctggagattcaggtggtaatcctgaaaatatctctactggaacaacgtcgggcgctgtagtaaataaaggtcctgaacagattcctaaaaagaagaaagaggaatctaaagaaaaagaagagtaaaaatgtcatcaataccttggattgataatgagtttgcgtatcgtgcattagctcatttacctaaattcacacaagtaaataatagttcaacttttaaattgcgatttagatgccctgtttgtggagattcaaaaaccgatcagaataaagctcgtggatggtattatggtgataataatgaaggaaatattcattgttataactgtaactatcatgcaccaatcggaatatatttaaaggagtttgaacccgatttatatcgtgagtatatctttgaaataagaaaagaaaaaggtaaaagtcgtccagtagaaaaacctaaagaacttcctaaacaacctgagaagaaaataattaaatctcttccgtcatgtgttagattagataaactggcggaagaccatccaattataaaatatgtaaaagctcgttgtattccaaaggataaatggaaatatctttggtttacaaccgaatggcctaaattagttaatagcatagcaccgggaacatacaaaaaggaaatttctgagcctcgtcttgttattccaatttataatgctaatggaaaagctgagtcttttcaaggacgtgcattaaagaaagatgctcctcaaaaatatatcaccattaaagcttatcctgaggcaacaaaaatatatggagtcgaacgagttaaagatggcgatgtatatgttctagaaggacctatagattcactttttattgaaaatggtatagctattacgggtggtcaattagacctagaagttgttccatttaaagataggcgtgtgtgggtcttagataatgaacctcgtcaccctgacactatcaaacgaatgactaaattagttgatgcaggagaaagggttatgttttgggataaatctccctggaaatcaaaagatgttaatgatatgattagaaaggaaggtgcaacccctgaacaaattatggaatatatgaaaaataatattgcccaggggttgatggctaaaatgcggttatctaaatatgctaagatttaaatcaacccaactaaagcaaatgctaaatctacaaatgtatcaagagtaactactggaatattaacaccatgcgcaattgcaattggtgataaaataaagttccagagtaaaattcctaccatagcagaaatagtaaaagctatacgttttttattaccttttatggcattaacaagtgccattaatttttgtaccatatgtcctccttattgctttatatatttattgtataattaatctactaacccatgaattgaaaggaaaaataatggcttactttaacgaatgttcacaactgatcgaaggcgctgataaagctcaaaatgaatattgggatattctcggtgatgaaaaagacccgctgcaggtaatgctcgatatgcagaaatctctgcaagttcgtttagctaaagataaacctgaatataatcgtcatcctgatgacttggctactgcaggtgaagttgttgattggttgcgtaatcagaaagattatattgacgatgaattccgtgaacttctgacttctcttggtggtatgagcaatggtgaaaaagatgcatctgctgtatggaaaccttggaagtcgcagcatggtgaacgtcgtgaaactctgattactgatttgtctccacaagaccaattggaaattaaatttgaaatgattgatattctccatttcgttctgaacatgttccaaggtcttggtcttacagcagaagaaatctttaaactttattatctaaaaaatgccgaaaactttgctcgtcaagaccgaggttattaacagctcgtcttaaaagccgcgagaatttattataaataatcatgtaatttaaataaaaggagaattacatggctagtactcgcggttatgttaatatcaaaacatttgagcagaaattagatggaaataagaaaattgaaggaaaggaaatttcagtagctttccctctttattctgacgttcacaaaatttctggcgctcattaccagacattcccttcagaaaaagcagcatatactactgtatatgaagaaaatcaacgtgctgcatggattgctgcaaatgaagatttgtggaaagtaactggtgaataaattcaaggactccttcgggagtccttttttcattttatggtttactttccaaaatgagtatggtataataaaaatatcttatagaggagaacaccatgttaaatcgttggattaaaccaaatgaagacctccagaaggttcttgataaagctatctctgataaatggggtatgaaaagctgggattgtgatatcgtcacgcattcattcatgatgcatgcagatggttcagtcgagttcaatgctgaaatgcgatacactgactggggtggatttcaaagagtcgaatttcaaagaggctttttgtaatgtttatctttaattggtttaaaagtttctttacggattttttctctacgactcctggagaaggtgtagttcctatttcaaatgactaccttcctttaactgtagttgaatatgtttatatgggagatggaacagtagaagcagtcactatgacttatgaagaagcccaagaatattataaaaatccttggcgctggtcagtacctactacatcatctaacgcgcagtctagttctgattcatatgacactaatgttcctgttcatgtatgggcgggtgattcatgtggaagttcttgtgattctagttgttcatctacatcttgcgattgaggaaaattatggaagcaattttgtttgaaatgtatattagcagtaatagtatgtcgtttgctaaagacgttccaattaccgtagcagtaatgattgataagggttattgtgacccaatgtatctcgtagaaaatttcgtttcaatgccagttccagaagatgctgaaataaaacttaaaaagatcggaattattgaaactgtaccaaatattccatttagagcaattgaagcatttactaaatccgaatacattaatgttagcgcagaacaatataatgataaacccttatctttttattcgtacgattcaatatataactggaaaatagataaaggaaacaaatttataattgcgagtgaagatgcgttatcatactttatttcttctgtatggaatagtttacatccaaatttgctaaaaattcatgaatttgacggtgtccatactattgttttaggtaaaataaatgaaagctctcaagaagattcttgaatggttcaatagaccaaactcaatgtatattgatgatggttgggttgaacaagcaaataaagaaatgcagaacgagtcagaagaatggatgaaatcaatgattagtgctgagaaagaaaagaaattagaacgctcagtgcttaaattgatgagagacatctatggtgataaatcatgaccaaagatatgacgttagaagaggcaaaggctaaagcaaatgaagctttggatttgcttcttaaaatcggtagtaaaatgatggaagaaaatgagaagtatatccaggaaaataaaattcctgacggtccattagtaggcaaaaggaaatcacatgattgaagtagcaaaattatattcaatagaatttatgtctaaagaaggtaaatcagtaaatacacttgataaaaagtgctcattaattattcctttagcagaaaatccagatattttaattaaagatataaaagaaagaaaatatccagaaaatgttattctaattataaagcatactgaagatattttgcagaatacagattcaccattttcttcttctgaagctttaactattaaaggctataaaagagctcatgaatatggtctttttgacatgtttgaagacgataaagttaaattagcgagtcaaccttctaaaagtaaaacattcattattgaagatattaaagatataaatgcatttgttaggatggtctgggctcattttgatgttggactacgctggagaatgtccgaagaagaaagaaagatcattgaaactaatcgttattttggtttttatcgctaggaattaatatggatttatttgagatgttagaagataatcattctacgaatatccagaatgattctagtgattataaaaaagagtaccgtatagtattacagaattatggaattgaagccccagatgctcttctagaagaactagcttcataccatcttgaccctccgccttgggctccctgggcaaaataattcaaaaagttgtttactttccttcctaacaatgatatgatagcttctgaagtatacggaggctatcatgattattaatcctgcagatgttgaacagttatctataaaagctgaaagcgttgattttcaatatgatatgtataaaaaagtctgtgaaaaatttactgactttgagcagtctgttctttggcaatgtatggaagccaaaaagaatgaagctcttcacagacagttgaataaaatcattaaaaagcatttaactaaatcaccttatcagttatatcgtggtatatcaaaatcgacaaaagaactcattaaagatttacaagttggagaagtgttttcaacgaacagggtagattcatttactactagtttgcacacagcatgtggtttttcttatgttgagtatttcactgaaataatatttcgcttaaaaactgataaagcttttaattattctgaccatatcagcgatattatactttcttctcctaatactgagtttaagtacacgtatgaagatactgacgggttagattcagagcgtactgataacttaatgatgattgtgcgtgaacaagaatggatgattccaattggaaagtataaaataaattctatttcaaaagaaaaattacacgattcatttggaacatttaaagtttatgatattgaggtagttgaatgaaatactcagtaatgcaactaaaagattttaaaataaaatcaatggatgcatcggtgcgtgcttctattcgtgaagaattgctttctgaagggtttaatttatctgaaattgaacttttaattcattgtattaccaataagccagatgaccatacttggttaaatgaaataatcaaatctcgtttggttccaaacgataaacctctttggagaggtgttccagtcgagactaagcaggtgttaaatcaaggaattgatattattacatttgataaagtcgtatcagcttcatatgataaaaatatagctctacattttgcttccggtttagagtataacacacaggttatttttgaattcaaagctcctatggtattcaatttccaggagtatgctataaaagctctacgttgtaaagaatacaatccaaactttaagtttccggatagccatcgttatcgtaatatggaattagtttcagatgaacaagaagtaatgataccagctggaagtgtatttagaattgcagatagatatgagtataaaaagtattcaacatacactatctatactcttgattttgaaggatttaatctataatggaaggacttagattcattataccacgaaagttttaaagcattttacataaagttgtttacaagctgaagtaaaaatgatatagtataagtaagttaaccgtccgtgagaaaaatatgaaactgtctaataaccaaattcgtaaaattaaacgtcgtttagagcatactcaggcatctgcaaaaagacgttctaaagattttaacttagacttcaattacattaagaacattttagatcaaaaagtttgtgcttactcgggagaaccttttgataatcgtattgaaggagagaaattatcattagaacgttttgataataacattggatacattaaagggaatgttattgcagtaaagaaaaagtataatacatttcgttctgattatactttagaagagttgattgaaaagcgtgatttatttgctttgcgaattggtcgttcatctgcgaaaaaagttcataaactaaatttagatgaaaagaaatgggctaaaatcaaaaagacttataatcaaattaaagctatacagaaaaaacgtgaaaatcgaattgaacacatttctcagctttctaaatcaaaacagacctctgacattaagttaaggattatagcacttaaagctcgtattgatggttctcgcatagcagaaggcgctgaagttgttaaactgaacgttcttcttaaaggctcggattggaaaattgtgaaaaagttgtcagaagcagaaatgcaatatgatatgtgtgataaaattattcaaggtgtagagcggtatcaaaacttgtcttttattgataaacttaaactgaaaagaggatacccgctaaattgttcaatttttaaacttatccgaggataatatggtttatgtatatgcgatagtttaccgagacaaagacggatttacggcgccagttccacttgatgaacatcgtcctgctgtgttttttgaaagagagattgctgatagagtttttactactctcaaagaccaatataaactagctttaggtatgggaattccaagactagttgagactccacgcaagttttggtttaataaaatagaagttaaacatgttaagcctgatgtagatacacaaagattatatcaacgaattctagatactgggcgtattgttagtattccaattgcagggactttccgatgacatttgatgatttgacagaaggccagaaaaatgcctttaacatcgttatgagggctattaaagaaaagaaacatcatgtaactattaatggacctgctggtactggtaagactactcttactaagttcatcattgaagctttaatatctacgggtgaaactggtatcattttggcagctcctacacatgcagctaaaaagattctttcaaaactgtcggggaaagaagcgagtactattcacagtattcttaaaattaacccagtaacatatgaagaaaacgttctttttgaacaaaaagaagtaccagatttagctaaatgcagggtattaatctgcgacgaagtgtcaatgtatgatagaaagctcttcaaaattttgctttcaactatcccaccgtggtgtactataattggaataggcgataataagcaaattagacctgttgacccaggagaaaatactgcttatatcagtccattctttacacataaagatttttatcagtgtgaacttactgaagttaaacgcagtaatgctcctattattgatgtagctactgatgttcgtaacggtaagtggatttatgataaagttgttgacgggcatggagtacgtggatttactggtgataccgctttacgcgattttatggtaaattatttttcaatcgtcaaatcgctagatgatttgtttgaaaatcgcgtaatggcatttacgaataaatctgttgacaagttaaacaatattattcgcaaaaagatttttgaaactgataaagattttattgtcggtgaaattattgtaatgcaagaaccgttaattaaaacatataaaattgatggaaagcctgtatcagaaattatttttaataatggacaattagttcgtattatagaagcagagtatacatcgacgtttgttaaagctcgtggtgttcctggagaatacttaattcgtcattgggatttaacagtagaaacttacggcgatgatgaatattatcgtgaaaagattaaaataatttcatctgatgaagagctatataagtttaacctgtttttaggtaaaacggcagaaacttataaaaattggaataaaggcggaaaggctccgtggagtgatttttgggatgctaaatcacagtttagtaaagtgaaagcacttcctgcatcaacattccataaagctcagggtatgtctgtagaccgtgctttcatttatacgccttgtattcattatgcagatgctgaattagctcaacaacttctttatgttggtgttacccgtggtcgttatgatgtgttttatgtgtgaggctatatgattaacatcaattcaaaatatttaaatcgtctaatagatggtataaggaagcatactaataagcaagataatcttaatgttatggtaacaggagctgagctccttcataagctttatcttataagtgatactatattagcaattaaacgaattgaaaaacaatcatatcacagtaatacagatacggtaattacactagatgaaagtgtctgtaaattactaattaaatttgaggaagctattcgtggaaataactaaagatcagttttatcttcttcaggataaagttagcgaaatttatgaaatagcttatagtaaaaatcgcaaaaacgtgaaaattgaatcaggcaagttaatgcttcaattggaagaaattgaacgagatttgattgcgttagaattcttttgtggtgaagtaaaaactgttacaatcagtgattacattttaggtgaaattagccatctttataaggcggttattaatgattgaattaagttggtgtcagtttaaatctcttatgacaaatgttaaagctgtcattgagaaaaattctggtcctgaaaatattactattcgcgaaaaagctttaaagataatatacagtcttgaagagatgcaaaaagatattgaatctatggcaaaatttattgatgaacctattaataaagtttatattcaagactatactgtaggtcaaattcgcgatttagcaaggaaaatttaatgtttgattttattatagattttgaaacaatgggaagtggtgaaaaagcagctgttattgatttagctgtaattgcttttgaccctaacccagaagtagttgaaacatttgatgaattagtttcacgcggcattaaaatcaaatttgatttaaaaagccaaaaaggacatcgtctttttactaaaagcactatcgaatggtggaaaaatcagtctcctgaagctcgaaaaaatattgcaccatcagatgaagatgtaagcaccatcgatggtattgcaaaatttaatgattacatcaatgcacataatatcgatccttggaaatctcaaggctggtgccgtggaatgtcgtttgattttccaattttagtcgatctcattcgtgatattcaacgtcttaatggtgtttctgagaatgagcttgacacatttaagttagaaccatgtaaattctggaatcagcgtgatattcgtaccagaattgaagcacttctgcttgttcgtgatatgaccacgtgtcctcttccaaaaggaactttagatggattcgttgcgcatgattctattcatgactgtgcgaaagatattctgatgatgaagtatgctttgcgatatgctatgggtcttgaagatgctccgtcagaggaagattgcgatcctctatctcttccaacaaaacgataaaaagttgtttacttcctcggttagttgtggtattataacaccatagctactgaggataataaaatgaaaatttatcgtgttgaatcatcgtttagtattcttgattatgaagatgctataacaatacgtcgaaatctttgtgttcaaataacgccgtacaggagtataatagattcatggagcgaagagtggctattacacgtaggttatgacagacctaattttatgcatcatagcgataataataaaagaattcctttaccacacgaagataaactattagttaaaaacgctaatatagtaattaatactaagttcaagaaagattatgttggagtagaatatcatattccaggatggtttataggtctttatcattttgctttcgctagtgaatatgatatgatgagatggttcacacgagaagagcgggaagaattatcttctaaaggattttatctcgctgtatacgaagttcctgaagatgaagttatcattggtgggcaccaagtaatgttccgcaaatcgcatgctgaactcgtagattttattgaaatgagataattatgaaatttaattataatcctgaatacataccaaatccggtagctaaactgattgattttgatgttgtaagcacttatgtatgccctgttaaaccactggaaattaaggaacctattatgactaccgctattgaaatcggcaaaacctacaaactggttgaacctaaaattaaaactaatgccttgatttctggtcataaaactctgactgatgtttttggcgaaggcgaatttattgttgaagaatttgccaaaagtgagtggtttgacaaatcttacgtcatccacggtcgccggttagataataacaaaataaagaaaaacctggtttatgaagatgagttcatcctgttccaagaagttgaagaacaagaccctacagacctgttgtgtgctgctgtgtctatccgtcgtccttttgataatcctatctgtggttgggtaacagaccagtggattgaagatggcgttgaacttctgaacgtagttcatgctggagaatactctgtagttcctcgtagcgcagtgattaatgttcgtttaagctagtttacaaactcttgggaccagagtataatggtcctgtggagtataaaatctttttaacaagtgagagataattatgaatattaatatcggtgaaattgctcgtgtatctgataaatcccgttctaaagcagcaggaaaattggtcgaagttgtaagcattcagcttaaacacggtgttaaagatgaagattctgaagtaaaagtacgtatcattgctaaagatggaatgtctaagccccagtttggttatgttcgatggaaatttcttgagcctgcgtttttgaaagctgttcctgctaaaggaattgaaacgattgatacttcgcatgtaggtgtagactttaagtggaaacttggtcaagctatcaagttcattgctccttatgagtttgaatttaccgaaggtggacaaccacttcctcagcgtactcgcgctatgtgtgcatacattactgatcaatgggtagaagatggcgttaagttatacaacgcggtatttttaggaacatacaaagtcattcctgaaagttggattaaacactacagcaaagctcgctatgcataaagtttaaaattttttcataaaactatatacatcagtagttgattatggtactatatcaatatcaactactgatatagaaaataatttggagaataaaatggaaaatttgccaaaggtgctgctactcttctgaaacgcatcgctccaatgttcaattaacgaggaaattgtaatgaaacgtaaaattgttcagaactgcactaatgacgaatttgaagatgtgttattcgatccagatttggtagtagttcaaaaggaacacactgctaagtttactcacttgacttcggtttatgtgtatgaaaaggttggggataaacaaccaatttacggtgtatttcgtgaaatcactgaagatggtacaacttactggaaggaaatttattaatggctattaaatttgaagttaataaatggtatcagtttaaaaataaacaagctcaagaaaattttattaaagaccatactgataacggaatctatgcacgccgtttaggtatgcatccttttaaaattttagatgtggatgctcttgggcgtcctattaaaattatgtcatttgctggaaatttagtactatcttctggtaaagatattttggatgaagattttatttggctttcatcgaatgaagctgaattctttaatgaagttgaaaatccataccaggcagctgaagagcaggaagaatctgcaccgataactgatcaatctaaattccctgtaatgaaagttactattgaaaatgatgaacaggcatggtccttgtatcagatgttgaaagctcactttaaggaataattatgccgctttatgattataaatgtcaatcaaaagactgcgcaaaagaatacgaaaaaatcaagaaaatttctgaaagagatactgatgtatgtcctgattgtcatcggattgctattcggttagtctctgcccctaagcatgtgaatggcggattttacgacttacttaaagggtaattatgtttaaaatcggtaagaaatatcgcattcgcgaaggtgaagaaaagaaatatctattttctgctatttataggaatggttctattaatgctgtaatatctacaagcgaatttatcgttgaagatatgaaaggtaataatgttacaatgattagtacagcatctggaaatgacggaaaaattcttcacagttttcagagtaatgttctaatttatgatgaagaatttgacttcttcgaagaagttcccgaaggttttgcttttgaatgcactatcactatgaaatctggtgaccctctttcttttacagttaaagatgaaggaagtcgcttgagaattattagtcttcttcaagccattaaatttaagtgaaaattatgaaatatattaatcgttctatcgcagcattagtattagcagtgtctttaataggatgtactgatgctgataatgcaaccaaagttttgtcttcaagtggttttactaatattgaaatcactggatataattggttcggttgctctgaaaatgatttccagcatactggatttcgtgctattggacctactgggcagaaagtagaaggaacagtatgttctggactattcttcaaggattcgactattcgttttaaataaaaggccttcgggcctttagctttatgattaccggagtataatattcccgaaaccaaacgaggataagtgatgattaagaatgaaattaaaattctgagcgatattgaacatatcaaaaagcgtagcggcatgtatattggctcttctgctaatgaaatgcatgagcgctttctgtttggtaaatgggaaagtgttcagtatgtacctggtcttgttaagcttattgatgaaattatcgataactcagtagatgaaggtattcgtactaagtttaaattcgcaaataaaattaatattactattaaaaacaatcaagtaacagttgaagataacggtcgcggtattccacaagcgatggtcaaaacacctactggtgaagaaattcctggtcctgttgctgcctggactattccaaaagcaggtggtaacttcggtgatgataaagaacgcgtcaccggtggtatgaatggcgttggttctagtttgacaaacattttttctgtgatgtttgtcggtgaaactggtgatggtcaaaataatattgtagttcgttgttcaaatggcatggaaaataaatcatgggaaactattccaggaaaatggaaaggaactcgcgttactttcattcctgattttatgtcatttgaaactaatgagctgtcccaagtttatcttgacattacactagatcgtctccagacacttgcagtagtttatcctgatattcaatttacctttaatggtaaaaaggttcagggcaattttaagaaatatgcacgccaatatgatgagcatgctatcgttcaagaacaagaaaattgctctattgcggttggtcgttcaccggatggttttcgtcaattaacttatgtgaataacattcacactaagaatggtggccatcacattgactgtgttatggatgatatttgtgaagaccttattccacaaatcaaacgtaagttcaaaattgatgtgactaaagcacgcgttaaagaatgtttgactatcgttatgtttgtccgtgatatgaaaaacatgcgatttgattctcaaactaaagagcgtttgacttctccatttggcgaaattcgtagtcatattcaactcgacgctaaaaagatttcacgcgctattctaaataatgaagcaattctgatgccgattattgaagctgcactagctcgtaaattggcggcggaaaaggcagcagaaactaaagcagctaaaaaggcttctaaagctaaggttcataaacatattaaagcgaatctttgtggtaaagatgctgacactactcttttcttgactgagggtgattcggctatcggatatcttattgatgttcgtgataaagaacttcacggtggttatccattgcgcggtaaagttctcaacagttggggtatgtcttatgcagatatgcttaaaaacaaagaattgtttgatatttgcgcaatcactggattagttctcggtgaaaaagctgaaaacttgaattatcataatattgctattatgactgatgctgaccatgatggtctaggaagcatttatccttctctgcttggattttttagtaattggccagaattgtttgagcaaggacgaattcgctttgtcaaaactcctgtaatcatcgctcaggtcggtaaaaaacaagaatggttttatacagtcgctgaatatgagagtgccaaagatgctctacctaaacatagcatccgttatattaaaggacttggctctttggaaaaatctgaatatcgtgagatgattcaaaacccagtatatgatgttgttaaacttcctgagaattggaaagagctttttgaaatgctcatgggggataatgctgaccttcgcaaagaatggatgagtcagtagtttactttaccacaaggatgtggtataattaattgagtaaatgaggatattgaaatgaaatcatataaagtaaatttagaactttttgataaagcagttcatcgagaatatagaatcattcaacgctttttcgatatgggagaagccgaagaatttaaaaaccactttaaagatattagagataaaattcaatccgacaccgcaactaaagatgagctactagaagttgctgaagttattaagcgtaatatgaattaatgaggaaattatgattatcaccactgaaaaagaaacaattcttggcaatggttctaaatcaaaagcatttagcatcacagcatctcctaaagtatttaaaattctgtcatctgatttatatacaaacaagattcgcgcagtagtccgtgaattgattactaacatgattgatgctcatgcacttaatggaaatccagagaaatttatcatacaagttcctggacgtttagacccacgatttgtttgtcgagattttggtccgggtatgagtgattttgatattcaaggtgatgataattctcctgggttgtataattcatacttcagttcatctaaagctgaatctaatgactttattggcggatttggtttaggttctaaatctccgtttagttatactgatacgtttagtattacttcttatcataaaggtgaaattcgtggttatgtagcttacatggatggtgatggtccacagattaaacctacattcgtaaaagaaatgggtccagatgataaaactggtattgaaatcgtagttccagttgaagaaaaagactttagaaactttgcttatgaagtttcttatatcatgcgaccattcaaagatttggctatcattaatggtcttgaccgcgaaattgattattttccggattttgatgactattacggtgtaaatccagaaagatactggcctgatcgtggtggattatatgctatctatggcggtattgtttatcctatcgatggtgttattagagaccgtaactggctaagcattcgcaatgaagtgaattacattaagtttccaatgggttcacttgatattgctccatcacgcgaggctctttcactggatgatcgtactcgtaaaaatattattgaacgagttaaagaactcagtgagaaagcatttaatgaagatgtaaaacgatttaaagaatctacatctcctcgtcacacgtatcgtgaattgatgaagatgggatattctgctcgagattatatgattagtaattcagtcaaattcacgactaaaaatctgtcatataagaagatgcaaagcatgtttgaacctgatagtaagttatgcaatgcaggagttgtgtatgaagtaaatcttgaccctcgactgaagcgcattaagcaaagtcatgaaacttcagccgttgcatcaagttatcgtctgtttggtattaatgcaacaaaaattaatatcgttattgataatattaaaaatcgtgttaatattgtccgtggattagcacatgcgttagatgatagtgaatttaataacactttgaatattcatcacaacgaacgccttctgtttattaatccagaagtagaatcgcagattgatttgcttcctgatattatggcgatgtttgaaagtgatgaagttaacattcattatttgtcagaaattgaagctttagttaaaagctatattccaaaggtagttaaaagtaaagctcctcgtcctaaagctgctacagcatttaagtttgaaattaaagacgggcgctgggaaaaagaggaattatttacgctcacatcagaagcagatgaaattactgggtatgtagcgtatatgcatcgttctgatattttctctatggatggtactacatctctttgtcatccatctatgaatattttgattcgtatggctaatcttattggcattaatgagttttatgttattcgtccgcttttgcagaaaaaggtaaaagaactcggtcagtgccaatgtatttttgaaactctgcgtgatttatatgtagatgcttttgatgatgtagattatgataagtacgtaggttattcaagttcagctcaacgatatattgataaaattatcaagtatcctgaactagattttatgatgaagtacttcagtacagatgaagtttctgaagaatatacacgactcgctaatatagttagttcattgcgcggtgtatatttcaacggtggaaaagataccatcggtcatgatatctggacagtaactaatctttttgatgtattatcaaataatgcttcaaaaaacagtgataaaatggttgctgagtttaccaagaaattccgtattgtttccgacttcatcggatatcgcaactctttaagtgatgatgaagtttctcaaatcgctaaaactatgaaggcccttgcggcctaataaggaaaattatgtacaatattaaatgcctgaccaaaaacgaacaagctgaaattgttaagctgtattcaagtggtaattacacccaacaggaattggctgattggcaaggtgtatcggttgacacaatccgtcgtgttttgaaaaatgctgaagaagctaaacgctctaaagttactattagcggtgatattacagttaaagttaatagcgatgtagttattgctccagttgctaaatctgacattatttggaatgcatctaaaaaattcatttcaattactgttgacggtgtaacttataacgcaactcctaatactcattcaaacttccaggaaattcttaatctgcttgtagcggataagttggaagaagcggcacaaaaaattaatgttcgtcgcgctgttgaaaaatatatttccggtgatgttcgaattgaaggcggaagcttgttctatcaaaatatcgaattacggtctggtttagttgatcgtattctcgattcgatggaaaaaggcgaaaactttgaattttattttccattcttggaaaatttgttggaaaacccaagccaaaaagcggtatctcgactctttgatttcttggtagcaaacgatattgaaattacagaagatggttacttctatgcttggaaagtagttcgcagtaattactttgactgtcattcaaatacttttgataacagtcctggtaaagtagttaaaatgccacgtactcgtgtgaatgacgatgatacacaaacttgttctcgtggtctgcatgtgtgttctaaatcttatattcgtcactttggtagttcaaccagtcgagttgtaaaagttaaagtgcatccgcgtgatgtagtatcaattccgattgattacaacgacgctaaaatgcgtacctgccaatacgaagtagttgaagacgttactgaacaattcaaataagggcttcggcccttatcatattaaggaaaattatgttaggttatcaagcacgagtaaaagaagaatacgatcaattaatgctcaaaattaatgcattgagcaaatttttagaaagtacaaagtttctaacgattaatgaagttgagcaagaattactgctttcacagttcatctcaatgaaatcttatgcagattgtttagaaaaaagaattgcgcaattcaaataaataaggggcttcggcccttttgttttaaggaaaattatgatttattgtatgaatatcggtgattccgacataaaagagattaaactgcacggaaatcatcacgctaatattgtgtactgcaataaatttgagtttggtcacgaaaaacttgggtttctttactgcaatgatgttatagtcatggacaaaaagaatctcgatgaacttgatcgtaattctttagatgaaaatgatcgaatttactatggtactcttaaagtgtataacgcttatcttagtggtaaaaaggaaagtttaaatgcagaaaacgaatccggggttacagagactatttcagattccgacatttaccctatcgaacagtgacttgactagtgaaatgaaggtcaaaattgttgatactgcaagatactctttaaaacaaaacccaaatcaggataaggcagaagttatcgaaagatgccgtatcgctgtgtacgcagagttttttgtagcagattggctgagcgggtatgttaacaaaggtcaagaagatgtcgatgatccgtacacatatgcatgggatgtattggcgcatccaagatactgcgggcttcgtgtagaagttaagacacatcaaactgactcacgttggatttcggtgacaacaggatgcagcggagagtatccatatggttctggaataaatctagggcccattctaaatcatcaagtcgcggactgtataattatattcaacactaaagaaattcacccaggtgtcatccagtacactccgaagttcatcggtgatagagaagaccttcgtaaggttgtaagaaaaagcaactacaacggatggtatctttccatttaaaaattttcacaaaacggtttacataccacaaggaccgtggtactatacaactatcaactgatacggatttggagagtaaaatgaaatttaaattttattatgctaagcataaaataactgatgagtttgtgtcagttgaatattctagcgatgatgaaggcatgatttatactcgcttaggattatcgcattgggagtccgatcagccttatttttcaactcctgaagaaattacacgcttagttaatggtcatatgaatgaccactggaatgtaattctttcagatagtcttaaagcggctattaacagtaatgaaatgaaaatcgctgagattgaactatgagttcactatggtggtgttttgtttggttaattagtattccagtaatttgtttaacatttacttttgtgatgaggttattatgaaaatttttaattctgtacttattgcttgtgcgtggtgggttgcacaagtttcggcagtagtgattggtattcacatttattacgaatatttttaaaaaagttgtttacaagactgttcttccgtggtactattaccctatcaactacggaggaacagaaaatgaaaaagattgttaaagctatatggaatgtagttataatactaatagttttgagtatattcccaatcgttttaatgattgatgtattaaacgcttactttggatttatgtgaggaaaatatgaagcgtaaacgcagtgcttttacatttattgaatggtttttcgataatatttttccggctttattcattttcatgctgatttttgccttaggttcagttgtagttggaatctatttgatggcggtagttggaatggacattcatcaaaatggtttaaaatccgtggttgaaacaatttggaatggtgtaaaatgatgaatttgctgagcggttggttttatattcttatgttttacattggcgcaaatttcccatattggatgggatggtcaacaactgcgtttggattttatactccttgaggtgaattatgaaaatctttaaagatgtaaaagttggtgaaattttttgtttagataatggtaatcagttaattcgtatttcacctcttaagagcactagcgagaaaccgacagttaatgctactttagcaaataacagtaatgaacgtttctgtattgaaaatgatactgaaacttataccgtagaagagttttgggaattgagcgtcgactgcgacgattaatttaatggccgcgtgtattcatgcggccttggagtagaaaataatttagaggaaattaatatgaaatatatgactgctactgatctgaataatgcgggcgctaccgttattggtacaatcaagaacggtgaatggtttttgggaactccgcataaagactttttatctaaacctggattttactttttagtaagtaaattagatggtcgtccatttagtaatccatgtgtgtctgcacgattttatgtaggtaatcagcgttctaagcaaggattcagtgcagttctaagtcatattcgtcaacgtcggtctcagcttgcacgtactattgcaaataacaatatggtatacacagtattttatctgcctgcttctaagatgaaacctctgacgacaggatttggtaaaggtcagttagctttggcgtttacccgtaatcatcattccgagtatcaaacacttgaagaaatgaaccgtatgttggctgataactttaaattcgttttgcaggcatattaatgagtaatttccacaacgaacacgtgatgcagttctatcgtaataatcttaaaactaaaggcgtcttcggacgccagtgaggaaaatatgaatattgcaaaattattaggagttatttcatttatttgttggatagtagcatgtgttttaactatctgtattgatgccagcagtgtgttttcgcaagctttagctcagggtatgtgtgcatatttaacatttgtgttgttatctactaatgattaagaaaatcttgggctattcattagcccttgctattttattacggaataatgttcggattaattcaagtcgtgcttttcatttctgatgttattatggcactacattcactagtatggtaaatttatgcaactgaataatcgtgatttaaaaagtatcattgataatgaagcattggcttatgctatgtacacggttgaaaatcgtgctatcccaaatatgattgatggatttaagccagttcaacgatttgttattgctcgagctcttgatttggcacgaggaaataaagataagtttcacaaactcgcttctattgcaggtggtgtagcagaccttggatatcatcatggtgaaaactctgcacaagacgcaggtgctttgatggctaatacttggaataataactttcctctgttagatggtcaaggaaactttggttctcgtaccgttcaaaaagcagcggcaagtcgttatatttttgctcgtgtaagtaaaaatttctatagcgtatataaagatactgaatatgctccggtacatcaagataaagaacacattccgcctgctttctatttgcctattattcctactgttcttcttaatggtgtttccggtattgcaactggttatgcaacttatattcttcctcatagtgtttcttctgtcaagaaagctgtattgcaagctcttcaaggaaagaaagtaactaaaccgaaggtagaatttccagaatttcgcggtgaagtcgttgaaattgacggtcaatatgaaattcatggaacgtacaagtttacttcacgaactcaaatgcatatcactgagattccgtataagtatgatcgtgaaacttacgtgagcaaaattttagacccgcttgaagataaaggctttattacgtgggatgatgcttgcggtgagcatgggtttggctttaaagttaaattccgtaaagaatactctttgagcgataacgaagaagaacgccatgcaaaaattatgaaagacttcgggttgattgagcgtcgttcccagaatattaccgtcattaatgagaaaggaaagctgcaagtttacgataatgtagttgatttaatcaaagacttcgttgaagttcgtaaaacttatgtccaaaaacgaattgataacaaaatcaaagaaactgaatcagcatttcgtttagcttttgccaaggcacatttcattaagaaagtaatttcaggtgaaattgttgtacaaggtaaaactcgcaaagaactgaccgaagaactttctaaaattgatatgtattcttcttatgttgataaactagttggaatgaacatttttcatatgacttccgacgaagcaaagaaacttgctgaagaagctaaaaccaaaaaagaagaaaacgaatattggaaaactactgatgtagttacagaatacaccaaagatttagaggaaatcaaatgagtccattcattggtatcacaagcgctgcattagtatctggtggcattttactggcgggtttaggtgttgttcctgccgtagcaggaggtcttcttgcgttcggaattcaacgtgttatcatgacagttatcacagtcatgcagtaattttagggagagcctcggctctcccttttttattttaaaattttttcacaaaacggtttacaaccaaagcatactgtggtactatacaactatcaaataaatgaactgaaacaaacaacccggagatacaaaaaaaaaaatgaaatttaaaatcgaaaacgaaatcgttaaagctaaaaatgctctgactgctaacaaactggttgtagatggtattgaatatgatatctgtggagttcgtgaagaaaaacctggtgttctgactttcttcacaatgatttttaaatttaaaggtgacacagaattcaaacagtttgattttgcccatgaagacgaaatcgaagttcgtaatctgaacattaagtaagtactttattagagctcttgaaaaagagtgcaaaaaagtgtttacttctgctttaaacatgatactatagacctatcaaataaatgaactgaaacggagattaaaatgtctaaagtaacttacatcatcaaagcttctaacgatgttctgaatgaaaaaactgctgcgattttaattaccattgctaagaaagatttcattacagccgcagaagttcgtgaggtgcatccagatttaggtaacgcagtagttaatagtaatattggggtattgattaaaaaaggcctggtggagaaatctggtgatggattaatcattactggtgaagctcaggatattatttcaaatgcggcaactttatatgcacaggaaaatgctcctgaactactgaaaaaacgagcaactcgtaaagctcgtgagattacttccgatatggaagaagataaagaccttatgctaaaacttttagatgaaaatggatttgttcttaaaaaggttgaaacttaccgcagtaactatcttgctattttagaaaaacgcactcacggaattcgtaattttgaaattaataacaatggaaatatgcgaatttttggatacaaaatgatggaacaccatattcagaaatttactgatattggaatgtcatgtaaaatcgctaaaaacggcaatgtgtatcttgacattaaacgctcggcagaaaacattgaagcagtaatcaccgtagcatctgaactgtgaggaataaataatgaacaagttagaaattgttaatgaacttcgtcgttgtgcagaacccactcaagaggggtgggatatctggtatcatggagcttatcttggaactatcgtaaagattaagactggtaaatacatgattattcgtgaaagtaaagatgctccagtaggtattcgcaataattttatggcggcgataagttcatttacggatgcagcttacgaaatttaccttgctgattataaagaattccaggaatctcaaccagttattcgctcaattggtgttaacaaagctcaacagaaaactttgtggcagcgtattaaaggatggtttaaatgaacccatttattaatcgtttaaaaatgctgaatgttcctttatgtcgtgaaactccagaaagtcttgttgaaaaatttaaagcgcatggttataaatgcacagaagaagatattctaaaagaagttcctgaaatctgttggcagaccgcatactgggatgaaaaccaaaagtatcaacgacgaattgtttgcgcagccaaccgttttaaattaaaagatggacgaactcttgttattccaggtgctcgtcattattctaaagatatggcagcagttttagatgtagttaaacctcaattagttactcaacaagtttgtgatgatgaccaagggtttattgaccaatatagtaattattggacacgtgaagaagcaatgattattgcaacttacgccggacaagtacgtattgaacgcggtggtagtgaaaaagaactttattctgaggacctttactaatgaatattaaaaagtttcaaattgatggaattaagaatcaaatccaggcactagaatatgccaataaaatgatgtcaactaattggggaatttatgccaatgaaccggcatttcagttctgtgatatggaattcactaaaaagctcgtaggaaaaaattatgtatgtccatttagttctccagtaaatggaatgctaaaacctgctttacgcgatctttatattgcgatgaacgaagaaatgataaaagaattaaaacgtcaactgaaggtgattcaatttggccagggaaattaattcaaaatccgattattttaattctctcaatgataaagataaaaatttaataagacattttatcgttgagatgggatatactgacacgcatgatttaagagaacatatatttgaatgtggtgtagctaaaaagttttcattcacatgcaaatgtctaagagaggtaattcagcactatgaacaatttagtcgcaaaacataattttaataaagcttctgtccataaagataagaagaaagcgtttaaagaatctaatcgcaaacagaaacataaggggaaggtctatgattattgattctcagtctgtggttcaatacacaatcaaaattgatattctagaaaagctatacaagtttctaccaaatttataccattcaattgtcaatgaattagttgaagaactacatcttgagaataacgatttcttgattggaacttataaagacctctcaaaagcaggatatttttacgtaattccggctccaggaaaaagtattgatgatatattaaaaactataatgatttatgtccatgattacgaaattgaagattatttcgaatgagtcataatcttgaaaaggtaatcgagcataatgtagctcaggaacgtgagtcgttcaaggaattcgtagaaaaaatttttgaagaaaataacacagaccagtttacaaatcaagcgtctgatgatattataacaaagtcaactaattgagtggtatagttaatgaataaaaacattgatacagttcgtgaaattattactgttgcatctattttgattaaattttccagagaagatattgttgaaaatcgtgctaattttattgcatttctgaatgagattggagtaacgcatgaaggtagaaaattaaatcagaattcattccgtaaaattgtttctgaattaacccaagaagataagaaaaccctcatcgacgaattcaacgagggttttgagagtgtatatcgatatttagagatgtatacgaacaaataattatttagcccttcctaatattctggccgcctgagcacatattgattcaaggcggtcattacttatatgatcatttctataccagtacatggttatcgttccagcatagatattatccaaattaaaatatggacaactgtacatgtagtttatttcgggagtaggctttttagttggtaaaaaagcaaattttgagtcagaataataatgacgtccatttaaatgaactgtatattcatccatagttttatcaacaggatatcctccaagtgatttttcacttattgttgaaggtaattttccttcgtatgctataatatcaacaaaatagtttaagtttttagggcggaaagaatacaccgcactaaagtctgcctcagatgatatatgaactatctggagttgttccagggcgacagattcaaagcgtgcatttctttccttttcaataatttcactgtatgtttcatactttgattgcttatagtactcaaagaaactatctcccctataccaaacaatcgccatcataaataaaagaattacgacagctacccgggaagcaagaactttcccggtagcgttatctttgaacaagcgatctagaacaccaaacagaatatcagagggcgaaaatgatattctaggtgctgccatagaccctccttttaaggatatttattcaaaattatacccttggaccatatattactccaacattttgccatgttggagctgatcctataacagcatatccggcagcgccaccagctccaacttttagaactttaccgccatcataccaggcattttgtccatttgcgccagcatcaccaccctggccagagtgagcattaccataattataaccacctcctgggccatcataagaagctgcgccgccggaataacctccgcctcctcctgggccaaatggtcttcctccaccaccaccaatatcttgccaatttgcaccagagtgaggacgataagcgataccacctccacctccacctccaccacaaattactccaccgttattaattcttaatcgtccaccgatgtcattttgaatacaatgaccaccttgttgaccattaccatctccgccggaatgagtccatccaccttgtccacctctaccccacatatggacgccgccaccaatattcaactgaacatattcattaggtgtatctccgtacatgaagaataaaggaacgtctctagaatatgataccaaatttccggtaatattaaacactataggtgcactacctgcctcaaaacatctatctcggaaccattgaccattaaagttatggtccgctccaagggtgtgaattacttcaacagatcgacctatcatattactcatccaaaacggaattcccattctcaatctctgcgcggcaccacccatccaagggtctccagtttgtaccctcgcagaccatcctacccacggtccttcaactgccatataaacctccaaggggccgaagcccctcattttattttaacaatgatttaactaattttttaagctcttcaatctctgacttaagttctgcaatttctgcagtatgctcattgattgcagctgtatttaaaccaattacaccgttatagttcaaacgaagtaaagcttcactatcctgatcgccttcaaccaattcaggtaaaatagcttgaacttcttgagcaattaacccagcgtttggttcccatttctgattaccttcttcatctaggcctcgcttctgcatataagtgtaaccattaatttttgaaagcttctcagaagcattttcaaatttaactaggtcctttttaacacgaatatcagagcggacataaacatcgcggacatacgttgaatagctgtcattcgcctgaactaaatggccatgagaaataattgctttgccaacttctgtccaaaaagctccatttgaatcccaaaggcctggatgagattgatacatcgtgccccatgatgctatatgctgcgcgttagcatacatattaattcgaccatcgccgccatgaactaaaccggtatcatcatccccgatggcgatagatgctccaccccatactggaattgtgccgacgcccaagttaacaccagcacgaaggccagccggagctttaaaatcaccattagcctgaaacacaaatattgcattaggatggctgctatctccgctttccgcagaaccaacacgaattactgcatttccccaagtagcatttccacccaatcgaataataccaaaatctgcctttgtggcatatccttcgttaatgatttggcttcttcctttaattataggcatataactatctttcggaacagattcaccaaagtcaacgaagaatggggcttctgtttgccattgattattatagccgtgaccttgtgtagctgtccattgtcttccatttaaatataaacgataaaaatttaatgaagctgcagtagcttgatttttgacgttaaaatcaatatcaccaacactattaagagtaattcctgcggtagttttgaaattataaaatgaagcagtgtcatctgctcctcctttaccgatgtaccatgaattcgctccacccgatgttccaagtaaatagcaagaatcattttcatcggcagcaatgttaatagcgtcagagcctcttctaacgattaatttgccagtcatcgtatcaccgcctttacctacgcgagtattcaaggcagcatctaaatttgtcgcattgttatatttcttccagattgaaccggcaatattaccatctgtattaaggaacgcatcaccgacatatacacgccctggagatttaaaataacctgacggcatgaaagtccattgttttaacccatctgctgttccattagcggataaatcaccctgagcaatgatcttatattcggatgtacctatagccataccagtggcaaaggtgatattacttacagtatttttctgtttaacaattggcgcaaactggtttttatttgaatcgtcaatggcctgatataatggtgcaatggtagtattctgattcgcgtaagtattagaaccagaaccgctagcaggggcttgaatatatgctcctggagcaagtgaaattttctgattagcaccaagattaacagcagcagtgatattcaacaatcccctaaagttttgttgagcagtccaagtatgtgatccgtcttcaagaacaacacggcgaactgtgcaagttctatttccagaattaccgaacacacgaacgacaaaataacggtagtttgtctgggatacagtaccacgccaaacctgaacagtacgtcctgtgctggtgtgttcgctaggaccgacagaaaacataaccaagtttccgtcaatcgtcccccaatccatatttgctggcatattctttattttgttcaaaggaacgctaaacatactaccagggacaaaatcaaaggtttgccaatctaactccgctaattgagctttaataccacccatacccaaagtaattggcagagaataagatgtatatacttcgttccatgcaccccacgcaccaccagtatatgcacgctcaaaaatacgatcgcgagtagttgcacccgttcctgcggtagtgaaacgttggaaaatagcaccgccagaagcacgctgtttaacttccagcaaaccaacaataacagtcggcaaaccttcacctgtaggacagttaataacggcatcagtgcctaaaatattatataacccgggagttttaaaatcattcagatctccatcatagaaagtcgctggtgtgccatgaccaacctgcttccattcctcccacttaggtgcactagcatcccatgcagcagcgagacaacgagtataaaccatacccatgcgggtagtataacgctgagttctcgcgtataaaccaccttcaaatatttctaaaaatccttgtgcggctgatccttcttctggataatggcgatcaaatgatgcgattgcgcttgaactgtttcgccataagccacaatgttctaattctcccaagctatcaaggtcaatcgtttgtgaaagtggacgagttgacgcttgaacattacgccacacaccccatggaccatcgacgccattccatttagcagataaggaacgaatatagacgttaccagatcttacagtataacgctgagtgccagcaaattggccggccacaaatacttctagaacacctacagcattttcttctggaaatttatttgctggttgcgcatttgttgaagtagatttcgaccaaacaccaagatattcttcaatgggcccatacgtatctaaattagcatcagtaggtaattcgccattattttttataaatgttgtgctattgacatttatgtcagatggagttaaggtaatgtcctttgacccatcaaaagatataccattaattttcctaggtgtttgcaatttagtagctgtgctagaatttccaattaaagttccagttatattttctgtaacctctaaagacccatttatagttcctccatattttaaacctaattctataacactacctgagtcatcttttgtgaaaattgttttatcttttaagtttatagccaattcaccttcggctaatactgaagcagcaggacgttgacctgcagttttgcttcttttaaattgtatttgttttaaagtagccataagtcctcttaataatagccgaaatcttgaacagaatccttaattacgatttggtcaaatcgtggaacgtgtgaaggttgagatgcaggattctgtgaaaaaaggtttggcgcagttaaatttcctgtcatagtgtctccagagcgtaataccctagagtttgcatttgctgtaacagtatttattgctccatcaacataatctttgcgagtaacatcagatgctgcggaaggagtagatgtaacagttactgatggagccgttacagccctggtaaatgttgtcaaaccttctggcgtaatagtaatttgtccagtagtgatttcactacctgcaggtctaaaactaataccaccggaagagccgccaactacaagagtattaccagtgccgccaccagaacgaattcggataggggtttcattattacttaattgaagataactatttaccccgtaattaatagtaattggaccggcgtaagtaccaccattagctttagaaacgaaatcgttatcagctgcctgcggtttattatattctgaatatattttaaatgatttgtagagtacatcgtcaccggctgaattcaatggaaaatttccttgatgccaaatgacagatccacccacagttgaacctacttttaaatcagccattatatgcccctttattttaatattatttataaagaaaaagggaacccgaaggctccctcagtttaaacttctctaaattcctgtccaaacactttgccagttttagaagaggcttgtgtaggaagtaccattatatctggaggtgaagccgattcacagacataattaacgcgaataccgttgacgccaaattcggcaggttttgaaatgccgccatttcttgatacttcagaaaaacttaaatttctcatgccgccttgacctgcttgagcagttctttgtgcatatatcgtaaatcctactgcattttcaggaacaactacataatcttcttttaattcccaagacccagcttgcccagtaaactcagcttgggtagaggaaatatatccatttgatgcatcataaaaacgaatggatatgtttgtagttccaagatcaagtaaatcagcatcagcatataactgtgctttaagataaagaacatcaccaggaattaaattatagtcagaaagtttacttatagcagctgaagttggcaatcgcgcaatttcattattagttccaccaaccgcagacataaattgctcaacgctttcgtatgttcttttaggaaatcctgtagctccgacgtcttctaaactatcaaatacaacatctaacatagtttgatagtcatctgtgctttttctattacttagtttaacatgctctaatgcgatagctcttttagaagaagtgtaaaaagcagcatatgatacgtcaaatcttgacaatactgaatctgatggaaaaactgaagttcctgctccccttaaccaagataccacttcaggaggaaaattaacctttccgctagttaatatagcaacaagtctattgtttgacaaagaattcatgaaactgacaaaagcggcagatgttgtattgtttgaagcagaaaaagcatatgacttgctatcaactaatgctcccgtagaagggtcaaaaactcttaaatgaagacctgcactaaatgtttgatttccaacgggattatcctgaaatttaacatatggtcccgcagtagaaagcgggcaagaacccgctatgcttattttatatcttactgaattgctttccgataaaaatggcgtttggacatatccttgtccaaactctgccataaatttttccataatacctcttattcaatccactcaaatttaacagttttattcactgggtcaggaataatgcgaacattaccaattcgcaagaaatcgcgaatagtaagattacctattattccattatcagatgggatcgctcctatatctgaaggttgaggagggttacctccgtcaaatacctgaacaaaacttgaccaagagtttttggttttctgccatgtacgtgtccagcgagtggtacgtgcttctggggtcgttggataagtaatccaatcttggtaaagtgaatcaagtgtgttaccaaactgagtcaatgtaccaggagatttaacttcttcaccacgttctaagtatggaagtccagtcacttcattagttttttcaaccatcttaaaataacccgggaactggttataagtggctgaatcattaatatcgattgaccagaatcctacagtatcagatgttggagcacgggtatataaatcagaggttttagtaccctgagaacgaattctcgagttaacagttaaaccacctgaacttatagtagcacctttggcaatgattaagctttcaccaatcgttacttgaccagatgcattattaatagttaaaggacgtaatccattaaatccaccggtctgatcgccagatgcagtaagcataaaataggtgttagcaccatcattacgaataaagaatccataatcaccgtttattgctctaaaagcattcgatgatttactgataaattcgccattagcagtaactgaactaccgaatgttgcaacgccattcgcattcaatgttcctgaagcattcacatttatcggcgttactgtaccgttgatattaaatgttatatttccagctttattacgctgagaataaaaatgactagacgtttcatcactaacttcaaatacggtagaacgtgttgtgtctgattccccactaaattgatttccccacactctgactgtcatcgtttgagctgggtttgttccagtttgaggtcctttctcaaaaatcagacgagttgccgttccagtattagaaatagttaatgtactatttgctgaaactgatccaccgaatgtagcagtactagatgatacaagaggggcactcagattcgtttgttgggttaaggttagtgaaccattaactgtttgtgcaatgtccctacgaatgaactggagcgaatctagaccatctaataaattactgtctacagcttttgcttttaatggcaaataatttgctaatacgcgatttaattcatatggtgatactgcataaccatttttctcatatgattctaatggctgtgttgaacctaccgtatcattaccaacgaatgtaattgaaccagatgaagttttaacaaaacctcttattgcagtagtagctgcccaagtaggttcactctgcacaatccattttaaattttttggagatacagcagtatttgctgacgttccagccacagtttcagactgagttgcaactttaatgacaccttcctgtgcttcagtagatttagtacctaaaagctttttaggagttattaaaacattatctaatgttcctgcagcagcttcaacttgtgtagctacacgaagtgtaccacgctgtgtctcatttgcttcaagaatattaagggtataatggtcccagagagttcctgattcaactaatccagatagagcaacaacagaagtacgatcagtactattaaatctggttttaatttttaatggtgtagagatacgagtatcgtcgacgcctgcgtcgaattcaacctgtgtagcaatttcagctataccacttaaactttcagttgctttacggtcatttaaagttttaggagtgactgcgcgagtataatcagttcctgtattaacttcactttgcgtagcaatttcaattaaaccaattcttgcatcagttgatgtctttttatgtaacgtttctggcgttacaaccgcatttgcccatccttcttggctttgtccagcaattacttcactttcaactgctaaaattactgcgccttgttgcgttggagtagctttatactgatccaaagctttaggtgaaacaactaaattattagtgtttttattataaacattcgtaccatttaattcacgactagaagctggagtagctcctgcggtagatacaaaagttacaataccagataatgattcagaaccttgacgagcttgaagctttttaggagtgatgattgtagtatcatcagtacctgtattagtttcctgctgcgtagcaatttcagcgacacctctacgagtttctgtagcagttctttcattcagctttttaggagtgatgataaggtcatctgcaaaagagaatgtggtgttctgatttacttgagcagtagttgctattcttgcaatacctctgcgagtttcagtagcagtacgattagctaacgtttctggagtaattgccaattctttttgcggagaattttctaaatcagcatttgcttgagcttgtgtagctaaagcaattacgcctaatcttgctctagtagaattatttaaagaatcgactctttcaactgttggaacgttttgctgtacaacccagtattttccatcagaatcttctatataagcaagttgcaaaactggtacataattagtttcaccattaaaaactaattcttgaactgttacccattcagcttcaggcggatattctgaacgttttgggaattgcagcaattgaactgaagaagcaattttatcttcaccggcagctttgattttaactgtttgtccttttctcatgtaattcatggaaattttaacagtatcaccaacagaaatatcagtcggaagctgaagctcaattgtttgagttgttccattattcgcaccaaataccataacttcttcatttggacgaatgtttgaattagtcgttataatgcgtaaacgtgctttactatccccgtcaaacaatctccacaatttctcattatcatcaaacatcaagaaaccgtcaatcgatgtacggccttcaatggaatgagttccaacttcttgcactgacgttgtttcatcatatgtcgtaacaattgtatgataaagtggatttaatttatctaaatcaacgaaattaatgatatctccatgattggcaaatcttggaagtttaacattaatcggtgcggcagaagtaaatctacgtacgataaaatcattagattgtgcttgatatgcagtcgatggagtaacaattgcagcttctctgctataatcagcaatatacatttgccacaaacggttattaaaaatgaataccatctgtgactttggatgagtcattaaaactgaacgtacctgttcacctctaaaattgacaatactccgatttgaagaatttattttaacctgatttatgccaggttttccaccgatatcttgaattattacggtttctccatcaagcggagaaggtggtaaagtaaactcaatgtcattgccaactgatgtatctactgaaattgcttctccggattttaattgatatggtccagatgatacggttgtatatacggcatcagtacgtaatgctttccaacgaattctattaaaatttccagcaggttttggaatattatccgttgctgcccaaaaacgattattataaatgattacaaaatcttttaaatatccacgagttggatcatattgctgaactgtgttttcttgaattaagtaatcaacgttaacaccgtcagttcctacggtacggtcagctaaagctacgttgattattttatcgccacctgcgtccagaccatcttctgctctgaactttcttttaatctcggccattctcccgggctcctattgtgttttcaataataagtatttatacctgtttactttaagatttagatagtatataatagaaatctcactaattgaacgaggttcatatggatttagaaatgatgctggatgaagattacaaagaaggaatttgctttattgactttagtcaaattgctctttcaactgctctggtaaacttcccagataaagaaaaaattaatttatcgatggttcgtcatttgatattgaactcaattaagtttaatgtcaaaaaagcaaaaacgcttggatacactaaaattgtactgtgtattgataacgcgaaatctggatattggcgtcgtgatttcgcgtattattacaagaaaaaccgtggaaaagcacgagaagaatctacttgggactgggaaggttattttgaatccagtcataaagttatagatgaattgaaagcttatatgccatacattgttatggatattgataagtatgaagcagatgaccacattgctgttcttgttaaaaagttctctttagaaggacataagattttaatcatttcatcggacggtgactttactcaacttcacaaatatccaaatgttaagcaatggtcaccgatgcataagaaatgggttaaaattaaaagcggttctgctgaaattgattgtatgactaaaattcttaagggtgacaaaaaggataatgttgcttcagttaaagtacgatctgacttttggtttaccagagttgaaggtgaacgaactccttcaatgaaaacttcaatcgttgaagctattgctaatgaccgtgagcaagctaaggtgcttctcacagaatctgaatataatcgctataaagaaaatttagttctaattgattttgattatattcctgataatattgcttcaaacattgtgaattactataattcatataaattaccaccgcgtggcaaaatttattcatattttgtaaaagcgggtctttctaaattaactaatagcattaatgaattttgaggtgaataatggctaaaaaagaaatggttgaatttgatgaagctatccatggcgaagacttggctaaatttattaaagaagcatctgaccataaactgaaaatttccggttataatgaactgattaaagatattcgaattcgtgccaaagatgaacttggcgttgatggtaagatgtttaatcgtctattagctttgtatcataaagataatcgtgatgtgtttgaagctgaaactgaagaggtagttgaactttatgacacagttttctctaaatgatattcgtccggtcgatgagaccggtctttcagaaaaagaactttcaatcaagaaagaaaaggatgaaatagcaaagcttcttgatcgtcaagaaaacggatttattattgaaaaaatgatagaagagtttggaatgagttatcttgaagctacaacagcattcttggaagaaaactctattcctgaaactcaatttgctaaatttattccttcgggtataattgaaaaaattcagtcagaagccattgacgaaaatcttttacgtccttctgttgttcgttgtgaaaaaactaatacattagattttctactatgattaaactccgcatgcctgctggtggtgaaagatacattgatggtaaatcagtttataaattatacttaatgataaaacaacatatgaatggaaagtatgatgttattaagtataattggtgcatgcgggtgtctgatgccgcttatcaaaagcgaagggataagtattttttccaaaagctatcagaaaagtataaattaaaagaattaactttaatttttattagcaatcttgtagctaaccaagatgcttggattggtgatatctctgacgctgatgcattagtattttatcgtgaatatatcggacgcttaaagcaaattaaatttaagtttgaagaagatattaggaatatctattattttagtaaaaaagttgaagtttctgcttttaaagaaatctttgagtataatccaaaagttcagtcgagttatatttttaaactacttcaatcgaatataatttcgtttgagacgtttatcttgcttgattcgtttttaaatataatcgataaacatgatgaacagactgataatttagtttggaacaattattctataaagttaaaagcttatagaaaaattttaaatattgattcacagaaagctaaaaatgttttcattgaaactgtgaaatcttgcaagtattaattgcttattataaatagattataattatctcactgaccagctatgaggtcatacatcgtcatagcaccaactgttaattaaattaaaaaggaaataaaaatgtttaaacgtaaatctactgctgaactcgctgcacaaatggctaaactggctggaaataaaggtggtttttcttctgaagataaaggcgagtggaaactgaaactcgataatgcgggtaacggtcaagcagtaattcgttttcttccgtctaaaaatgatgaacaagcaccattcgcaattcttgtaaatcacggtttcaagaaaaacggtaaatggtatatcgaaaattgctcatctacccacggtgattacgattcttgcccagtatgtcagtacatcagtaaaaatgatctgtacaacactgacaataaagagtacagtcttgttaaacgtaaaacttcttactgggctaacattcttgttgtaaaagacccagctgctccagaaaacgaaggtaaagtatttaaatatcgtttcggtaagaaaatctgggataaaatcaatgcaatgattgcagttgatgttgaaatgggtgaaactccggttgatgtaacttgcccgtgggaaggtgctaactttgtactgaaagttaaacaagtttctggttttagtaactacgacgaatctaaattcctgaatcaatctgcgattccaaacattgacgatgaatctttccagaaagaactgttcgaacaaatggttgacctttctgaaatgacttctaaagataaattcaaatcatttgaagaactgagcactaagttcagtcaagttatgggaactgctgcaatgggtggtgccgctgcaactgccgctaagaaagctgataaagttgctgatgatttggatgcattcaatgttgatgacttcaaaacaaaaactgaagatgattttatgagctcaagctctggcagttcatctagtgctgatgacacagacctggatgaccttttgaatgacctttaatagattatattactaattaattggggaccctagaggtccccttttttatttcaaaaattttttcacaaaacggtttacatccttgtccttccatggtactatacaactatcggcaatactgctgatgattaaagaggaaaataatatggctaaagttgatattgacatcgttgattttgaatatattgaagaaattattcgtaatcgttatcctgaacttagtatcacaagtattcacgatgatcccaattattgcaatttttctattgtcattgaaggtcctcttgaagacctcacccgctttatggctaatgaatattgtgatggtatggattctgaagacgcagaattttacatgggattgattaaacaataattatcaaggggctattacaagccccgttaaaatgaggaaaacataatgtatatcggtaaaaagtatgaacttgttccaagacttattgatacatttattaattatcgcccacgttctaattcagcaatagttaaaattattcaagaaaatggtggatggtttgaagttaaagaagctttctttgttgatggatttagagtaataaaacacattgaatgcgcaaatggaaagcatttttactttaacgtttgtgaagacgaatttcattgttttcgtgagtataaagaaccgacttctgaagaagatggagccgaagacatagtttctggcgtaacaaaaattcactgcattgttgacgaaaacaatgtagatgaaatcattgaacttttgcgaaaaactttcaaaaagtagtttacaaaagggtagtagtgtgatactattaccctatcaaaactaatggagaaaagaaaatgttcgcaccttatattatggcagcagttatgttggtctgtttatatcttttgattaaagcttgctaaggagaataaaatgagattacaacgtcagagtatcaaagattcagaagttagaggtaaatggtattttaatatcatcggtaaagattctgaacttgttgaaaaagctgaacaccttttacgtggcatgggatgggaagatgaatgtgatgggtgtccgctttatgaagacggtgaaagcgcaggattttggatttatcactctgacgtcgatcagtttaaagctgattggaaaattgtgaaaaagtctatttgaggaaaatattatgtctgacattcatgtaattggaatttcacaagtaaatattcgctgccaatttaaaactgtacccggggtgactcatattactttatcacacgacccatattctcgtggaagacagttaactggtgtaattaagtttttcggtggaattggtggtaatgaatttactgtaggcgatgaagaaattgttggctgtaaattaaaagttcagaagggcgtgttagaactttttagtgatgaagtttttgatgaaatctcacgagcagttaacaaaggaatgttaacgttaattaaaatgattaaagctagcggatatgttcctgatcctttttaataggagataatatgatttttgtatttgaatttatgaatgatgaatttgattatgcaatttttaacgcattgcataatcctgatttaagtgaatttaatgaaatgttttctgatgctttgagtatgtcagaagaatactgtggagaatgtcaacgtgtttgtgtgacagtttttgaaaacaaagaaaagacgtatgaagaattattctttgatgctaataaagccactgaatggtttatcgaaagaggatttgcgtaatgattaaattggtattcgcttattctccaactaaaacagttgaaggctttgacgaattagcatttggtttaggtgatggtttaccatggggacgagttaaaaaggacctccagaattttaaagctcgtaccgaaggtacaattatgattatgggtgctaaaacgttccagtcattatctacattacttcctggtcgtagtcatattgtagtgcgtgaccttgcgcgtgattatcctgtaactaaagacggcgatttagcacatttctatattacttgggagcaatatataacttacatttctggcggcgaaattcaagtttcaagtcctaatgcaccattcgagactatgcttgatcagaattccaaagtaagtgtaattggcgggcctgctctgttatatgctgcgttaccttatgcggatgaagtagttgtttcccgcattgttaaaaggcatcgtgttaattcaacagttcaattagatgcaacttttcttgatgatataagcaagcgtgaaatgattgaaacgcattggtataaaatagatgaagtaacaacccttacggaatcagtatataaatgaaataacgcgtggcggaaatatgaattttaattattaccctattctattagaaaaagacacgaaacagccaaagtggcagggtcctcagtttattaaaggtgtctatcaattagtagttcctaaagacaagatttatagcagttgtttcactgaatccgcttgcagtattttcggtaatagttcaccgtattggaattttgacataaagctggatagaaatatcgatatttggttgaaagctatggatattggtaatatcacgtttgatgagaataattatcatattattggtcgcttttccaaacgcggtaaagaattatatttcacgcctgaaattgagagaaaatttgatgctaaaccgtattgattatttagcttcataaaatgtattataatttatataaggtactaaatgaaacaataccaagatttaattaaagacatttttgaaaatggctatgaaaccgatgaccgaacaggcacaggaacaattgctttgttcggtactaaattacgttgggatttaactaaaggttttcctgcggtaacaactaagaagcttgcgtggaatgcatgcattgctgagcttctatggtttatttccggttctaccaatgttaatgatttacgtcttcgcacacatggtagtcttattcaaggtaaaactatttgggacgataactatgaaaaccaggctaaagacctaggatatcatagtggtgaacttggtcctatatacggtaaacaatggcgtgatttcggcggtgtggatcaattagttgaaactattgatcgtattaaaaaattaccaaatgataggcgtcaaattgtttcagcatggaatccagctgaactcaagcagatggcattaccgccttgtcatatgttctatcagtttaatgtgcgtaatggctatttggatttgcagtggtatcaacgatcagtagatgttttcttgggttaattgaggcctgagtataaggtgacttatacttgtaatctatctaaacggggaacctctctagtagacaatcccgtgctaaattgtaggactgccctttaataaatacttctatatttaaagaggtatttatgaaaagcggaatttatcagattaaaaatactttaaacaataaagtatatgtaggaagtgctaaagattttgaaaagagatggaagaggcattttaaagatttagaaaaaggatgccattcttctataaagcttcagaggtcttttaacaaacatggtaatgtgtttgaatgttctattttggaagaaattccatatgagaaagatttgattattgaacgagaaaatttttggattaaagagcttaattctaaaattaatggatacaatattgctgacgcaacgtttggtgatacatgttctacgcatccattaaaagaagaaattattaagaaacgttctgaaactgttaaagctaagatgcttaaacttggacctgatggtcggaaagctctttacagtaaacccggaagtaaaaacgggcgttggaatccagaaacccataagttttgtaagtgcggtgttcgcatacaaacttctgcttatacttgtagtaaatgcagaaatcgttcaggtgaaaataattcattctttaatcataagcattcagacataactaaatctaaaatatcagaaaagatgaaaggtaaaaagcctagtaatattaaaaagatttcatgtgatggggttatttttgattgtgcagcagatgcagctagacattttaaaatttcgtctggattagttacttatcgtgtaaaatctgataaatggaattggttctacataaatgcctaacgactatccctttggggagtagggtcaagtgactcgaaacgatagacaacttgctttaacaagttggagatatagtctgatctgcatggtgacatgcagctggatataattccggggtaagattaacgaccttatctgaacataatgcttccatttaatattgcatcatatgctacgttagttcatattgtagctaagatgtgtaatcttattccgggagatttgatattttccggtggtaatactcatatctatatgaatcacgtagaacaatgtaaagaaattttgcgtcgtgaacctaaagagctttgtgaactggtaataggcggattgccttataaattccgctatctttctactaaagaacaattggaatacattcttaaactcaggcctaaagatttcgttctcaaagattatcagtcccacggcgtcttgaaaggaaaaatggcggtgtaattttaatttaattgtgaggatttatgattttacgatttaaagatacttctgacgttgttctttttacacttcctaatccaagtgagctagaagttccaggaccaaatcagcctattatcatttatggcaaaaaatattatactcataaaatgactcgtgagtattttgataataaaatttccacagttaaaacttcttctgactgttactacgatattactgttttaacggaaaaacaatatgccgaattatcaccgcgcgggccgtctatgtcgggtagtgaataaatacaaatccgactttgatgttaatattcaccgtggtacattttggggaaattacgtcggtaaagatgctggcagccgggaggctgccattgaattattcaaaaaagattttatacgtcgaattaaatccggagaaataactaaagcacatttagagcctttacgtggaatgaggctaggatgcacatgtaaaccaaagccgtgtcatggtgatataatagctcatatagttaaccgattgtttaaagacgattttcaagttgaggacttatgcaattaattaatgttatcaaaagtagtggtgtttctcagagctttgacccgcaaaaaattattaaagttttatcttgggcagctgagggaacatcagtagatccttatgaattatatgaaaatattaaatcttatctccgtgatggaatgacaactgatgatattcagactattgtcattaaggccgctgcgaattctatttcggttgaagagcctgattatcaatatgtagctgcacgttgtctaatgttcgctcttcgtaagcatgtttatgggcagtatgaaccacgttcatttattgaccatatttcttactgtgtaaatgaaggtaaatatgaccccgaattattgtcaaaatattcagcagaagaaattacatttttagaatcaaaaattaagcacgaacgggatatggaatttacttattccggggcgatgcaattaaaagaaaaatatctagttaaagataaaaccactggtcaaatttatgaaactccacagtttgcatttatgactattggaatggcattgcatcaagatgaacctgttgatagattaaaacatgttatccgtttttatgaagcggtatctactcgacagatttcattaccaactcctattatggctggttgccgtactccaactcggcagtttagttcatgcgttgttattgaggcaggtgattcattaaagtctatcaataaggcttccgcttcaattgttgaatatatctctaaacgcgctggaattggtattaacgttggtatgattcgtgctgaaggttctaagattggcatgggtgaagtacgccatactggtgttattcctttttggaaacattttcagactgctgttaaatcatgctcacagggtggaattcgtggcggcgctgctactgcttattatcctatttggcatttggaagttgaaaatcttcttgttttgaaaaataacaaaggcgtagaagaaaaccgcattcgtcatatggattatggtgttcaactgaatgatttgatgatggaacgttttggaaagaacgattacattactttgttcagtccccatgaaatgggcggagagctttattattcttattttaaagaccaagaccgtttccgtgaattatacgaagcagcagaaaaagaccctaatattcgtaaaaagcgtattaaagcccgtgaactatttgaattgctcatgactgaacgctcaggaacagcaaggatttatgtacagttcattgataatacgaataactatactccgtttattcgtgaaaaggcacctattcgtcagagtaacttgtgctgtgaaattgctattccaacaaatgatgtgaatagtcctgatgctgaaattggattgtgtactctctctgcattcgtactggataattttgactggcaagaccaagataaaattaatgaattggcagaagtccaggttcgtgctcttgataatcttttggattaccaaggatatccagttcctgaagcagaaaaagctaaaaagcgtcgtaacctcggtgtaggtgttaccaactatgcagcttggctggcaagtaactttgcttcttatgaagatgctaacgatttaacacatgaactatttgagagattacagtatggactcattaaagcatccattaagctcgccaaagaaaaaggaccttgcgaatattattcagacactcgttggtctcgaggcgaattacctatcgactggtacaataaaaagattgaccaaatcgcagctccaaaatacgtttgtgactggtcgtcgctgcgggaagaccttaagctctttggcatccgtaatagcacattatcagcacttatgccatgtgagtcatcttcccaagtttctaacagtacaaacggtatcgagcctccacgtggaccagtctctgttaaagaatcaaaagagggttcctttaatcaagtcgtgcccaatattgaacataacatagacctatatgattatacatggaaattagctaagaaaggtaataaaccttatcttacgcaggtagctattatgctgaaatgggtatgtcaatcagcttcagcgaatacatattatgacccgcagatttttccaaaaggaaaggttccaatgtcaataatgattgatgaccttttgtatttttggtattttggcggaaaaaatttctattatcataatacccgtgatggttctggtactgatgattatgaaatagaaactccaaaagctgaagattgttcatcctgtaaattatgatataatttgactcacggacgagtcaccaactattaactaagtggaaaatttatgagcacagtttttaatacaaatccagttgatgttttaaaagaacctatgttttttggttcaggtcttggtattgcgcgttatgatattcaacgtcataaagtttttgaagatttaaccgaaaagcagttgtcatttttctggcgtcctgaagaagtaaacttaatgatggatgctgcacagtttaataagcttcctcaatatcagcagaatatttttactaataatctgaagtatcaatcacttctagatagcattcagggtcgtgcaccgtctgctgtacttatgtcattgatttcagacccaagccttgatacatgggttgctacatggacttttagtgaaaccattcacagtcgttcatacactcatattatgcgaaatctttatactgatccgtcaaaggtatttgatgagattgtattagataaagctatcatgaaacgtgctgaatctattggtcgttattatgatgatgttctggacaagacacgtatttgggaaaacgccaaagaaaactttagttattttgctgaaaatgaatatgatttagaagcatattcaaacagtctcactcatttggaagaatgtaaacgagacctgatgaagtcgctttatctctgtctgcacgttatcaatgctctggaagctattcgtttttatgtatcctttgcatgtactttcaacttccataagaacatggaaatcatggaaggtaatgcgaagattatgaaatttattgcacgtgatgagcagcttcatcttaaaggtacacaatatattattcgtcaacttcaatccggtactgatggtgatgaatgggttaaaattgccaaagagtgtgaacaagaagcagttgatattttcatggaagttaaccgccaagaaaaagattgggcagttcatttatttaaagatggcgatgttcctggattaaatacaaatagcatgtggagctttattgattacttaactgtatctcgtatgaaacagtgtggtcttccatgcccgattaccggtgctccggttaaacatccatatccttggattcgtgaataccttaattctgataatgttcaatccgcgccgcaagaagtagaactgtcatcttatcttgttgcacagattgataatgatgttgatgataaagttatgatgagttttaaaaaatatttttaaggagtgggccgcaaggcccattttattatgaaagaaattgcaacagaatattcatttattaaatatactgagctagaattagacgacaacggaagtataaaacaattatctattccaaacaagtataacgtaatttatgctattgctataaatgatgagcttgtttatattggaaaaactaaaaatttacgtaaaagaataaattattatagaactgctattaatcgtaaagacaaaacgtctgattctactaaatctgcattaattcatgctgcgctaaaggaaggaagcaaagttgaattttacgcccgccaatgttttaatctttctatgacaaatgagttaggtacaatgacaatcgcaacgattgacctagaggagccgctattcattaaactgtttaacccgccttggaatattcaacacaagaaaaatgatgcttccacatggagtgtggtactatattcaaaacacaaaagaggatacacaatgcaagaactttttaacaatttaatggaactatgtaaggattcacagcgtaagtttttttactcggatgatgtaagtgcatctggaagaacttacagaattttctcatataattatgcatcttattctgattggttacttccagacgcattggaatgtcgtggaatcatgtttgaaatggatggagaaaaaccagtaagaattgcttctcgtcctatggaaaagttttttaacttaaatgaaaatccattcacgatgaatatcgatttaaatgatgttgattacattctgacaaaggaagatgggtctttggtatcaacttatttagatggtgatgaaattctgttcaaatcaaagggttcaatcaaatccgaacaggctttaatggctaatggtattttgatgaatattaatcaccatcggttgcgtgatagacttaaagaattagctgaagatggatttactgctaacttcgaattcgtcgctccaactaatagaatcgttcttgcttatcaagagatgaaaatcattttattgaatattcgtgaaaatgaaacaggcgaatacatttcatatgatgatatttataaagatgctgctcttcgtccatatctagttgaacgatacgaaatcgatagccctaaatgggtagaagaagctaaaaatgcggaaaacatcgaaggctatgttgctgtgatgaaagatggttctcattttaaaattaagtctgactggtatgtgtctcttcatagcacaaaaagttcattagataatccagaaaaattgtttaagactattattgatggtgcatcagatgatcttaaagcaatgtatgctgacgatgaatattcatacagaaaaattgaagcatttgaaacgacttatctgaagtacttagaccgagctctgtttttagttcttgactgtcataataagcattgtggtaaggatagaaagacttatgcgatggaagcgcaaggtgttgctaaaggtgctggaatggatcacctgttcggtatcattatgagcctatatcaggggtacgatagtcaagaaaaggtcatgtgcgaaatcgaacagaattttttgaaaaattataaaaaatttatcccagaaggatactaagctgtttacaagttcctcatgttgtgttatagtagtcttactgacataacatgaggactttatgatggatttgcagcttattactactgaaatggtcgttgaagcatacggtgatactacagatgggatttctgtattcaaaggaaatcgtcgagttggatatatcaccgatcttaagaaagatttagctaagcaagtcaagcggaaaacgaccattaaagaatatcgaaatcgtcgtcttgagcaagcccgtgatatgcttcctgatgcggttgaggagatgaaagtctttttagaaaatcaactcgctaagtatgattgtgaagtgtttattaatcagactcaacctaatgttcatatcaatagctgcaaatgctatatcatcgttaatcctttgacaggaaagcatcgtcttggaattagtaatccaaatcgtagcgcatcggatatggcagaagatgttgcggcgtgctttaaaatttctaaatctccggctgaacatcatattttaattaacgggcttgctcaagacgatattatagaggttattaaaactttatgcatgtaagtaattttacagctggattgctattacttgtaatagcatttggcggaacatctattattttaaaaaataaggtagaaagattagaaacgtctgttgtagaaattacaaaaacggccaatgaaaacgccttagcattaaataatttgcgaattcagtataattatattgatgcgatgaataataaaaatcgtgaggcgattgctgctattgagcgtgaaaatgaaaaactgcgcaaagatgcaaagaaggcggatgtggtggctcgtaagccaggattggttgaaaaacaaatcaacaactccttcaacaagttcgcagaagacatccaggacctttctaaatgattaaattatctgcagtaatattatctattggtcttctagttggttgttcgacaaagcctctagaagtaaagaaagaaacagttcatcctaattggcctgtgcaaataaagtcatatgacgaagctaaactatcttggcaagttaaagttattgatggtaaagcttgggtaggtatgccatttgaagattctcaggaatttcgtatttggcttaatgatgtaaaacgatatgtacatgaccagaaaactatgatatgttattatcgtcaagagctaaaagaggataaatgtaaatgatttcatggtatcaatttgaacatctaaaaggattaatttatgaatccgagatggctgcaatgatttatggacgacagattcaacgattagaatctttacctccaactaatgatgttttattagctcaatcacgcgctaatctcaaaaatgaatatcaaaataagtggggtaaagcatctaaagacctgcatgattatattcaatcattggttgagaaaaataaatgaaaactctgttagaacgttatattgaatgttcagaccgttacattgatgcatgccgtgaaaatgtatcaagcattagccaagatattgaacatgctaaagctttagatgatgctggtaaagccctgcgaaaagaagcgaaagctcgtgggcttgatatgtatcagcttaaaaatcacatgataaaatttatttcatccaatgttcagagtaaatcagcgaatcaatcaacagctgaattgtacaaaggacggcgtgagcataatattcgtattcttgaagttttcttaggaattaaatgatgaaaaagattattttgactgtaggttgtcctggttctggtaaaagcacttgggctcgtgaatttattgctaagaatcctgggttttataatattaatcgtgatgattatcgccagtctgttatggcacacgaagaacgtgatgagtacaaatacaccaagaagaaagaaagcatcgtgacttatatgcaacacgatgcggcacatatgattctctgccaagacggaacgaagggtgtaattgtttcagatactaatctgaatcctgaacgacgtaaggtctgggaagagtttgccaaagagcttgggcatcaaattgaatataaagtgtttgatgttccttggactgaattggttaaacgtaactcaaaacgtggaactaaagcagtaccaattgatgttttacgttcaatgtataaaagcatgcgggaatatctcggacttccggtatataaagggactcctggtaaaccaaaagcagttatttttgatgttgatggcacattagcaaaaatgaatggtcgtggtccttatgaccttgaaaaatgcgataccgatattattaatccaatggtcgttgaactagctaagatgtacgataagcaaggatattacatcgtagtcgtttcaggccgtgaaagtggaactgaagaagactcaacaaaatattatcgtatgacccgtaaatgggttgaggacattgctggcgttccattagttatgcaatgtcaacgcgaacaaggtgatacccgtaaagatgatgtagttaaagaagaaattttttggaaacacattgcaccacattttgatgtgaaattagctattgatgaccgaactcaagtagtagaaatgtggcgacgcatcggtgttgaatgctggcaagtcgcctcgggagatttttaatggctttgcaccatgaaacttgggctattgttattgtaaatagcggtttagttggtactagtaatgggcaattttgtgtatttactagtgaaaatagagcatgggaggaatgtcttaaattaagagaaaagaatcctgatgttgaactaacagtaaagaaaactaaactgcctttaccatggaaaacttatgaataacatagaaaagatttatcgtctttgtgataaaattgaaaaagaaaagaaatatctattttgtttatggcctattgttgatggaagagtaggtttagatgttcttgattatgaaacagaagacaaagtagatggttcaacttttgataatgcgttggatgttattgattggctcgaagaaaattatgtgaggtaaatatgtttccgacttattctaaaattgtagaagtagtgtttagtcaaattatcgctaataatatgtttgaaaagcttgataacgcagccgagcttcgaattcatgctcaagtgactcatgtattgaacactttgcttccagaccaggtggattctgttgccatcacgttgtatccaggttccgcgcatatcattgttgtattcggtcttgatgctgagctagttatcaaaggcgacattcgttttgaatcacagacatcagaattcaaagcaatttaatagtttactttacggtagagttgtgatattatagctctaccaaaacaaacgaggaaattgaaatgagcgaatggtttgaagaagataaggtttatcgctttaaaactgggtataaagatatttttaatgaaacttgcggggctaataaacgaattgcccagtttattggggaaaattcatttaaagtaaaaatagatcctgcgaaaaatgttattagcattaaacgcgaaattgatgactgttggtataaagctgttgatgtaatgggcgaatcctataaagttagcccgttattttcaattgcttatatgttagaatattcttttttcgaagaagttcaaaaagatgattctgtcagtaaatttgaaattaaaactgataaagaaattaagtggaaagtagtaggtattactggttgtatgttctatatctatgctcaaactgatacgaaggaagaagctaaaaacaaagctctagaatatcttgaagagtatgaagaaggcccggtaatgattacccaagatgctgaattagtttctgtcaaattagttaaaaacgttgaaagtaaggagctaggatcaacatgctaagcgaaaaaccaattactgttaaagaattccaagaaaaagttaaactatttgctcaagaattggtaaataaggtttctgaacgatttccagaaacatcggttcgtgttattacagaaactcctcgttcagtattagtaattgtgaatccaggtgatggtgaccaaataacacatctcaaattggattttgatggattagttgaagcacaaagggtgtatggcgtactatgatgaatttaactgatataattgataattgtcttgaaaatgatactggcgatcatagagcgcttgactctgaaacagctcagttcattagaataactttaatgaatgacactctagtgaatagtattcatccttctgtgtatgatgctattattgtgacgaagtatccagttgagcttcacaaaaagatggttggcgcaatttttattgataagaaaaaccgctttaaagatgggcagaatataattagttctgttattaaaagtataactaaacttcgtcacgaaatttatcgtgttgaaactgctaaatctgcttatctggtgattatgaaatgaaagcgagtacagtacttcaaattgcatatttagtatcacaagaatcaaaatgttgctcctggaaggtaggagcagtaattgaaaagaatggacgtattatttctaccggatataatggttcacctgctggtggtgtgaactgttgtgattatgctgctgagcaaggttggttgctgaataagcctaaacatactatcattcaaggtcataagcctgaatgtgtatcgtttggttcaactgatcgttttgtcttggcgaaagaacatcgtagcgctcactctgaatggtcgtctaaaaatgaaattcatgctgaactaaatgcaattttgtttgctgcacgaaatggttcttctattgaaggtgctactatgtatgtaacactttctccttgtccggattgtgcaaaagccatagctcaatctggaattaaaaaactggtttattgcgaaacatatgataagaataaacctggctgggatgatattctgcgaaatgcaggtattgaagtgtttaatgttcctaagaaaaacttgaataagttaaactgggaaaacatcaacgaattctgtggtgaataatgaaatttcgtttggtacagctcacagcaattagttcttattctaacgagaacatttcatttgctgtagagtataagaagtattttttctctaaatggaaacagtattataagtcagaatgggtttgtattgataggccgtatagttggaaatctgatttagaaaaatgccaaaaattactttccacccttaaagaacgtggaacaactcatattaaaactgtaataggtaaataaatgaaattgacgactgaacagaaagtagcaattcgtgaaattttgaaaactaaattgtccatgggtatttcaaacgtagtttttgaaaagtctgatggtactattcgtactatgaaaggtactcgcgatgctgactttatgccaaccatgcaaactggtaaattgactgaatctgctcggaaagaatctactgatatgattccagtatttgatgttgagcttggcgagtggcgaggtttttctattgacaaattgatttctgttaatggtatgaaagttgagcatttactccaatttattggtaaataaatgctttaagaattatttgttattattaattcatctgttaacaaaaaggaaaaacgatgtctgaagtacaacagctaccaattcgtgctgtcggtgaatatgttattttagtttctgaacctgcacaagccggtgatgaagaagttacagaatcaggacttattatcggtaaacgtgttcaaggtgaagttcctgaactatgtgtagttcactctgtcggtcctgatgttcctgaaggtttctgcgaagttggtgatttgacttctcttccagttggtcaaattcgaaacgttccgcatccttttgtagctctgggtcttaagcagccaaaagaaattaaacaaaaattcgttacctgtcactataaagctattccgtgtctttataagtgatataaataataatatgaattgggtgtcggaataataagttaaccgaacaattctatgtggtagtctacaactgagagatctgtcgaaagaagatgaaattcagaagaacgtgactaccgagttttaatctctaacgagaatttttaaatgattaaacaattacaacacgctcttgaactgcaacgaaacgcatggaataatggtcacgaaaactatggcgcatctattgatgttgaagccgaagctcttgaaatcctgcgttatttcaaacatctgaatcctgctcaaactgcattagctgctgagcttcaggaaaaagatgaacttaaatatgctaagcctttggcttctgctgcacgaaaagcagttcgtcactttgtggtaacactgaagtaattcattggagattcactgccttagtgtgagctaaaatcgaggagccgtcgaactgtctgattaatgatttgcgaatcattatagttttaagaccccggcagttttacggtgtacctcttgaatgttattcttatagcggcaagtgcatgctaccccgaggtgatggccaatcgggagtacgcctcaaggcctatatatccatcagtatatatatcttatcctcgagaaatcgaacccggaacctttaagctaacggtgtgcaacagataagagctataaggtatgatgacgggtttatggttatcctggtcgttaaatatccaaaaacctatgttccccttgagggcttgcgcaggcaatgccaataagtcctgcattttcatttaaaagagaatttataatggcaaaacaagctaaagcaaagaaagcagttgaaaagaaagttggtgattctaaacgcgctggctacaagcgtgggtcgaactctcgtatcaatcaaactgttgagaagatcatgcgccgagcacgtgcggttcttcgagatgatgcttctcgttttggtaagcagaaagcataagttgaggactccttcgggagtccttttttattttccaaagattgcataaagttgtttacagtatggttcctttgtgatagtattatcttacacaaacaaaggagaataaaatgaaaacgattaatctgaacgctgcagttaaaactaaatgcttcaatggtaaatatgatgaaactatgtggttcttaatggcagttgaaggtgatattattgaagtagaaacaacagaaggtatgggaacagatttcacctttacaattcaagttcataatttctttactggttggatttatgaattgaatacagtaatcgttggaaaaattgaacaaaatgaattaggtgaatggtattatgttacagcccgtcaacgtgccgaacgcttaattgagaagatgaaaaaagttggtaaacttgacatgcagcattggaaagtagtaaaataattgtttactttggtacaggacatgatattatatacctgtaccgcaattaaacatcttggagaataaaatgaactacattaactttgaacgtaaatatgtttctaatggtattgcaggttctattgatactatttgcctttggaaacatcaaaatggatcagtatgcgaaattgaacagtatatgactcctaactacgtttatatgcgatttgaaaatggcatcacggtttcaatcacaatggaaggttcaaacttcaaaatcgctctggatgatgattttcgtcaacgcgatttagggacccatccttgctggaatggcgctaatcgtaagcttctggttaaaacttggattcgtcatattctgagtaacagagctaaacctgagcatcttgaagcaatctttgatgtagttcttaacgaatttgatatttaaaataaaatgaggggcttcggcccctattgaggaaaatattatgtttatgactacttattttgatacccgcaaaaatttctgtgaagttgttttctcaaaggcacctaaagaccttcctgcacatttgcaacctactagcgaatcgattaaaaactacgttgatgtggtttgtcctttagaattccgtacagtaaatgggcgtgatactctagctatcgctaaactcaatcgtgaaattgacattgatccctcaattgcacgcgaaattaatagttctgatattaatggcggtaatgttaaatcacatgggtttcagatgaggttctaatgaaattctttttaggtcaaactgttgaattaaagggagttggtatacctggattaatttctaaggttttacccgcatttaaattgggagatgttcaagtaaaagaggcttatattgtttcctgggtagatggaaatgaagaccttcgtatgggtgatgaattatctcctatctacggattaaaggaattagtatgaatataattaataagatttttggaattcagtacattaaggtcacatataaagtaacagataaaaatccgtatactgatgaacacgaagaaccacaagttgagtctattatattagaaaaggaccctaactggccagttgaatttcgtcttccttgctatggtcattgggctgatgttgaaattataagcattgaaaatgtctgagttagagattagaagcaattttaggtggccatcatgcgcattaagtaatttcgcccattggcctttcgttatggatggtattcaatttggaggtcttgaaggattcctccaaggatgcaaggtgaaaaacgttgaacaacaacgtcgtatatttgggttatctgggcttgccgcccaacaagctggaaggtcttatgctagagctcaggaccgtgggaccctcttctggcttggagttccattttcaagatactccccagcgtggaaagaattatacacaaatgcatattttgaagcagcgatccaaaataggggctttcgcgatgcattacaagcctcgaaaggaaaagttttgaagcacagcatggctagtggtctaacaaaagatgatacaatactaaccgaagctgaatttattgatgtgttaaacctattaagagactctctatgaagcctactattttaactgatattgatggagtatgtttaagctggcaatcaggccttccttattttgcccagaaatataaccttccgttggaacatattttaaaaatgatccaagatgagaaatttatttctccaggtaaactttttaattgtgatgaagaacttggcgtcaagttaattgaaaaatacaatcgttcggattttattcgttacttgtctccatataaagatgctctgtgtgtaattaacaaattaaaagaagattataattttgtagctgttacagcactgggtgattctattgacgctctgctgaatcgtcaatttaatttgaatgctctttttcctggtgccttctcagaagtaatgatgtgtggtcatgattcttcaaaagaagagttgttcaaaaaggcaaaagagaaatataacgtaatttgttatattgacgatctcgctcaccactgcgatcacgcgagtgaaatattaaatgttcctgtttattggatggctcgaggagagcgtgacaatatttcaaaaactgctcagcgagtttatacatggaacgatgtagagaataagcttttttcaccaaaggaaaataaagaaagctttgatagtgaaaaagctataaaagatgcaatcgagaagatgatcaaaaacgattcttttccttggaacactacctggagaactcctggatttaatccttataatcatctatatcatccatatcagacacatccgtttcagacatggaactatattaaacctggtggcatagagtatttgtataatagacctactagtggtgataatattttccaaggagcattctaatgtttgtcgttcacactatttatgaaaatgaaggtaatactacacgtgattatggtcacgtaaatcaattttttagatgcaatccggaattccgagctcaaaaagacgaacgaatttttaaaaaatgtgtagagcaaggtttcatttacgtcaagcactggatgcaaggaaataaagttagaactacatatcacaggtctttgcctgagcttaatgatgaattgatttataatagaaatgtaaatcaaactctgaaggatgaacaatgattcttaaaattctgaatgaaatagcatctattggatcaactaagcagaagcaagcaattcttgaaaagaataaagataatgaattgcttaaacgagtatatcgtctgacttattctcgtgggttacagtattatatcaagaaatggcctaaacctggtattgctacccagagttttggaatgctgactattaccgatatgcttgacttcattgaattcacgttagctactcggaaattgactggaaatgctgcaattgaggaattaactggatatatcactgatggtaaaaaggatgatgttgaagttttgcgtcgagtgatgatgcgagatcttgaatgcggtgcttcagtatctattgcaaataaagtttggccaggtttaattcctgaacaacctcaaatgctggcaagttcttatgatgaaaaaggcattagtaagaatatcaaatttccagcctttgcacagttaaaagcagatggagctcggtgttttgctgaagtccgaggcgatgaattagatgatgttcgtcttttatcacgagctggtaatgaatatctaggattagatcttcttaaggaagagttaatcaaaatgactgcagaagcccgccagattcatccagaaggcgtgttaattgatggcgaattggtatatcatgagcaagttgaaaaagagccagaaggtctagattttctttttgatgctcctgaaatcagtaaagctaaagagtttgccgaagtagctgaatctcgtactgcatctaatggcatcgccaataaatctttaaagggaaccatttctgaaaaagaagctcaatgcatgaagtttcaggtctgggattatgtcccgttagtagaaatatacggtcttccggcgtttcgtttaaaatatgatgtacgtttttctaaactagaacaaatgacatcaggatatgataaagtaattttaattgaaaaccaagtagtaaataacctagatgaagctaaggtaatttataaaaagtatattgaccaaggtcttgaaggtattattctcaaaaataccgatggattatgggaaaatgctcgttcaaaaaatctctataaatttaaagaagtaattgatgttgatttaaaaattgtaggaatttatcctcaccgtaaagaccctactaaagcaggtggatttattcttgagtcagagtgtggaaaaattaaagtaaatgctggttcaggcttaaaagataaagccggtgtaaaatcgcatgaacttgaccgtactcgcattatggaaaaccaaaattattatattggaaaaattctagagtgcgaatgcaacggttggttaaaatctgatggccgcactgattacgttaaattatttcttccgattgcgattcgtttacgtgaagataaaactaaagctaatacattcgaggatgtatttggtgattttcatgaggtaactggtttatgaaagcttacttagaaacaattgtcattgctcaaaaagaaggtggagatgtttctacttctgtatcacaagtcattctcgaatttgtagatgcatacgcttataataaatttacagaaacatttgatgcctatgaaaaaggaccaaagtttgaaatatatcgtactctcttaccactagattactaaaggccttcgggcctttaattttataaatagaataaacactagagaggctatgatggaacttattacagaattatttgacgaagatactactcttccgattacaaacttaaatccaaagaagaaaataccgcaaattttttcagttcatgttgatgatgcaattgaacaaccaggctttcgtttatgtacctatacatctggaggtgatactaatcgcgatttaaaaatgggcgataaaatgatgcatattgttccttttacattaactgctaaaggttcaattgctaaattaaaaggtcttggtccaagcccaattaattatatcaattcagtttttactgttgcaatgcaaacaatgcgtcagtataaaattgatgcttgtatgcttcgtattcttaagtctaaaaccgctggtcaagctcgacaaattcaagttattgctgatagacttatccgtagtcgttcaggtggcagatacgtccttcttaaggaactctgggattatgataaaaagtatgcatatattcttatacatcgcaaaaatgtatcactagaagacattccaggagttccggaaattagtaccgagctctttactaaagttgaatcgaaggtcggtgatgtttatatcaataaagataccggagctcaagtaaccaaaaatgaggcaattgcagcatctattgcacaagaaaatgataaacgttctgaccaagctgtaatcgttaaagttaaaatttcccgtagagcaattgcacaaagtcagtcattggaatcttctagatttgaaacaccgatgtttcaaaaatttgaggcttcagcggcagaattaaataaaccagcggacgcgcctttaatttctgattctaatgaattaacggtaatttctacttcaggatttgcactagagaatgctcttagcagtgttacagctgggatggcattcagagaagcttctataattcctgaagataaagaatccattattaatgcagaaataaaaaataaagctttagaaaaattacgaaaagaatctattacttcaataaaaactttagaaactattgcttctatcgtcgatgatactttagaaaaatataaaggtgcttggtttgaaagaaatattaacaaacattcgcatttaaaccaagatgctgcaaatgagttagtacaaaattcttggaatgcaataaaaacaaagattattcgaagagaattacgtggatatgctcttacagctggatggtcattacatcctatagtcgaaaataaagattcatctaaatacacaccagcacaaaaacgcggaattcgtgaatacgtaggttcaggatatgtagacataaataatgctcttttgggattatataatccagatgagcgtacaagtattttgacagcatctgacatagaaaaagctattgataatttagattcagcctttaaaaatggtgatcgattgccaaaaggtattactttatatcgttcacagcgaatgttaccttcaatatatgaagcattggtaaaaaatcgagttttttattttagaaattttgtatcaacatcattatatccaaacatttttggtacttggatgactgattcagctgttggtgttttaccagatgaaaagcgtctaaacatttctatcgataaaaatgatgaagggcttgttaattctagcgataatttagtcggaattggatgggttattactggggctgataaagtcaatgttgttttacccggtggaagtttagcgccttcaaatgaaatggaagttattttgccacgtggattaatggtcaaagttaataaaataactgatgcatcttacaatgatggaacagttaaaactaacaacaagcttattcaagctgaagttatgaccacggaagagctcaccgaatcggtaatctatgacggagaccatttaatggaaactggtgaattggttgcaatgacaggtgatattgaagtagaagacagagttgactttgcatcatttgtttcatcaaatgttaaacagaaagtagaatcatctcttggaattattgcgtcttgtatagatattgcaaacatgccttacaagttcgttcaaggataaatcatggaacttattacagaattatttgacggcgcttcggcgccggttgttaacttaaatcctaagcataaaataccacaaatttttgctattcaagccggcgaagaaagcgtgcttcctggatttagattttgtacatacacctctggcggtgatacgaataaaaacgttaagccaggtgacaaaatgatgcatatcgtaatgataggtgtcaatgagaaactatcattagttaaacttaaaaacttgggtggaaatccaattggtgtcattaatgcggtttttgatactgctcttcaaacaatgaaacagtataaaattgacgcatgcctatttcgcgtactaaaaagtaaaacaaatggcgcagctcgtcaaatgcaagttattgctgaccgtttagtacgtactaaaggagcaggtcgatatgttcttttaaaagaaatctgggattatgataaaaagtatgcatatattatggtttaccgtaaaaatgccaatttagaagacattccaggtgtacctcctatttcaactgagttattcacaaaagttgaatcaaaggttggtgatgtttatgtagatgttaaaacaggtaatgctgttcctaaagctgtcgctgttgctgcttctattgctttagaaaatgataagcgcacggatcaagctgttattcaaaaaactaaaattagtcgtcgattagcagcacaagctcaatattctactgttgatgcttcacttcagggtgatagcttcgctgctaagaaatatcaagagtttgaatctaaagttccggtgtataaagcagaaggaccaatgaactctggcgttattcaaattggttcaaacttcagcaaaggagctataggcggtatgagaagcgcttctcgttttaaatctagtgattatgaactcgaaagcttccgaaatcatattgcattagcccatgcacgtttacgtgatccatctatcaagttacagagcgatataacatatcaaggttctcaagaatatttaaagaataaagaattctttgattataagactgataaaattttaagcgatcttgctgatattaatatttctaatagctttgatgttattaagaaaattatcaatgatttggttaaaggttctaaagctacgccagatgaaaagacagctattattcaatttgtcatgaatggcatttataaattgattaatgaatctgctgctcaggcatatgaatacgcaagcactgaagtaactccaaaaggattaactcaagctgaatctgatgtaattgaagattattgtgcagattcatatgttgaaatgaactcgttccttttgggtaaaccagattctacccgtgaagaatatatggaacgagctattaaacatattgagacgcttgattctgcattcgctaaaggttcagttcttcctccaggaactacactttaccgtggacaagaagttacctttaaaactttgcgtcataacattgaaaataaaatgttctatttcaagaacttcgtatccacatcgcttaaaccaaatatcttcggtgagcatggtaaaaactatatggctctagatgattccggcgcagtattttctggtgaaggagaaggttccgttgatgcagaagatttgatgcatatgggtagtcattctacatatgctaatgaagatgctgaaactagcgtgggtatggtaattaaaggagctgagcgaatcaaagttatcgttccgggtcatttatcaggatttccgtcagaagctgaagttattctaccacgtggaattttactgaagattaataaagtaagtacttactttatgaaagaaactgcttataacaagtatctaatcgaaggtacaatcgttcctccttctgaacaattagaagaatcagtatatgatggcgaccatctaatggaaactggtgaagttcgtccaatggctggatttaatcaattccttgtagaagaatcaaaagaagaggaaagcgaagtttctcaaatcttagcttctttggttaacatcaacggaatgtctaaaaagttcaaaatgtagtttacaagtccctcgtgttgtgttatagtagtcttactgacataacatgaggaacacaaaatgaaatcttctttacgctttttaggtcaagaacttgtagttgaaggcgttattcctgctgataacgcttttaatgaagcagtttatgatgaatttatcaaaatttttggaacagataaaaagttcggaatttttccttctgaaaatttttcaaagccagaacagactgaaagtattttccaaggtgtagtaacaggtaaatttgagtcagaagctccggtaaaaattgaggtttatattgaagaaacctctgttgcttcagttgctgcttttatttcattccgtaaataaaatatggggacctttcggtccccattgttatattgctcctaatattttactttgcgaattgacaattcctgtcatagtattaatatttgaaatgcttcctgcagttccccctaatctactaagtcgtgaaagcgaattagatagtccagtaacacctccactatttccgagaacgctttgaataccatttatagtagcagattcaagccattcaatggcagcttgtctatcaactgctccagcctgcatcactctatacgcaaaagtaacatcaaatgtagttatttggttatctccatcatatgataactcaggagcgcttacggacactggaatgcatccagtgaacatcaccgcagtatgtggtaatccattgcgagaatgaagattaacctgaatatccgcctcgacatcttgcggcaaagcacgcaatccggttactgggtcttgaacagcgttaacccagtcttgcattgcacgatagttacaagcttctgaatccattctgaatgaaataaccaaagggtctaattctctcccagttatacgaatattaggagaattatagttccagtcagtttcataggataatctattctctggcatttttacagagtatatcatcaatccagatgagttatatgccacgttaaagaagtcaattaaatatgtaccaactgtaaatgagcctaataaactttgaactgtacgttgactcatggcaccaataagatatttactaacccctgattttcttatcagtttttgtgtgccagcagtaattagcgtggtaattccctgattaatatcaccttgagacaatcctaaccagtctgaatttagacccaagttattataagaaaagttgctaattgaacttatcaacgaagagcttttagttgatggagttgtcgcaaaaacgcagctaaacatattattacgttgaaaatctgcgtttattgcttgattattaaattcctctaaagaatacattagaaagtccccgtatataaagaagcacggtttaacgtgataatctctctcatagtaatctcgagtgtaaaagaacttggaaggttaggagcaatagctaatccgttaaaattaccattcggagttttatcaaatctaatactttgaatttgacacggtccaaacacttctgtttttccgtcaaatttagaagttgcgccaaagtttttaaccatccaaattgtcgggtttgaaactacaagaacgttagttaaactcgatgtcattttctcaaataacgtcttatttttaactgcatcttctggagttaatggctcaataaaagtagagcgataccactcatctagatatccttttatttcagcagcatattgagatttacccgtttcaccataagaaaaatagttaaaatattgatagatattaataatagccattaaatcttctgtggaacgcggagtcaaatcccaagtgaacactttagttctattctcagcaccaccatacatacttctggctatcgtataaatctgttcattattatcagccattataccttgtgttatactttccagtgctccaaatactgcagttgaagccatattgcttaacacgccagtagcagtacctccaccttttgtaataagactatcttgaacatcgttaaatctatgtgatgatgtatcaacatcggatttagatctcggtaaaagaatatttgcaacaggaactttacttattgttcctgaattattatctgatattaatccatttgatagttttgatactgtactactaatagtgtttctggctgtacgtaaaatactagaagatgaagaagagtagttagatctcatcgttctgagacttccagaatccctagatgacatattgtatgcagtaaataataatccattcttatatagatctgttacctggaagtcccctgtagtgtcattcccactagcacgcccagttggaaactgggctgtgtatgttttagttcctacttctgatttagtactctgtccggctgaaattttctcaccggactttttaattaaatcagcagttatttctttaacaattgccatattattccttaattaactcccgtcgcaccaaatacaccaggagcagttgtgcttgtgacaggtgtcatattatgaacgacagtatttttcttaataacattattagtattattgattgaaggagatgcttgttgaacaggagcttgctgtgctttgttcttttctattacctggacttgttttgcttctggcgatttagcagaagtttcaggtttggcctcaggttgatttttcttaagctcttgataagtagcatcaattttagcaaatctagaagcaagctcctttttaactgcaggtgaattatttaaatccgggtcattcatccgttttttaaggtcttcatgagcggcttcaattgatttaactgttgagtctttactcatatcagctgaatcagcatatttttcaaaacgaatcatcgcggcacgggcttcattagccttcattaaagcgttttttctttcttctggtgaaagttgctttaatttttcttcttctgctgcgcgttcttcatcagttgtcaatgcttctttattatcaacaccacgaatccagttagatgcacgggttttccaattagcaattttatctaatccttttgctattggaccaagatcgtcattcattcgtttatcttgataatttgctactttttcttggtcttctttattgagagatgctccagtagaattttggaaattttctaatgctcttccttctacttcatcagcggtatccttcataccaggaataactcgaagaattgctgctgataatttagccattccaagttgaataagttctcctaaattataaagaacacttccaagtccttccacaatagctactgtcaatccaccccagtctccagcttcccagaactttttaatttcatcaatagattcaaagatgctctgtaataaaggaccccaagttccggtttcgcttgaaaaagttttaaaatcagtgctaaacaaatcccaggcttttgaaaatttatctgaccaatatttaaaatgaaccatcagtaggtctattccaataacaacagccattattaatgcaaccattttagcagcttcaatagcagcactgacagtatacttaaatagcatgcttgatattttatcagtaattgaaatagatttcttaaatccgaaatcaactgtctttgttaatttatctaaagcattagatatttttaagttaaatgcgtctcttttttgcttctcttctggagactcttgttttggttcaattggctgaggagtagggaaaaaatcagcatcaggatcattattaactgcttcaggagccggtaataaaggacccacagattcagctgtatcatcctcgacgactttaacaggaatagcattttcgactactgctaaactcgttccagtttgctgaattccagctgtctgaattttttgttccagtaaacttgttaatttatctaatttgcttccgagcgattcaccgatttctttattaatattgtttccaatttcaacagtttcagcaattaactcagaaccggcagtagtatcacttactgcgctttctacattgtcaattgctccaattatttcattcgatttttcttcgacagtttgagcaattaattcagaagcagcttgagcatcatccaatttcgtagatatatcgttaagtccagataaagtattggaagcggatttagccgcttcctgaactggtttattatctgaaataacttttctacgcatcgtttgcatttcttgtggctttttcattcaaataatccaataatattgccaattccagttattgaaccattagggccaggaattgctaaagttgtagaaatatcatttgcccattttaatacaaatgctggcatctcaagaaaattaatttctttaacttcatcattgaccttaagcaagcatttggataacatatcgcttacagttaaaaattgttcaaattttccaggaggtctaaaataaaatgtatttccttggtattgaaattccaatctttggcatacataaacgtcattaatatcataagtataaccatctatttctttacgagatttaatctttccattaaattctagcaaatgaatagaaacgaaatcaacttctgccggtgataaatttggacaaatagaatcaataagaagctttaaattttcatcaggacctttaacatcttttaaaatgttataatgtttaagacccatcttaggaatagaaacttctttattacttatcggaagaactactttcttcagtggtagtatcagttttaaattcatttttaaccttaactgggtcgattgtttccagtttcgttgcattagtgaacatataaagatgagttacggaattattatttgataattcgtgaataacttcatcaacgtaaaattctgttttaaattggtttttactatcattaaaaataattttaacgccaggagtcaagttaaaattaccgacagtagaacatttagcgtaaccatcatactgcgccatagtctgaagacgaatagcttcttcatagccattcctataagtcatttcagaataagcacctgatctggacactacaatagagttttcaccctttcctgtagtaatcattggcaatgaagaatccaaaaacgaatgcgcatagatagtagcatttttcattggatcgcgtttgtgaggattcgatttagtcaaccaaacgaaatcatatgctaatggatattttaattcttggacaaattgacctattaaagttggctcaccgacaatcattggatatggttcttgatttatcatcatatcatagtccatcatgttaactcccatgatgtcttgccatacaaatacgaacttatcgcttcctaccgctagagcaacttctcttacatatgacaaatagttttcaaatgtgctagtccatggaatatcaggaacataagcattaatagcatttatcgctggagttaataatgtacgatcttgataaattacgccaagcatttcctttatagattcaccggcatcagggaaaaatggtctaccaaatttaagattttctatagaatgaatagttcctaattcaatagcaatgatgttatcgccttttgaatctactgacacggaaaaatgcttgcacccataaattcgggttttaacattattaatatcgtttgcattagctacagaaatctgaattatttcatttccatccatttttgtatgaatgtttttagaatcataaaattgtagcattccttcatttcgaccataaagagagtcacgcatagttaatgtggtaatagtagcagctaattcaacaaatctattattactccaagcgtcataactctcaaataatttaacgctgagatttggatatccaggacgttgtaacatactcattgatgtttatccttctcaatcagttttaatacgaatccgcgctcggcaggaatcattttcattattgaatttaagctataattactttttacaagcgtgtgattaatttgataaaaagtaaatatctcatctggattaactaatagcttaaacacatctactatatcagtgtattttttaatgtacttatcacaacacgacatgtgcaatgttaaattaataggattcattgcatcgagaattttttctaatgtttctatctcgatggcgtcaacaagttctatttgacttgattcactaatttccttccaatcataccacatttcatcgacttgaacagaatgaatattttcagtaatcatctttgctttattttcataaaactcagaaggaaaatttaatttaattttaacattagctacatcaaaaataggttcctttaattctttttgatatatttcaaatggaactgtcttttcttttttacattttggacatacaaatgtgactggtactttagttttacctattgaccctacaaatacctgcaaaaatataaatggttgccaagtctttggatagtctccaaaataatcagcaattaaatcagcaattacttctttttgttcttgtggtgaccgatgttctatatcgtttcgaactaacaaaaaatctcgataatcttctaccgtaaatggtttaaaacgatgaacaccatctggtaatttacaacgaataatgtttgccatagatgctccttttattctatttataaatatgataaataaaggagctaaatatgtatgaatacaaatttgacgtgagagttggttctaaaataatcaactgtcgcgcatttactcttaaagaatatctagaacttattactgctaaaaagaatggttcagtagaagagattgttaaaaagctaatcaaagactgtacaaatgcaaaagatttaaaccgccaagaatcagaactattactgattcatttatgggcgcattctcttggagaagttaatcacgaaaactcctggaagtgcacctgtggaactgaaataccaacccatataaatctattacatacacaaatagatgcaccagaagacctctggtatacactgggtgacattaaaattaaattccattaccctaaaatttttgatgataaaaatatagcccacatgatagtatcatgtatagaaacgattcatgctaacggtgaaagcattccagttgaagacttaaatgaaaaagaattggaagatttatattctatcatcacagagtcagatattgtagctataaaagatatgcttttaaagcctactgtttatttggctgttccaattaagtgtccagagtgtggaaaaacccacgctcatgtaataagaggactcaaagaattctttgagctattgtaatggcaaatattaataagctttattctgatattgacccagagatgaaaatggattggaacaaagacgtttcaagatcacttggattaaggtcaattaaaaatagtcttttaggaattattacaacaagaaaaggttcaagaccgtttgaccctgaatttggatgcgatttatctgaccaactttttgagaatatgactcctcttactgctgacacggttgagcgtaatatcgaaagcgcagtaagaaactatgagccacgtattgataaattagcagttaatgtaataccggtttatgatgattatactttgatagtagaaatacgcttttcagtcatcgataaccctgatgatattgagcagataaaactacagctggcttccagtaatagagtataatgcttcacgtataaacgtggtataatgaatctaagtccatccaaaattgaatagagaacaatatgagattagaagatcttcaagaagaattgaagaaagatgtgtttatagattcgactaaattacagtatgaagcagctaataatgtgatgttatatagtaaatggcttaataagcattcaagtattaaaaaggaaatgcttagaattgatgcacagaaaaaagttgctcttaaagctaaattagactactactcgggacgaggagatggtgatgaatttagtatggatcgttacgagaaatcagaaatgaagacagttctatcagctgataaggatgttttaaaggttgatacctcgttacagtattgggggattttattggatttctgtagcggagctcttgatgctatcaaatcacgcggatttgctattaagcatattcaagacatgcgagcatttgaggctggaaaataatgagatatagcattgatgatgcttttaattatgaagaagaatttgaaacggaaattcaattcttaatgaaaaagcataatcttaagcgtcaggatattcgtatcctggccgaccacccgtgtggtgaagatgtcctttatattaaaggaaaatttgccggatatcttgatgaatatttttattctaaagatatgggcattgacatgcatatgagagttgtataaatagatatataattcagaggagacaatcatgtcagataagatttgtgttgtctgtaaaactccaatcgattctgcattggttgttgaaacagacaaaggtcctgtacatcctgggccttgctataattacattaaagaactaccagtttcagaaagttcggaagaacaattaaatgaaacacaacttttgctatagtgtgacctttagtctatagttttggcccttcctttttggttgggccttttttaatttaaaagctttcttctacatcatcgtctgaatcttctaattcagctctttttcctgccaaagcatctctcacagagatgtcatcagtatcttttaattcagtttctttaactcttttcttataataagcttcaagttcttctagaccttctaatgtttggcaagaggcaattttacccataaattcatcaatagaagcttcataaagaaattgtttaaattctagtaacatctttttctccaaagggccgaagcccttataaattaactgttttcattacgtaattaaatttttcatctgcgtagcgctgaatacgatcaatgccgtgttttaaaagatagttcaaatgaacatatttctttttcgtattagcagattttggcttaacaccacaatcatctatgaggtcccagactgttgctattgtcttagaaccatgcttacgtaatacacgaccgattgtttgtaatacaatgatttttgatttaacaccgtgcgctaaaacaacgtgatgcagatttttaactgaaataccagtagaaaatacaccataactagctactataattattcctttaccattttcagctaaggttttcattatattgcgggtttcggtatcaacttcccctgatacgtaataaactttatcgtattcatttttaattaaatcgaaaatagctttaccatgtgatacatgtttaaacatgacaaaagcgttttcatctttttgcgcaagcttaatagctaatttagcgatccatttatttcttttactaagccccgtaataatttttatttcttcttgataagtttttccctttaatttagtagtgaactcatcgggatagcgaagaaaaatactattaatttttagctcagttacttgtccatcttccattaacttagaagtcgttactggcttaaatatttcaccaaacattccaacatactgcatgatattggctttgccatcacgtaatgaaccagatagaccaaatttgaacatgcagttatttaaacctgatatgatagatgaaatactttttcctgtagcaagatgacattcatcattcatcatcattccaaactgtgagaaccattcttttggttgtttaactacagtttgccatgtaccaacaacgactggtgcatcatttttatatttatcatcttttgatgctccgccaccaattttctttatcattgcatgactgaataaacgatagtcaacgaagtcatcagccatctgagttgttagagcagttgttggaacaatgataagaattttaccttcgtaattttccaaataataccgagcgagcagagcctgaattaaagatttaccagcggatgttggaagattaagaattctacgacgattaactaatccttcgaacactgcatctttttgataccagtgtggttcaattcttttatttcctgaatagatttctaatttagaaagccattcatcaaaatcttttcttgataattcttctttttcgttaatttgtgggtcaatccaggctttatagccaaagttatcacagaactttttaatttgcccgactaagccgaatggaagaagacgattataatctaaaagacggattcgtccatcccagtggccatatttgtatttcggattaaaacgatacccatcagcttcgaagctaaagaaatcacggagttcatgaaatgtactttcttcacaatcaattctcacgtgactaaaatcataaaaatgtactttaatgtcagtcatgtctaaataccatgtaataaatatatctatatttatactgaggaaatattatgatagataaagattatattgcagagttaaaggctcttgatgataataaagaagctaaagctaaattagctgaatatgctgagcaatttggtataaaggtcaaaaagaataaatcttttgataatatcgttgttgatattgaagaagccctccagaagctcgctagtgaacctatgccagagactgatgggttatctattaaagacttaattgatgctgctgatgctgcagagggattaaaatatgacgatgaagaagttaatccagaagcagcacttctgattgattctccagttaaatctgatattaaaattgaagtggtagaaacggataaaattcctgaaaatactgatgttttgattgaagacactccttttgttgaagaaaagtttgaacaagctgtagataagattattgaatctgaaaagccgtctgtatttactcttccggaaaactttagcccgaatcttcagctgattggaaaaaatccaggattctgcactgttccttggtggatttaccaatggattgctgaaactccagattggaaatctcgcccaaccagttttgaacatgcgtctgcgcatcaaactttgtttagcttaatttactacattaatcgtgacggatcagttctaattcgtgaaacacgcaattcttctttcgtaacattaaaataaggataacttatgacttttacagttgatataactcctaaaaccccaacaggagttattgatgaaatcaagcagtttactgctacacccagtggtcaaactgaaggtggaactattacctatgcttggagtgtagataatgttccacagaatggagctgaagcaacttttagttatgtactaaaaggacctgccggtcaaaagactattaaagtagttgcaacaaatacagttccagaatctgaatctgaacctgaacctgaaacagcagaagctacgacaactatcacagttcaaaataagacacagactactacaataacagtaactcctgatagtccttcggaaggagtaatcggaacagctgttcaatttaccgctgccttagcttctcaacctgatggagcgtctgctacgtatcaatggcacgtcgacggttctcaaattggtggagaaactaactctacatttaactatactcctgccacaagcggagttaaaaaaattaagtgtgtagctcaagtaactgctgaaaattacaatgaaaaggaagttacttccaatgaagtatcattaacggttaataagaagacaatgaatccacaggttacattgactcctccttctattaacgttcagcaagatgcttcggctacatttactgctaatgtcactgatgctccagaagaagcgcaaattacttattcatggaagaaagattcttctcctgtagaagggtcaactaatgtatacaccgttgatacctcatctattggaagtcaaactattgaagttactgctgtcgttacagcaaccgactatgatagtaaaacagttaaaacaacaggtcaagttcaggtaactgataaagttgctccggaaccagaaggtgaattgccttatgttcatcctcttccacaccgtagctcagcttacatctggtgcggttggtgggttatggatgaaattcaaaaaatgactgaagaaggtaaagattggaaaactgaagacccagatagtaaatactacctgcatcgttacactcttcagaagatgatgaaagactatccagaagttgatgtccaagaatcacgtaatggatacatcattcataaaactgctttagaaactggtatcatctatacctatccataatcataaggggcttcggcccctttcttcattttgaaagcacacaaaacacaatcagaaaatgatgtatataatggcaacaactcgataacatgagattgattatgagaactgaggttgtggtgtttactcttcatgagtctggaaagtcattcattgaaattgctcgtgaattaaacttacaggcaaaagaagttgctgtattatgggctcgagctatgactgctaagaataaatttgaaactcgagaaaaagttgtctatagaaaaagacatatcaataaaaaggtgaaaaatggaacagtatgatctttatgaaaatgaatcttttgctaatcaattacgcgaaaaagcattaaaaagtaaacagtttaagctagagtgttttattaaagatttttcagaacttgctaataaagcagctgaacaaggtaaaacatattttagttattattgtactgctcgcgataaattgattactgaagaaattggtgattggctgagaaaagaaggattcagctttaaagttaatagtgatcagcgtgatggtgattggttagaaattacattttgaggattaattatgtttaaaaagtatagcagtcttgaaaatcattataactctaaatttattgaaaaactttatagcttgggattgactggtggggagtgggtagctcgtgaaaagattcatggtacaaatttctcattgattattgagcgtgataaagtaacttgcgctaaacgtactggccctattcttccagcagaagatttttatggctatgaaatagtactcaaaaagtatgataaagctattaaaggcgttcaagaagtcatggacagtatttcaacttcagtgccggtgacatatcaagtctttggtgaattcgctggtggtggaattcagaaaggtgttgactacggtgaaaaagatttctatgtattcgatatcatcataaacacggaaagcggtgatacttattacatgagtgattacgaaatgcaagatttctgtaatacgtttggttttaaaatggcaccaatgcttggacgtggaacatttgatgctcttatcatgattccaaacgaccttgattccgtcttagccgcttataacgttacggcatcggaagaccttgtcgaagcaaataattgtgtatttgatgctaatgttattggtgataatactgcagaaggttatgttctgaagccttgtttccctaaatggctgccaaacggtgctcgtgtagcgattaaatgcaagaactctaaatttagtgaaaagaaaaagtctgataagcctattaaagctaaagttgagctatcagaagctgataacaaattggttggaattttagcttgttacgttacactaaaccgcgtaaataacgttatttctaaaattggcgaaattggtccaaaggattttggaaaggtgatggggctaactgttcaagatattttggaagaaacttctcgtgaaggtattactctaactcaagcagataatccttctttaattaaaaaggaattagttaaaatggtacaagatgtacttcgtccagcttggattgagttggtgagctaaataaaaagggacctttcggtccctttgttttattcatcaataataatttttggtaatttaacacctaataaaacagacaaatctgaacgacccgccattttatccatgtctccaccgtcaattattcttgcttctttttcatcttttgctacggtataaggatttgctgataaagcatatctaactaataaaccgatagacggttgtaagctttctggatcaacaacaactttaaatgcacctacatgttcagggtcatctaagtcaagaccttctgtatacggagcatagaaaattgatccaacaatttctttttcaccgatattttctactacgccaacgattacataatctaatgggctgttagtatcgcaataaagcggtaaaccattagctaagaacccgtaggcattttgtgaaagatatttgtcatcttctggtttatgttttaaccaacctgatgcagcaagaatcgcagcggcacgagctgaagcaacacagaacgttgctgtataagttgattctttttggatatgtgaaaccatttcacataccattcgatataatgaacgaccagcttcaggtgcagatgcataactcaaatcgatgaatccactatcagtaattcctgtaactttatagcgttttgacactgtaatcaaagactgcagaatatctttattgatttcatctgccatttcagttgcaagcaaatcttccaagaaattaggagcatcgaatccatttgcttctaaatcttgcgctaattcaactgtgatgccagttttaagtttacgagatttaaccgcggtttgccatttattaatctgaaatctagcatccgcaatttcgctatcagagctttcaaatttgcttgttgacgctgcgtcagaaaatagacgaacctttaaaagaacaattgcaatctgaagagctaactctaagtcgctttcttcaatatcagcgaatggagtatcttctaatactttataaacgatgttattatatttgaataaatcgcctttattgagagttaatttagactcttctgttaattctgtgatttgttctcggtctacatatccagcttcgccagcgtaagtagcaccagttttaaatgtaaattcattgtctgggttaaggtatttgataccataaaaagcagcaacaggttgattagttctttgcgttgctacaatgtcagaatatattaatttagtggtagcgcgagtcaaagcaacgagatttgggcgaccgattgagttgctattcgttgtggttgattcgcgcagaagttcgttgattttagccattgcgctttccttttggtttatatgatttatttataccataaaaacaactaaagggacccgaaggtcccttaaatcgtcaaagattagatacctttaacatatacacgtctaaagtaagcgtttttaccaaggctattcagaatagaaggcataccgctctggatgcgagaagccggagcctgagcagcggattctgcaaatgggttgataccgataccgtaacgagttttgaatcccattaccggttggaagttcttcggatcggaaccacgcagcggagtcagagctacatatggagcatagtaaataccagcatccatttcgttcggacctttataacctacagtgaaataatcctgcttagcatactggtcgatatatacacggtatttaccacccagaacaccagcaaatactgacttggtagtatcagtgttaaagccggtagccagaccctgtgcagcataagaaatgccggtatcaactgaagccagaacgttaactacgttacgggaagcgataatgaagttaccttcaccacgaccggtctgacgagcaatttcaactgcttctttgtcaatctggaacaacagagctttaaaggattcacctgcccagcgagcaccacgaatatcgattgggtcctggaagtcaaatacaccagctttagaacccggagtcagggtcataccagatttaccaacctgagctgagtagttaatccaatcaacaacttcacggttgatttccagcataatttctgtagccagaataccagacagttcagcatcagcatccataccgtgaacagcgcggaggtcctgtgctaattcgatagagtaagcagctttcagctgacgagatttagcttcgataacttgcttatcgatacggaagcccatttcattccatgggttatcggtagaaccattgaaaccttcctgaagttcagcgatagaagtagccataccttcagcgatttctaccagtgcaccagcttccatttgtttcttaatttcagcatctaatttagctgcatcatcggcacttgaactaattgttacttgagcagaagcttgcagatatacagtaccagtttcctggaagaagtgagtatagatatcacctactgtggtttgtgtgctaacagccagagctgggaatttcttagcagcaccctgaccagagaacattgcatctggaccatacattgggtggaatgcttctttagcgccggaagcgattgggtctttaccatatactgcgcgcagtgcgaatacctggccagtcgggctgttcatcggctgaacaccacaaatatcgaaagcaatcaggttaggaatagcacgacgtaccatacccataacagctgggccaatctgagttactgcgccagaagtctgacctgcagcgatgttagtagcattgtaatcatggtcaccaccgatttcagcttctgttaagaaagaaccgaatgcctgagcaattttttcgtctttatattccggagctgtctggaaatctttttcctggttttcaaagattttagcgataatcgcttgtttgctattagcaatttccggtaaaccttcaccttccagtaatggcttccatttgttcaaaagttcagctttagttttgatagtcatttgtgttaacctttaaaattagaaacgagatgcgactttcgcatatacacttacaatatcttctgcaccttgtgcagatttatcttctacagcttcagtgacgaaattcagtccggctgcttcagtatcaggagtatttatactctcagtaatagtgctttcatctttattagatttcttcaccatttctacgatggcactcaatttgcttgagaatgcatctgaataatcaataccttcgactagagcagagactttttctttttgagactcagtcagatctttagtactttcgctcaatgccacttcacgctgcacataattgatatatgcgtcacgcttattgagttcttcgaacagacgagctgattcttctttatgttcttgcagttcttcttccatttcagctacaacatcaactgattcttctggaacaacaacgttgtgttcaacgaagagctctttcaatccaccaagcatggattcaaacagttcggctttgatacctttatctactgctaatttattttcagtgagccattcttttgcaagatggtcaaggaatttagaagcttgctcagcgattttcttctcagctttttcttctgcttcttctttatttttttctacttcttcttctgctttttcagcaattttagcgatatgagattcagctaatttaacggcgtgctgcttgacggtagcttcgaatacagtgccgaaagtttcttttgcttccggagaaatattaactgattcgaaaatactatcaagagcaacggaagcatcaattttctgcgcttcggcaatcagttgttctttaagcattttgtagtcctgttgtttagataataatatttataacgcttttttcatggcctctgcgagagccatataggcgtcatcggcacttgtatcggcttccgccgtctgtgattcggtaatttccttaggagttacccatgcatctggagcacttggaccccatactgcatcaacacctacagttaatttgaatccttcgtttacgatacgataacctttatttgtgtcagtcaatgaacctaatccacgagaagaaactcctggaatccatccggcacgaatattagctgctaatttatctccaggaccgtggtcaccttcaataacacgagctcgtccgtatacgtcatttcctttccaccacatatcttctataatgatagcggcttgcatcgggtcaacattagcgcgtggaggatgatttaattctccgagagcttgtttagttaaaacttgctcattaatatagtcttttaccgctttttctaatatacgttttggataaagacgtttatttctattgacgacttccgcttgcatgaatattccttcgatgtataaacccggttttaaacctaagtcttttccatcatgagattcaagcattggtacgccatcaataatttcgccaggttgaccccaagtttcaattagtaattggggttcattcattagcttaatcctaatgctttacggcgtttaagagcttttttacgcttacgctgagcacgagattgacctgctggattggcaatcttcgttttggtagctttacgagcaatttgtctacgttttgctttagacaacccggtagtttgaaatgcattacgttcgcgggttttgcgatctttagtgcgagtaatttcaccacgggcagaaacatgtttaacgataaattcatttaacggcatattttcattaatagaagctaatgcaaccgctaaatcagtttcatcatcaagcatattctcgacaattgtatttatatcgtctttatttaaagcagaagacaattcgtcaaagcgaccctgtgcttcaggaataagtgcttcgacattctcgagaactaattcatgagtttcagggatcagaagcattattcatcatcctcgtcttcgtcagagtctttgtcttttttgtcgtctttatcatcactatcttcgtcttcgtcatcatcctcgtcatcaggttcttcaccttcgattaagaaattacgagcgatagcgattttttcttctttaattaaatcagtcgttcttgcagccatggcttcagcaaataatttacgagcggctacgaggtcgtttgatttaatagcttcaattaaaccttccattaaaaatcctcttgttcttggtcggggtcttggaaacgagcctctttagactcttcttcaatttgcttggcttcttgttctatttcttcatcagtcatctgcaaaatatctttcatagcagttctgtgagaaatatatttaccaataaatggttctgccatggttagcatattaattcttcgttccaaaatttctgcttctttgagctcagcaaagtagctatcccgatgaaattctatcttaatattatttatttcatcattccactcatcttctgtgattatacctttaagcaaaagatttgttttaagtggatctaggaaaacttcttcaaacttgtgctgtaactcacgaataaatttagcaaacgttaattcatcacgtgtaatgctagttccagaatcaaacatcacaccgccttgttggtcttgtggaatgcgtgaaagaggaacacgtaatgccatgtaaagagcttgtctaaaccaacgaatatcttccatattgccagtattatcagcgccaggaagagtatcaacttctgtcacagctttaccatcacggcgctgcaaccaatagtcttcggtcatagacatattatgttgttgattttttattttacctgttgatgcatcatatactacacggtttttcatcgtgttcataacatgttgcatgtgctcagcagctttacgagcaggcatattacctgtgtctacataccaaacacgacggtcaggagcacgagtaatgcgataaatgactacagcatcttctaataattttaattggttagcaggtttaacagcacgatgtaaatacccgatgatatttttgccacagcaatcgactaatccagaatgggcataaacaacagcagcttttggaatttttatttttgtgccagcttcatacattctaccatcacatgcatatgactcatgggcagtatcatatataaaatattctttgtaacctttaactatttttgtgccagcttcagtttctgttataatttcgcgaacatactgaacttggcgagggtctaatctacgtaattcttttatgccttcttttggacgttttggatcaatgattttatgaaagaaaattcttgaatcaacataccaacgtctaaaatgatcagaaccttttcgttgaaacgatagatgatttaatacatcactaaattcatctaacatcatatttttaatttttggactaaatttagatttatccaaatttaacgctacgacttcagtatcatcttcgtagacgatagcatctgaaacgatttctgaaactgcattatctacttcatagttattcatgagattacgatatgtatcaataagctcacgagtagttttcattcctggttcatatgaaccaaaaattgtttggaatgcagcattataaggagaagcagcttcattcgagcttacttcaaattctcttgctccatcatcaagctttggggctgtaatggaaacaagatcttctttttcttggtctttaaaatttcgttcgtccattttagcccatggagcaaacaaacttaatacattaaatttcattgtattctccaaatgggaattatagttatatttataatggacttctctgctttaagcaggatggggatttctccccattcattttattcccaataatcgagagcaagagttacttcaaaggtttggatttcattgtttgaatcccaatctaattgaagttcacccacgttagtaggccacagacctttaatttcaatttcttttgttactgttttagcatcacgagcatattgacgaacaatagcgctctttttatactctgcaggttttccaccagtaatttcgtttccttgaccagcagcaatgctttgccaatcaacaaacttctggcgagcatcatgagcttcatcgttcattactgtaacagtccagtcatcgaatgtacgatcgcctgctacgttaattttacggttcataaatccgactggaattttttctacaataccagctggtaaagcagtggctttacattggaatgtaaaattttgtccaagataagaaatttctacttggaataagttaggtcgagcaaaatcaccagattcaaacgctcgtgttacatcatctacaaacatattagcctctgtagtatttatatccctatgtttaacctagggcatatagaattaaagaattaaggatatagtgtatttatatggcctgccgaaacaggcctttagaatgcaccgtattaaccagcaagaccagttaactcatcgaaatctgcaccagtagcagttgctacgaagttcaaggtaatgtagttaatgcttctagccggttgaatgtagaatgttgcaacaaactcatttctatcaattactgacggagtgttatttgttgtatcgcaaactacacgatattcataaattccaccgagagctttaattccctgtaagtactgggcagtttctgtgcggaatgatgaacgagtaaacgcgttgtttaattcgaacaaacgatattttgaactacgtccgatgttcgttttcaacatattaaacagacgacgaacgttaatacgatcaaatggagaaggaacagaagtagctgttttatcaccatataatacgtaaccatcaccacctgtaccagtcactgggttgatagcttcttggtataaacggtcgcgctgagcttggcgagtttcaatagcaagtttaataacgttaagaatctggccgcgattataaccagctggagacatccaagtctgagatacgttatcagttcttgcgcataaaccggcaatatcagctgctaatggaacccaacgattcacatcattatatttgtcatactgatatttgtagttaccatcaattgctgcgtaggttgaactgatattaaagttattatcagtgtatgaacctgctgcagttctccagttaactaaattatctactgcacgagttacaggaattccaactacagtttcacgcggaggtgagcacaatactaagcaatcttgacgagcatcaccaattgaaacaacatgtttttggacagtagatgctgtttcaagagattcaccggcacaagaacccgcaataaacaactgaacgtcaacagattcgcggtcagcaaagaagtcccaagcttccatcaaatctcctgctgttacttcagcatttgatgataatccaccagacagagttaaaattccagagaagccttctggccagttttgcgcagttgcgaaaatatattctgaaccaccttttgcgaaaaagtcatcaatatagatgttactatcgtaaatatctttttcaccacgcttagttgaaagaacaatgctttgaacaatagcatcattgcgacgaactataatagcgtactgtgaatcagtttgcggtccatatccaaacactgctttggcagtagatgcacgagtaccaccacctggataaattgggagtaatgcagaagctccttttgcatagtcagctttagatacgatttcaatttcaattttatcgcctaattcgcctggataaagagctactactcctggaattccgtattttttaagatttgcttgaaagtcaaccgctgtcatagcagcttcagcattttcaatttcagctaataaaataccagaatcagtaataatttttccaagagttattactgcagctaaaccagaggaagatgaagaaatttccgcagtccagttagaacctaattccgggtattcaccgacttcttttgctttagcgataatttttgcagtaggaatattaattttcttaatttttccatctgcgtctacttcagtaattttaccttcagtttcaatatcatctgaaacatatttgaccgtgattttatctccaaccgcatagttactacctggggtagaaattgtgtattcaatattaccagcaattggcgatgagtttttagcggtatctctatcaacagcacgaactactcgtaagtcatttccgtactgcaagaaattcatcgcagacataaaatagtcagcagtttcagcggttggttgaccaaaagtattaactaaatctacttcgtttgtaacctgtttaatctgaaaagcaggaccccactggaatttaccggccaaagctgctgtaccagtagagttattaaccacggtgctttgaaccgtagtttctttgagctcaatgcccggagataataaagtcatttttaatcctctttaatatgctttaatatatttataccattgacataccatgagatactggaacatactcagcagaatgaaccgaatcaacaaatataactggagcgtattcatcccccatatcttgaagctcttttgaaaacacttcagatgctaatcgcatgtcatctttgtcggcataatcaataaattttgattgtgttgataaccatccaaaaattactaaagacattactaaatcgtcatgataaccttcttcagccgcccaagacacgcctttttcactaaacgttctaaattcttgaatagttgcacggtgatgaataataagcttatctttttcaataaggtcttttaatgtagagcatccgactgctttcgttcgtttagtttgcttcattcctaaatcagtatatgaatcgcaaataacgccttcgtattctaaatccatataaagtgatttagcaactgacacaccagtactatttaattcaatataaactgggcattcattatattctactaaataacgcataacgatgtcaggtagaattaaatgagaaatagtgtttgagtgtaaaacaccaacttgttcccacacatcatcggtaacatcaataatatgtaaagcgtggtaatcttgcccacgaccttctgagcagtctagagttgcaatatattttctatctggttcagggcttttaaatcgatgaaaaccgtgatcatctggagttacttcaatgaaatccataacagctaatttcattcctgaaattaatgtaccggaagtcccttcaaatgctgcggtgtgttcttgacgaaattgagctaaagtagaaccattaatggtttgtatactccattgccatccatcgtcaaaaatatcttcatcattataaagacgttctttaactgaattccaaatagcagtgtatggttcaaatcctgatttaccttcaacagcagcagtccaaatatcataaaaatgatttaatccattaggagtcgtagtaataataatttttgaacgacgaccagatgaaataactggttgaatagcaagccaggaatcatggaagtttggaataaatgcgcattcgtcaatataaatcattgcgaacgagttaccacgaactgcgtctggagaggaagcataggctccgattgaggaaccattatctagttcaattgaacccttattccattcaactataccaggctgcaaaaagtcaggaagcagttcaattgcttgcttagtacggtctaaaacttccgcggacattgagcctttatgcgcaagaatacctacagctttatccttgttaaaacatacaaagtgtgcaaggaaaatagctactaccgttgttttaccgagctggcgtgatagattacaaacagtcatacgtttagatgacattattttgagcatatcacgctgatagtcacgtaattgaacctttatgacaccatagtcgatatgagtaatggcgcagtatgtttctgcaaaatatacaatatcatctcggcattttttccactcctcaaccatttcacgagtccattgtgttttaatattagctcgtttcaagttaggaagacccatataccgagatcttttattattcttatctttataagtttgaaataattcaggcttatcagagttgtttggaatttttactattttatgtagacgaaggtaatcactgaatttttcaggataccattttccatcccactgagattttatccaatgaattccatcttcatcttttctttccgctaagcttgggtgttttattaaaatttttccagcttcatttaacggatggaaatcatttaatgcattaatcggttgttccatttatcaccttctcacgagcttcttgagcctcgtaagcatcaccaatttcgtccattaattctgttggtgaacccatgaatactgtcgcattctgaatattcatttgacctgtaggaacagcacctttagtgccaacctgctcagatgtaatgtctttcatatctttatgaagcttcagtatttctctgttcgtcgtagtcatttgccccataagagttgcaaatacttccatgtgacgaggagaatcagcattctttgctgtctcaagaaaaatcttggctgcatccattagcatttgttgctgaaaatgcatatttcgacgaactactccataatcatcttctaagtcaggagtgcggttttgtggattgcttttaacttctactaattgcagaggttcatatactttaatttcctccccgtcaattccggggagatcagaaatatctaaaagtttgtttatatcaagaccttccataataacctctatgttcttgggccaggaggttctggcggtgttggtctatttacattactagtgaaagtttgttttactgttccatcccagtcttctgggttaatatctcgaggaacaacttcgctatcgacagattcaaaaacaccttcgccatcaggcaaatctcttgtattggcgtgaaaatctgtataagtagtacgaattaatccttctgcatcatctactggaggatacatccatccatttacttcaaatgttaatgaccattcaattctacgacgagataaattatccccatctatagcttcgtctatagcagcagacattaatacaattttgatatcccttttaaatggaatatcatttccaaactgctcgtacatagttgtattaaaatgaggttgaaaatatggaagaatttgttcaactatttgaaacatatcatcttcgtagcgagtaaagatactcaattcataaatcattttaataggagatggattatactgcgatactacagaagttgcacctttttgcagtaaattctgatttaaaatgtttgttttaaatggagcattataactaaaatcaactaaatgtaaatttatacgaggtagaatggtttcaaccttggccacatcttcttgtgaatttatcgatgtccatttattcaatttcatcataaagtgttcctttgacgcatatgtaataggaacacgtataaacttatcaccagattctaactgacgtttgatttggatatttgaaaacaaatcgcccatcaaggtagcatatcgtctaaaagacgaattataaaaataaccaaacatgatttctcctaatctgggctttaattagtttataatatttattaatccatgaaatcattatcaaatgggctagattcgaaagatttgcctctattattgacaacaacataaggttcaacatattctttagcttcagaattaatttgatctacttcagcatactgatcaatattaatatcatgaataccgttaagattgcgaacaggatttagttctaattcactaaattctggaatgttaattccttcatttttctgtagaactggattaatttcttctccggaataaatgaatttacctgccgtaattttacgaatagcgttttggcctaattgataaaatggatcatatggttcaacccagttaatttcaaataagctgttatccataggaaaatatatcaaatcgccttctttcggttcttttccatttacttggtgtttaaacaagtttggattaatggacaaagtaacttcatcctgtacttgcataccaaagttaccaaagaacgatttagctccttcatatccttcaaatgaatttaaatatgcagcaaatttccaagctttagtaaatttattttttaagtcttcgccgaataccaaatcaggggaaacatactctcttggaacataatagcattctacacctcgcatttgaatgctttcagctactaatacatcagctaatatttggctgtttttataatgattgaaatttacataaggatttaatatttcagtttcattggtctgagaataacccgtgcggttttccaatttagcaaaaagatttttatcgtaagtagccatattaacctaccaaaattccaaatggagggtcaagtaagtataattcttcacgtaatgtttctttttctaatcgagcttcttctattaaacgctgcccatcgattgtaacaccgccaggaagcatcataccttggtggcgtgctaaaatttgaccattcaattctttagctaaagctgtagcatagtctttcacccaacgattattgtaagcaccttgcttaacatttgggtcttgaccaacaacacgacctactaaattgtggtctggattattatatcgttcagataatgaccagctatcttgtggaccgactgttccatatcctactgtatttccaaccattttattagtatcaatgtatgatttagtccagctttctacgataattaaatcatatttttggaagtttcccatgactttgagttgttcatttgctgaattaaaccaaaagtctggaataggagagagcatatcttgcatcattcccatataactggtaagttgagtaaaatatcctaaatcagctccaaaggcatttggtccataaaatctattacaagacgttcccattccgccattaataccagccattcctaaaagaaagtcagtaaaccacggatatgtagcatttccatccatagatgttattgacccaatatttgtgcgtaaaatgcgagttactgcaaatacgttggaacctcttaaatcgaagactccggttttgtacttttcttcgtcatcccctacataaaaaacatgaaaacctttattgagtccatcaaaatggtattcaccatataattctagggcacgctggatgcaatcgtagatttgatcgggtgttaactcaacattaataatcggagcccctaaacgtcttagaatgacatctttgagttcctttggattctgagaattatatcctgacatttaaaatcctttggggccttgcggccccatgttatgctggtgataaaaaggtagaaagcaatacccattcgccgtctttacgaacgtatgcttgcccatctcttggagcttcaggaatataacccgcttcttgtagagattgaacgctgctctgtaaagaggatatatcgtctttagctgtatttacttcctgcgtgactgccgcaatattagtttcattcgtttttatagaattagttaatcctcgttcttcaacagttgatccgtcaggattatttccatttataagtgaagtaagttcaataacttgacctttaattcctgttctattatttcctatttcaacttgtatattttgaacattattgtttaaaactgaaacttctccttcaagcactgaaactttatttaatagagatccagaaggagacggttgtcctccgctagagtcagttccaacaatttgatttaaccacgaaacattcgctcttaaaccagacgaagtgttttcaccaacaattccgtttaaagactcaatagaagttgtgtgatttttaatttttcctttaatactagaaggaatatcatctgaaccaatagaagtttcaatagatgttaagcgttgtttaacaccttcactctgatttaattcattattaatagcttcaatgctacttttgttattattaatttctgttattatagaaacattttctgggtatccaatagaagatttaatttctgctatatcagaatttattaaagtttgtttatcatctatagtgtttaatctattataaatatttggtccaaaatctactggtttattaccaagttcatcgcgtaatttaccaacttcaaccgtcaatgatcctacgtcagattcagtaaatttattttctaattcacttaaacgaatgccttgtgaagataataatgtactatttgttattattctatgtttcattcctgtgctagcattaccaacaacaggaagaccgttaatgtcttggccagaatattgccctagttcttgtttaatccacaataaatcatttctaattgttctataaacagagttttcttcatcattaaatggacctatatcagcaataattttgtcaactgtattattagttccagttaatatatcagtgtgttcattagtaagtgtctttaaatttgatatgtcatttttattaacactgatctgcgatagtgcttctatatctcctgatacatctaaaactccttgaattgttttaatatctttctgcgatgtttcaatggcagttttaagaattcccacattttcatcaagaacctcgacgtttttaaacacggaaacaattggtctattcattgatccatcgtttccatacttagtgctagctcctagtatttcttcaccatttttaatccatgaaatacgttcctgaccttcgtcaggaacgctatcaacaaaaggtaaatcttttaattcaatcatttgtaatccttagtaatgaactttaataatatagtttaatgatatattccatggtctagtttcataaccaattaatccttcacgattaagtgtaccaagggcatctctcggtccgcctaattcaaatccatcattagtgaagtatgaagcattatcccagtcggaatattttctagttccaagatatccttgataaacagacgcgccaaatgggccttcacttctgttatattccccccaaccaccggcgtgtttatggtatgacatttgttgtgcttgaacaccaccaacatgcattccgtcacatcctacgccaagtctatcctttccataaccatcttgtcctcgttgatttaaaatatgaccgcctgtgccggctcctctgacgaaaagacctcgcatatcaggaacgccaggattattccaatcgccaccaaatcttgttccaactacgtttctataatcaggaaattggtcacctgacacggttccaccatgacacataatccaacctggaggtgctgaatcacccgcaaacatcataatagttccaaccggaactcgttcggacgcatatctttcagtggcaacaggttgatcgccatttttccacattccaccgcgtgaccaaattccatttgctgtaagatggtctaaatttaaagaaccattaatagtttgtccaccacgagtattaattacatctgcgttccatgctaatgctccagagctatcaccttcaggggcaataccggcttgcgtcgttaatttaactactccacgcatagaaccggtagctcctcgaccatttagtgtttcacctgttactgcaacaccacccaaattattattaatttcagtctgcgttcctaggcgtataacacccttatattcatgtgttgcaacagaattcataaaggtatacggggaaattgcatatccttcgcggagagttccttgacgaatttgtgcaacagtagataattgaactactcctctcaccgattctgttgcagtgtcttctgaaggagctatttgcgaaattaattttattgcaagtttttgggtttttagcggagtcatcgcagtagtatcatcaactccagccaaagctgcaggtgtagatgatattttaataaccccgtttgatgactcagacgaatatctatttttgaacacatcgtcagtgtggtatttcagtttttgtggtgttattgatgaattattatctgagccttttaatgtttcttcatttgttgaataacgcgttaaaccatatttagtttcagtagcatttggatacaataatcttgttgctaatgtagctggtgtaacgattttagaattattagttccatctaaaacctcttgttctgacgcaatcattgctattcctttaacttccatagttgcatcaggaataccatttacgccgatattacttatttttgataatgcagactgtactgtcgtaacagtgccaggaaaattcgatccagtaggatcgaatttaacatattttgattcatttgatacgtgctgatatgtattgttactcatgctactctctcaaaataataaaatactgtaggttgtgtgtgactatctagcgtaacagtttgcgcacctaataattgccaagttccatacccaggtttagaaggagaaattatttcctgtttgaaagtaattcctttatcagagtattgttctaagatatgttcttggttatctaaatacttaacttgtattttatttcctatggtaggatggtcttcaaatgaatcaattgcaataaattttacaaccatttcctgtagagctattctaacggcactagtaaattcaattgaagtcattccattagtagctttaactggaataccaaacatgttaacaataactgggtcacctgatttgactgaagtatcagtaacagttccttcaaatgaccaatagtcggtctgttgcacgccagtaggagatacgccgcttatattaactaatacagctccaactggttgctctgccatatttctaacgtcattgatagcagattctacatttgaatcataaaaaccttttgatatttgtgaaattgttacagcgcctactggctgattattcataaccgaaatatcatttttcttagttctaaaaccaagaaaatctgctaagcgggaaataactcccgctttattattaagtaaactcattatgcaatccttatccaacggtatacagtaatagac

SEQ ID NO: 9 - DNA, 167938 bp, Bacteriophage
taaatcagaatttactgcaaaaaggtgcaacttctgtagtatcgcagtataatccatctcctattaaaatgatttatgaattgagtatctttactcgctacgaagatgatatgtttcaaatagttgagcagattcttccatattttcaacctcattttaatacaactatgtacgagcagtttggaaatgatattccatttaaaagggatattaaaattgtactgatgtctgctgctatagacgaagctatagatggggacaatttatctcgtcgtagaattgaatggtcattaacatttgaagtaaatggatggatgtatcctccagtagatgatgcagaaggattaattcgtactacttatacagattttcatgctaataccagagatttgcctgatggcgaaggcgtttttgaatctgttgataatgaagttgttcctcgagatattgacccagaagactgggatggaacagtaaaacaaactttcactagtaatgtaaatagaccaacaccgccagaacctcctggcccaagaacatagaggttattatggaaggtcttgatataaacaaacttttagatatttctgacctccccggaattgacggggaggaaattaaagtatatgaacctctgcaattagtagaagttaaaagcaatccacaaaaccgtactccagatttagaagatgattatggagtagttcgtcgaaatatgcattttcaacaacaaatgctaatggacgcggccaagatttttcttgagacagcaaagaatgctgattctcctcgtcacatggaagtatttgcaactcttatggggcaaatgactacgacgaacagagaaatactgaagcttcataaagatatgaaagatattacatctgagcaggttggcactaaaggtgctgttcctaccggtcaaatgaatattcagaatgcgacagtattcatgggttcaccgacagaattaatggacgaaattggtgatgcttacgaggctcaagaagctcgtgagaaggtgataaatggaacaaccgattaatgcattaaatgatttccatccattaaatgaagctggaaaaattttaataaaacacccaagcttagcagaaagaaaagatgaagatggaattcattggataaaatctcagtgggatggaaaatggtatcctgaaaaattcagtgattaccttcgtctacataaaatagtaaaaattccaaacaactctgataagcctgaattatttcaaacttataaagataagaataataaaagatctcggtatatgggtcttcctaacttgaaacgagctaatattaaaacacaatggactcgtgaaatggttgaggaatggaaaaaatgccgagatgatattgtttattttgcagaaacatactgtgccattactcatattgactatggtgtcataaaagttcaattacgtgattatcagcgtgatatgctcaaaataatgtcatctaaacgtatgactgtttgtaatctatcgcgccagctcggtaaaacaactgtagtagctattttccttgcacactttgtatgttttaacaaggataaagctgtaggtattcttgcgcacaaaggctcaatgtctgcggaagttttagaccgtactaagcaagcaattgaattgcttcctgactttttacaaccaggaattgttgaatggaataaggggtcaattgaactagataatggttcttcaattggcgcttatgcttcctctcctgacgcagttcgtggtaactcgttcgcaatgatttacattgacgaatgcgcatttattccaaacttccatgattcctggcttgctattcagccagtaatttcatctggtcgtcgttcgaaaattattattactacgactcctaatggattaaatcatttttatgatatttggactgcagccgttgaaggtaaatctggatttgaaccatatactgctatttggaattcagttaaagaacgtctttataatgatgaagatatttttgacgatggatggcaatggagcatacaaaccattaatggttctactttagctcaatttcgtcaagaacacactgcagcgtttgaagggacttctggtacattaatttcaggaatgaaattagctattatggatttcattgaagtaactccagatgatcatggttttcatcgatttaaaagccctgaaccagatagaaaatatatcgcaactctagactgctcagaaggtcgtgggcaagattaccacgctttacatattattgatgttaccgatgatgtgtgggagcaggttggtgttttacactcaaacactatttctcatttaattctacctgacatcgttatgcgttatttagtagaatacaatgaatgcccagtttatattgaattaaatagtactggtgtgtcagttgcgaaatcactttatatggatttagaatacgaaggtgttatctgcgattcatatactgatttaggaatgaagcaaactaaacgaacgaaagcagtaggatgctctacattaaaagaccttattgaaaaagataagcttattattcatcaccgtgcaactattcaagagtttagaacgtttagtgaaaaaggcgtgtcttgggcggctgaagaaggttatcacgacgatttagtaatgtctttagtaatttttggatggttatcaacacaatcaaaatttattgattatgctgacaaagatgacatgcgactagcatctgaagtattttcaaaagagcttcaagatatgggtgatgaatacgctccagtcatatttgttgattcggttcattctgctgagtatgttccagtatctcaaggtatgtcaatggtataaatatattaaagcatattaaagaggattaaaaatgactttattatctccgggcattgagctcaaagaaactacggttcaaagcaccgtggttaataactctactggtacagcagctttggccggtaaattccagtggggtcctgcttttcagattaaacaggttacaaatgaagtagatttagttaatacttttggtcaaccaaccgctgaaactgctgactattttatgtctgcgatgaatttcttgcagtacggaaatgacttacgagtagttcgtgctgttgatagagataccgctaaaaactcatctccgattgctggtaatattgaatacacaatttctaccccaggtagtaactatgcagttggagataaaatcacggtcaaatatgtttcagatgatattgaaactgaaggtaaaattactgaagtagacgcagatggaaaaattaagaaaattaatattcctactgcaaaaattatcgctaaagctaaagaagtcggtgaatacccaacattaggttctaactggactgcagaaatttcttcgtctttctctggtttagccgcagtaataactcttggaaaaattattactgattctggtattttattagctgaaattgaaaatgctgaagctgctatgacagcggttgactttcaagcaaatctcgaaaaatacggaattccaggagtagtagctctttatccaggcgaattaggcgataaaattgaaattgaaatcgtatctaaagctgactatgcaaaaggagcttctgcattactcccaatttatccaggtggtggtactcgtgcatctactgctaaagcagtgtttggatatggaccacaaactgattcacagtacgctattatagttcgtcgtaatgatgctattgttcaaagtgttgttctttcaactaagcgcggtgaaaaagatatttacgacagtaacatctatatcgatgactttttcgcaaaaggtggctcagaatatatttttgcaactgcacaaaactggccagaaggattctctggaattttaactctgtctggtggattatcatcaaatgctgaagtaacagcaggagatttgatggaagcttgggacttctttgctgaccgtgaatctgttgacgttcaactgtttattgcgggttcttgtgccggtgaatctttagaaacagcatctactgtccaaaaacacgtcgtttcaattggggatgctcgtcaagattgcttagtattgtgctcaccaccacgtgaaactgtagttggaattcctgtaactcgtgcagtagataatttagttaactggagaactgcggcaggttcatacactgataataactttaatatcagttcaacctatgcagcaattgatggtaactacaaatatcagtatgacaaatataatgatgtgaatcgttgggttccattagcagctgatattgctggtttatgcgcaagaactgataacgtatctcagacttggatgtctccagctggttataatcgtggccagattcttaacgttattaaacttgctattgaaactcgccaggctcagcgcgaccgtttataccaagaagctatcaacccggtaactggtacaggtggtgatggttacgtattgtatggtgataaaacagctacttctgttccttctccgtttgatcgtattaacgttcgtcgtctgtttaatatgttgaaaacgaatatcggacgtagttcaaaatatcgtttgttcgaattaaacaacgcgtttactcgttcatcattccgcacggaaacttcccagtacttgcagggaattaaagctctcggtggaatttatgaatatcgtgtagtttgcgatacaacaaataacactccgtcagtaattgatagaaatgagtttgttgcaacattctacatccaaccggcgcgcagtataaattatattactttgaatttcgtcgcaactgctactggtgcagacttcgatgagttaactggtcttgcaggttaattgattatggggcttcggcccctattctcgaggaaacaagtgattatttctaagtttgttaaagtgaaaattgtaccatcaaattttaaacattatcaatcaaagggttataaattaacacctcttggagcggttaaacatggatttaggtattatgaaattgatgttaaagttgaagacattaaaggtagtactgcgtatgtaaaatgccgttgcgataaatgtggaattgaatataaccaacgcattggaagaaacactgatatttgtcgtgattgccgtcataaagataaaatgcgcaataattcatacggttccgcgaataaaggaaaaacagtagaatgtatgcatggcgtaaatcatccaagatggaacccaaataaatctgaaatgcgtgaatatatttcattggtatataaagaaactcgtaagcataagaaaatttggtcaaaatggccaaatgctgataaaataggagtgtgtggtacaaaaggtgcttaccaacttgatcataaggtatctatcaaatacggttttgataatttaattcctgctaaaataattggcggtattaataatttagaaataatcacttgggaatctaaccgagaaaaatcaaaaagaaatagtgtagatctttgggatttactagaatgattctaaaggcctgtttcggcaggccatataaatacactatatccttaattctttaattctatatgccctaggttaaacatagggatataaatactacagaggctaatatgtttgtagatgatgtaacacgagcgtttgaatctggtgattttgctcgacctaacttattccaagtagaaatttcttatcttggacaaaattttacgttccaatgtaaagctactgctctaccagctggtattgtagaaaaaattccagtcggatttatgaaccgtaaaattaacgtagcaggtgatcgtacattcgatgactggactgttacagtaatgaacgatgaagctcatgatgctcgccagaagtttgttgattggcaaagcattgctgccggtcaaggaaacgaaattactggtggaaaacccgcagagtataaaaagagcgctatcgttcgtcaatatgctcgtgacgctaaaacagtaacaaaagaaattgaaattaaaggtctgtggcctactaacgtgggtgaacttcaattagattgggattcaaacaatgaaatccaaacctttgaagtaactcttgctctcgattattgggaataaaatgaatggggagaaatccccatcctgcttaaagcagagaagtccattataaatataactataattcccatttggagaatacaatgaaatttaatgtattaagtttgtttgctccatgggctaaaatggacgaacgaaattttaaagaccaagaaaaagaagatcttgtttccattacagccccaaagcttgatgatggagcgagagaatttgaagtaagctcgaatgaagctgcttctccttataatgctgcattccaaacaatttttggttcatatgaaccaggaatgaaaactactcgtgagcttattgatacatatcgtaatctcatgaataactatgaagtcgataatgcagtttcagaaatcgtttcagatgctatcgtctacgaagatgatactgaagtcgtagcgttaaatttggataaatctaaatttagtccaaaaattaaaaatatgatgttagatgaatttagtgatgtattaaatcatctatcgtttcaacgaaaaggttctgatcattttagacgttggtatgttgattcaagaattttctttcataaaatcattgatccaaaacgtccaaaagaaggcataaaagaattacgtagattagaccctcgccaagttcagtatgttcgtgaaattataacagaaactgaagctggcacaaaaatagttaaaggttacaaagaatattttatatatgatactgcccatgagtcatatgcatgtgatggtagaatgtatgaagctggcacaaaaataaaaattcctaaagctgccgtcgtttatgcccattctggattagtcgattgttgcggtaaaaatatcatcgggtatttgcatcgtgctgttaaacctgctaaccaattaaaattactagaagatgctgtagtcatttatcgtattactcgtgctcctgatcgtcgtgtttggtatgtagacacaggtaatatgcctgctcgtaaagctgccgagcacatgcaacatgtcatgaacacgatgaaaaaccgtgtagtatatgatgcatcaacaggtaaaataaaaaatcaacagcataatatgtctatgaccgaagactattggttgcagcgccgcgatggtaaagctgtgacagaagttgatactcttcctggtgctgataataccggtaatatggaagatgttcgttggtttagacaagctctttacatggcattacgtgttcctctttcacgcattccgcaagaccaacaaggcggtgtgatgtttgattctggaactagcattacacgtgatgaattaacgtttgctaaatttattcgtgagttgcagcacaagtttgaagaagttttcctagatccgcttaaaacaaatcttttgcttaaaggtataattacagaagatgagtggaatgatgaaataaataatattaagatagaatttcatcgggatagctactttactgaactcaaagaagcagaaattttggaacgaagaattaatatgctaaccatggcagaaccatttattggtaaatatatttctcacagaactgctatgaaagatattttgcagatgactgatgaagaaatagaacaagaagccaagcaaattgaagaagagtctaaagaggctcgtttccaagaccccgaccaagaacaagaggatttttaatggaaggtttaattgaagctattaaatcaaacgacctcgtagccgctcgtaaattatttgctgaagccatggctgcaagaacgattgatttaattaaagaagaaaaaatcgctatcgctcgtaatttcttaatcgaaggtgaagaacctgatgacgaggatgatgacgaagacgaagatagtgatgataaagacgacaaaaaagacaaagactctgatgaagatgacgaagacgaggatgatgaataatgcttctgatccctgaaactcatgaattagttctcgagaatgtcgaagcacttattcctgaagcacagggtcgctttgacgaattgtcttctgctttaaataaagacgatataaatacaattgtcgagaatatgcttgatgatgaaactgatttagcggttgcattagcttctattaatgaaaatatgccgttaaatgaatttatcgttaaacatgtttctgcccgtggtgaaattactcgcactaaagatcgcaaaacccgcgaacgtaatgcatttcaaactaccgggttgtctaaagcaaaacgtagacaaattgctcgtaaagctaccaaaacgaagattgccaatccagcaggtcaatctcgtgctcagcgtaagcgtaaaaaagctcttaaacgccgtaaagcattaggattaagctaatgaatgaaccccaattactaattgaaacttggggtcaacctggcgaaattattgatggcgtaccaatgcttgaatctcatgatggaaaagacttaggtttaaaacctggtttatacatcgaaggaatattcatgcaagcggaagtcgtcaatagaaataaacgtctttatccaaaacgtatattagaaaaagcggtaaaagactatattaatgagcaagttttaactaaacaagctctcggagaattaaatcatcctccacgcgctaatgttgacccgatgcaagccgctatcattatagaagatatgtggtggaaaggaaatgacgtatacggacgagctcgtgttattgaaggtgaccatggtcctggagataaattagcagctaatattcgtgccggatggattccaggagtttcttctcgtggattaggttcattgactgacacaaataaaggttatcgtatcgtaaacgaaggattcaaattaactgtaggtgttgatgcagtatggggtccaagtgctccagatgcatgggtaactcctaaggaaattaccgaatcacagacggcggaagccgatacaagtgccgatgacgcctatatggctctcgcagaggccatgaaaaaagcgttataaatattattatctaaacaacaggactacaaaatgcttaaagaacaactgattgccgaagcgcagaaaattgatgcttccgttgctcttgatagtattttcgaatcagttaatatttctccggaagcaaaagaaactttcggcactgtattcgaagctaccgtcaagcagcacgccgttaaattagctgaatctcatatcgctaaaattgctgaaaaagcagaagaagaagtagaaaaaaataaagaagaagccgaagaaaaagctgagaagaaaatcgctgagcaagcttctaaattcattgaccatcttgcgaaagaatggctcgctgaaaataaattagcagttgataaaggcatcaaagccgaactgtttgaatccatgcttggtggattaaaagagctctttgttgaacacaacgttgttgttccagaagaatcagttgatgttgtagctgaaatggaagaagagctgcaagaacataaagaagaatcagctcgtctgttcgaagaactcaataagcgtgacgcatatatcaattatgtgcagcgtgaagtggcattgagcgaaagtactaaagatctgactgagtctcaaaaagaaaaagtctctgctctggtcgaaggtatggattattcagatgcattctcaagtaaattgagtgcaatcgtagaaatggtgaagaaatctaataaagatgaaagcactattactgagagtataaatactcctgatactgaagcagccggactgaatttcgtcactgaagctgtagaagataaagctgcacagggtgcagaagatattgtaagtgtatatgcgaaagtcgcatctcgtttctaattttaaaggttaacacaaatgactatcaaaactaaagctgaacttttgaacaaatggaagccattactggaaggtgaaggtttaccggaaattgctaatagcaaacaagcgattatcgctaaaatctttgaaaaccaggaaaaagatttccagacagctccggaatataaagacgaaaaaattgctcaggcatttggttctttcttaacagaagctgaaatcggcggtgaccatggttacaatgctactaacatcgctgcaggtcagacttctggcgcagtaacccagattggcccagctgttatgggtatggtacgtcgtgctattcctaacctgattgctttcgatatttgtggtgttcagccgatgaacagcccgactggccaggtattcgcactgcgcgcagtatatggtaaagacccagtggctgccggtgctaaagaagcattccacccaatgtatggtccagatgcaatgttctctggtcagggtgctgctaagaaattcccagctctggctgctagcacacaaaccgttgtaggtgacatctattctcacttcttccaggaaactggcactgtatatctgcaagcttccgctgtagtaacaattgatgctggtgcgactgatgctgctaaattagatgccgaagttaagaaacaaatggaagctggtgtactggtagaaatcgctgaaggcatggctacttctatcgctgaacttcaggaaggtttcaatggttctaccgataacccatggaatgaaatgggcttccgtatcgataaacaagttatcgaagctaaatctcgccagctgaaagctgcttactctatcgaattagcacaagacctccgcgctgttcacggtatggatgctgatgctgaactgtctggtattctggctaccgaaatcatgctagaaatcaaccgtgaagttgttgattggattaactactccgcacaggttggtaaatctggtatgaccctgactccgggttctaaagctggtgtatttgacttccaggatccgattgatattcgtggtgctcgctgggcgggtgaatcctttaaagctctgttgttccagattgacaaagaagcagttgaaattgctcgtcagaccggtcgtggtgaaggtaacttcattatcgcttcccgtaacgtagttaacgttctggcttcagttgataccggcatttcttatgctgcacagggtctggctaccggctttaacactgatactaccaagtcagtatttgctggtgttctgggtggtaaataccgcgtatatatcgaccagtatgctaaacaggattatttcactgtaggttataaaggtccgaacgaaatggatgctggtatttactacgctccatatgtagcgctgactccgctgcgtggttccgatccgaagaacttccaaccagtaatgggattcaaaactcgttacggtatcggtatcaacccatttgcagaatccgctgctcaggctccggcttctcgcatccaaagcggtatgccttctattctgaatagccttggtaaaaacgcttacttccgccgtgtatatgttaaaggtatctaatctttgacgatttaagggaccttcgggtccctttagttgtttttatggtataaataaatcatataaaccaaaaggaaagcgcaatggctaaaatcaacgaacttctgcgcgaatcaaccacaacgaatagcaactcaatcggtcgcccaaatctcgttgctttgactcgcgctaccactaaattaatatattctgacattgtagcaacacaaagaactaatcaacctgttgctgctttttatggtatcaaataccttaacccagacaatgaatttacatttaaaactggtgctacttacgctggcgaagctggatacgtagaccgagaacaaatcacagaattaacagaagagtctaaattaactctcaataaaggcgatttattcaaatataataatatcgtttataaagtattagaagatacaccatttgctgatattgaagaaagcgatttagaattagctcttcagattgcaatcgttcttttaaaggttcgtctattttctgatgctgcagtaacaagcaaatttgaaagctctgatagtgaaattgcggatgctagattccagattaataaatggcaaaccgcggttaaatctcgtaaacttaaaactggcatcacagttgaattagcgcaagatttagaagcaaatggattcgatgctcctaatttcttagaagatttgcttgcaactgaaatggcagatgaaatcaataaagatattctgcagtctttgattacagtgtcaaaacgctataaagttacaggaattactgataccggattcattgatttgagttatgcatctgctcctgaagctggtcgttcattataccgaatggtatgtgaaatggtttcgcatatccaaaaagaatcaacttatacagcaacgttctgtgtagcttctgctcgtgccgccgcgattcttgctgcatcaggttggttaaaacataaaccagaagatgataaatatctttcacaaaatgcctatgggtttttagctaatggtttaccactttattgcgatactaacagcccattagattatgtaatcgttggcgtagtagaaaatatcggtgaaaaagaaattgttggatcaattttctatgctccgtatacagaaggtctcgacttagatgaccctgaacatgtaggtgcatttaaagttgttgttgatccagaaagcttgcaaccgtctatcggtttattagttagatatgctttatctgcaaatccttacaccgtagcaaaagatgaaaaagaagcaagagtaattgatggtggagacatggataaaatggcgggtcgttcagatttgtctgttttattaggtgttaagctaccaaaaattatcattgatgaataaaacaaagggacctttcggtccctttttatttaacttaccaattcaattcaatccaagccggacgaagtacatcttgtaccattttaactaattcctttttaatcaaagaaggattatccgcttgagttagagtaataccttcacgagaagtttcttccaaaatatcttgaacagttagtcccatcacctttccaaaatcttttggaccaatttcgccaattttagaaataacgttatttactcggtttagtgtaacgtaacaagctaaaatccccaccaatttgttatcagcttctgacagttcaactttagctttaataggcttatcagactttttcttttcactaaatttagaattcttgcatttgatggctacacgattgcgattaggcagccaagaaggatagcaaggtttcaatacatatccttcagcggtaaatacttcgcctttggcttcagctttccaaacacatttgttagcgtcaattaaacctgcattatctacggtaaaattataagacggaacaacagaatccaaatcatttggaagtttaataagatcttcaaatttaccacgacccaaaagtggagcgattttaaacccaaatgaattacaaaacgattccatcatgtaatcatcaacataagttacatcaccactttcggtagtgacaataatgtcaaatacataaaaatctttatcgccataatcaacattcttctgaatgccaggtccagcgaattcgccaaaaacttgataagtcacaacagctgaagtttccataatttcttggacagctttaatagaatcttcgtaattctttaaaataatttcataaccgaagaaatcttcagcaggaagaatcggtccagtacgtttagcgcaagtcactttatcacgctcaataatcaacgagaaatttgtgccgtgaatcttttcacgagctacccattcgccgccagtcaatcccaagctgtaaagtttttcaataaatttagagttgtaatgattttcaagactgctatactttttaaacataattaatcctcaaaatgtaatttctaaccaatcaccatcacgctgatcactattgactttaaagctgaatccttcttttctcagccaatcaccaatttcttcagtaatcaatttatcgcgagcagtacaataataactaaaatatgttttaccttgttcagctgctttattagcaagttctgaaaaatctttaataaaacactctagcttaaactgtttactttttaatgctttttcacgtaattgattagcaaaagattcattttcataaagatcatactgttccatttttcacctttttattgatatgtctttttctatagacaactttttctcgagtttcaaatttattcttagcagtcatagctcgagcccataatacagccacttctttcgcctgtaagtttaattcacgagcaatttcaatgaatgactttccagactcatgaagagtaaacaccacaacctcagttctcataatcaatctcatgttatcgagttggtgccattatatacaccattttctgattgtgttttgtgtgctttcaaaatgaaaaaagggccgaagccccttatgattatggataggtatagatgataccagtttctaaagcagttttgtgaatgatgtatccattacgtgattcttgaacatcaacttctggatagtctttcatcattttctgaagagtgtaacgatgcaagtagtacttactatctggatcatcagttttccaatctttaccttcttcggtcattttttggatttcatccataacccaccaaccgcaccagatgtaagctgagctacggtgtggaagaggatgaacataaggtaattcaccttctggttctggagcaactttatcagtcacttgaacttgaccttctgctgtaatagttttactatcataatcagttgccgtaacgatagcagtaacttcaatagtttgacttccaacagatgacgtatcaacggtatacacattagttgatccttctacgggagaagaatctttcttccatgaataagcaatttgtgcttcttctggtgcatcagtgacattagcagtaaatgtagccgaagcatcttgttgaacgttaatagaaggaggagtcaatgtaacctgtggattcattgtcttcttattaactgttaatgatacttcattcgaagtaacttccttttcattgtaattttcagcagttacttgggctacgcatttaattctttttactccacttgtggtaggagtgtaattgaatgtagcagaagttgcttcgcctacaggagaaccgtcaacgtgccattgatacgtagcagacgctccaactggttgagaagataaggcagcagtaaattgaactggggttccaattactccaactgaaggactatcaggagttacagctaaagtagttgtctgtgtcttattttgaactgtgatagttgtagtagcttctgctgtttcagcatcagtatctggaactgggtttgttgcaactactttaatagttttttgaccggcaggtccttttagtacataactaaaagttgctgacgtttcttcctgcggagcgtcgtctacagtccaagcatatgtaataggtccatctccagtttgaccactgggtgtagcagtaaactgctgagtctgatctataactccagtaggcgttttaggagttatatcaactgtaaaagtcataaattatccttattttaatgttacgaaagaagaattacgtgtttcacgaattagaactgatccgtcacgattaatgtagtaaattaagctaaataaagtttggtgtgctgacgcatgctcaaaacttgttgggtgagatttccaatccggagtttcagcaatccattgataaatccaccaaggaacagtacagaatcctggattttttccaatcaactgaagattcgggctaaagttttccggaagagtaaatacagacggattttcagattcaataatttcagctacagcctgttcaaatttttcttcaacaaaaggagtatcttcaatcaaaacatcggtattttcaggaattttatccgtttctactacttcaattttaatgtcagatttaaccggagaatcaatcagaagtgctgcttctggattgacttcttcatcgtcatattttaatccctctgcagcatcagcagcatcaattaagtctttaatagataacccatcagtctctggcataggttcactagcgagcttctggagggcttcttcaatatcattaacgatattatcaaaagatttattctttttgacctttataccaaactgttcagcatattcagctaatttagctttagcttctttgttatcatcaagagccttcagctctgcaatataatctttatctatcataatatttcctcagtataaatatagatatatttattactcggaaaatagtatgtaccactttgtatatgaaacaacaaatctaataaatggtaaaaagtatataggaaaacactctactgatgacttgaatgatggttaccttggttccggtaaggcaattcagcaggctataaagaaatatggtgaaaacaatttctctagaacaatactaaaagagtttaaaacttccgaagaagcgtacatgtatgaagaagaaattataactcctgaaataataaaaagcaaaaattattataatatgaaacctggcggaattggtggaattgttatgactacagaggttatagcaaagatgaaagaatcttccgctaagagatttgaaaactcaccgggcacggtattaggtacaacttgttacactaatggaactaaaaatatttttattaagcctggagaacttgttccagaaggatttgtaaaagggatggttcatcctaatagaaagtccagaaaaggatgtaaagtcaaaccgactaccacaggaactttttgggtcaataatggtgcaataaataaattaatacaaccagacggtattattcccgacggatttattaaaggtcgtctcatgaaaagagattctaaaggcaaatttagtaaggcataattatggatattaaagtacattttcacgacttcagtcatgtacgcatcgattgtgaagagagcacgttccacgaattaagagatttcttttcgtttgaggccgatggatatagatttaaccctcgcttcagatatggcaactgggatggacgaatccgtcttttagattataatcgtcttcttccattcggcttagtcgggcaaattaaaaagttctgtgataactttggctataaagcctggattgacccacaaattaacgaaaaagaagaattatcaagaaaagattttgatgaatggctttctaaattagaaatctattcaggaaataaaagaattgaaccacactggtatcaaaaagatgcagtgttcgaaggattagttaatcgtcgtagaattcttaatcttccaacatctgcaggtaaatctttaattcaagctttgcttgcgcgatattatttggaaaattatgaaggtaaaattcttatcattgttccaacaaccgctttaacaactcagatggctgatgacttcgttgactatcgtttattcagtcatgcaatgataaagaaaattggtggcggagcatcaaaagatgataaatataaaaatgatgcaccagtcgttgttggtacatggcaaactgtagtaaaacaaccgaaagaatggttctcacagtttggaatgatgatgaatgatgaatgccatcttgctacaggaaaaagtatttcatctatcatatcaggtttaaataactgcatgttcaaatttggtctatctggttcattacgtgatggcaaagccaatatcatgcagtatgttggaatgtttggtgaaatatttaagccagtaacgacttctaagttaatggaagatggacaagtaactgagctaaaaattaatagtatttttcttcgctatcccgatgagttcactactaaattaaagggaaaaacttatcaagaagaaataaaaattattacggggcttagtaaaagaaataaatggatcgctaaattagctattaagcttgcgcaaaaagatgaaaacgcttttgtcatgtttaaacatgtatcacatggtaaagctattttcgatttaattaaaaatgagtacgataaagtttattacgtatcaggggaagttgataccgaaacccgcaatataatgaaaaccttagctgaaaatggtaaaggaataattatagtagctagttatggtgtattttctactggtatttcagttaaaaatctgcatcacgttgttttagcgcatggtgttaaatcaaaaatcattgtattacaaacaatcggtcgtgtattacgtaagcatggttctaagacaatagcaacagtctgggacctcatagatgattgtggtgttaagccaaaatctgctaatacgaaaaagaaatatgttcatttaaactatcttttaaaacacggcattgatcgtattcagcgctacgcagatgaaaaatttaattacgtaatgaaaacagttaatttataagggcttcggccctttggagaaaaagatgttactagaatttaaacaatttctttatgaagcttctattgatgaatttatgggtaaaattgcctcttgtcaaacattagaaggtttagaagaacttgaagcttattataagaaaagagttaaagaaactgaattaaaagatactgatgacatctcagtcagagatgctttggcaggaaaaagagctgaattagaagattcagacgatgaagtagaagaaagcttttaaattaaaaaaggcccaaccaaaaaggaagggccaaaactatagactaaaggtcacactatagcaaaagttgtgtttcatttaattgttcttccgaactttctgaaactggtagttctttaatgtaattatagcaaggcccaggatgtacaggacctttgtctgtttcaacaaccaacgcagaatcgattggagttttacagacaacacaaatcttatctgacatgattgtctcctctgaattatatatctatttatacaactctcatatgcatatcaatgcccatatctttagaataaaaatattcatcaagatatccggcaaattttcctttaacataaagaacatcttcaccacacgggtggtcggctaggatacgaatatcctgacgcttaagattatgctttttcattaagaattgaatttccgtttcaaattcttcttcataattaaaagcatcatcaatgctatatctcattattttccagcctcaaatgcccgcatgtcttgaatatgcttaatagcaaatccacgtgatttaatagcatcaagagctccgctacagaaatctaataaaattccccaatattgtaatgaagtatcaacctttaaaacatccttatcagctgatagaactgtcttcatttctgatttctcgtaacgatccatactaaattcatcaccatctcctcgtcccgagtagtagtctaatctagctttaagagcaacttttttctgtgcgtcaattctaagcatttcctttttaatacttgaatgcttattaagccatttactatataacatcacattattagctgcttcatactgtaatttagtcgaatctataaacacatctttcttcaattcttcttgaagatcttctaatctcatattgttctctattcaattgttattggatggacttagattcattataccacgtttatacgtgaagcattatactctattactggaagccagttgtagttttatctgctcaatatcatcagggttatcgatgactgaaaagcgtatttctactatcagagtataatcatcataaaccggtattacattaactgctaatttatcaatacgtggctcatagtttcttactgcgctttcgatattacgctcaaccgtgtcagcagtaagaggagtcatattctcaaaaagttggtcagataaatcgcatccaaattcagggtcaaacggtcttgaaccttttcttgttgtaataattcctaaaagactatttttaattgaccttaatccaagtgatcttgaaacgtctttgttccaatccattttcatctctgggtcaatatcagaataaagcttattaatatttgccattacaatagctcaaagaattctttgagtcctcttattacatgagcgtgagtttttccacactctggacacttaattggaacagccaaataaacagtaggctttaaaagcatatcttttatagctacaatatctgactctgtgatgatagaatataaatcttccaattctttttcatttaagtcttcaactggaatgctttcaccgttagcatgaatcgtttctatacatgatactatcatgtgggctatatttttatcatcaaaaattttagggtaatggaatttaattttaatgtcacccagtgtataccagaggtcttctgatgcatctatttgtgtatgtaatagatttatatgggttggtatttcagttccacaggtgcacttccaagagttttcgtgattaacttcaccaagagaatgcgcccataaatgaatcagtaatagttctgattcttggcggtttaaatcttttgcatttgtacagtctttgattagctttttaacaatctcttctactgaaccattctttttagcagtaataagttctagatattctttaagagtaaatgcgcgacagttgattattttagaaccaactctcacatcaaatttgtattcatacatatttagctcctttatttatcatatttataaatagaataaaaggagcatctatggcaaacattattcgttgtaaattaccagatggtgttcatcgttttaaaccatttacggtagaagattatcgagattttttgttagttcgaaacgatatagaacatcggtcaccacaagaacaaaaagaagtaattgctgatttaattgctgattattttggagactatccaaagacttggcaaccatttatatttttgcaggtatttgtaggttcaataggtaaaactaaagtaccagtcacatttgtatgtccaaaatgtaaaaaagaaaagacagttccatttgaaatatatcaaaaagaattaaaggaacctatttttgatgtagctaatgttaaaattaaattaaattttccttctgagttttatgaaaataaagcaaagatgattactgaaaatattcattctgttcaagtcgatgaaatgtggtatgattggaaggaaattagtgaatcaagtcaaatagaacttgttgacgccatcgagatagaaacattagaaaaaattctcgatgcaatgaatcctattaatttaacattgcacatgtcatgttgtaataagtatgtaaaaaaatacactgatatagtagatgtgtttaagctattagttaacccagatgagatatttactttttatcaaattaatcacacactcgtaaaaagtaattatagcttaaattcaataatgaaaatgattcctgctgagcgcggattcgtattaaaactgattgagaaggataaacatcaatgagtatgttacaacgccctggatatccaaatctcagcgttaaattatttgagagttatgacgcttggagtaataatagatttgttgaattagctgctactattaccacattaactatgcgtgactctctttatggtcgaaatgaaggaatgctacaattttatgattctaaaaacattcatacaaaaatggatggaaatgaaataattcagatttctgtagctaatgcaaacgatattaataatgttaaaacacgaatttatggatgcaagcatttttccgtgtcagtagattcaaaaggcgataacatcattgctattgaattaggaactattcattctatagaaaatcttaaatttggtagaccatttttccctgatgccggtgaatctataaaggaaatgcttggcgtaatttatcaagatcgtacattattaactccagcgataaatgctattaatgcttatgttcctgatattccatggactagcacatttgaaaactatttgtcatatgtaagagaagttgctctagcggtaggaagcgataagttcgtatttgtatggcaagacatcatgggagttaacatgatggactatgatatgatgataaatcaagaaccatatccaatgattgtaggtgagccaactttaataggtcaattcgtccaagaattgaaatatccattagcatatgattttgtttggttgactaaatcaaacccgcataaacgtgatccaatgaaaaatgctactatctatgctcattcgtttttagattcttcactgccaatgattactacaggaaagggtgaaaactctattgtagtgtcaaggtcaggtgcttattctgaaatgacttatagaaatggatatgaagaagctattcgtcttcagactatggcgcaatatgatggctatgctaaatgttctactgtcggtaattttaacttgactcctggcgttaaaattatttttaatgatagtaaaaaccaatttaaaacagaattttacgttgatgaagttattcacgaattatcaaataataattccgtaactcatctttacatgttcactaatgcaacgaaactggaaacaatcgacccagttaaggttaaaaatgaatttaaaactgatactaccactgaagaaagtagttcttccgataagtaataaagaagtttctattcctaagatgggtcttaaacattataacattttaaaagatgttaaaggtcctgatgaaaatttaaagcttcttattgattctatttgtccaaatttatcaccggcagaagttgatttcgtttctattcatttgctagaatttaatggaaagattaaatctcgtaaagaaatagatggttatacttatgatattaatgacgtttatgtatgccaaagattggaatttcaataccaaggaaatacattttattttagacctcctggaaaatttgaacaatttttaactgtaagcgatatgttatccaaatgcttgcttaagatcaatgatgaagttaaagaaattaattttcttgagatgccagcatttgttttaaaatgggcaaatgatatttctacaactttagcaattcctggccctaatggtccaataaccggaattggcaatattattggattatttgaatgaaaaagccacaagaaatgcaaacgatgcgtagaaaagttatttcagataataaaccaacacaggaagcggctaaatccgcttctaatactttatctggtcttaataacatttctacaaaattagatgatgctcaagctgcttctgaattaatagctcagactgttgaagaaaaatcaaatgaaatagttggagcaattgataacgttgaaagcgcagtaagtgatactactgccggttctgagttaattgccgagactgttgaaattggcaataatatcaataaagaaataggcgaatcactcggaagcaaattagataaattaacgagtttattagaacaaaaaattcaaacagctggaattcaacagactggaacgagtttagcagtagtcgaaaatgctattcctgttaaagtcgtcgaggatgatacagctgaatctgtgggtcctttattaccggctcctgaagcagttaataatgatcctgatgctgattttttccctactcctcagccaattgaaccaaaacaagagtctccagaagagaagcaaaaaagagacgcatttaacttaaaattatctcaagctttagataaattaacaaagacagttgatttcggatttaagaaatctatttcaattactgataaaatatctagcatgctatttaagtataccgtcagtgctgctattgaagctgctaaaatggttgcattgataatggctgttgttattggaatagacctactgatggttcattttaaatactggtcagataaattttcaaaagcctgggatttatttagcactgattttaaaactttctcaagcgaaacaggaacttggggtcctttattacaaagcatctttgaatctattgatgaaattaaaaagttctgggaagctggagattggggcggattaacagtagctattgttgaagggcttggaagtgttctttataatttaggagagcttattcaattaggtatggctaaattatctgcagcaattcttcgagtcattcctggcatgaaggatactgctgatgaagtagaaggaagagcattagaaaatttccaaaattctactggagcatctcttaataaagaagaccaagaaaaagtagcaaattatcaagataaacgaatgaatgatgatcttggcccaatagcaaaaggattagacaaaattgcgaactggaaaactcgtgcatctaactggattcgtggtgtagataataaagaagcattgactactgacgaagaacgtgcagcagaagaagaaaaattaaaacaactttcaccggaagaaagaaaaaatgctttaatgaaagctaatgaagctcgtgctgcaatgattcgttttgaaaaatacgctgattcagctgatatgagcaaagactcgacagttaaatcaattgaagctgctcatgaagaccttaaaaaacgaatgaatgatccggatttaaataattcaccagcagttaaaaaagaacttgcttctagatttgctaaaattgatgccacttatcaagagctcaagaaaaatcaacctgaagcaaaacctgaaacttctgctaaatcaccagaagcaaaacaggtccaggtgattgaaaagaacaaagcacaacaagctcctgttcaacaagcatctccttcaatcaataatactaataatgttattaagaaaaatactgtcgttcataatatgacacctgtcacaagcacaactgctcctggtgtatttggtgcgacgggagttaattaaggaataatatggcaattgttaaagaaataactgctgatttaattaaaaagtccggtgaaacaatttcagccggacagagtactaaatcagaagtaggaactaaaacatacacagcccagtttccaactgggcgtgctagtggtaatgacactacaggggacttccaggtaacagatctatataagaatggattattatttactgcatacaatatgtcatctagggattctggaagtcttagaacgatgagatctaactactcttcttcatcttcgagtattttacgtacagccagaaacactatcagtaatacagtatcaaaactatcaaatggactaatatcagataataattcaggaacaataagtaaagttcctgttgcaaatattcttttacctagatctaaatctgacgtcgatacgtcatcacatagatttaatgatgttcaagatagtcttattacaaaaggcggaggaactgctacgggcgtattaagtaatatggcttcaactgcagtatttggtgcgcttgaaagtataacacaaggaataatggctgataataatgaacagatctatacaacagctagaagtatgtatggcggtgctgaaaatagaacaaaagtgttcacctgggatttgactccgcgctcaacagaagatttaatggctattattaatatctatcaatattttaactatttttcttacggtgaaactggtaaatctcaatatgctgctgaaataaaaggatatttagatgagtggtatcgttctacatttattgaaccattaacgccagaagacgcgattaaaaacaagacgttatttgaaaaaatgacatcgagtttaacgaacgttcttgtagtttcaaacccgacaatttggatggtgaaaaactttggtgcaacttctaaatttgatggaaagactgaagtattcggtccatgccaaatacagagtataagatttgataaaacaccaaatggtaactttaatggattagctattgctcctaaccttccaagttcttttacactcgagattactatgagagagattattacgttaaaccgtgcttctttatatacggggactttctaatgtattctttagaggaatttaataatcaagcaataaacgcagacttccaacgtaataatatgttcagctgtgtttttgctacaactccatcaactaaaagctcatcgttaataagctcaattagtaactttgcttataataacttgggtctaaattcagattggctgggattaactcaaggtgatattaatcagggaattaccacgttaattaccgctggcacacaaaaactaataagaaaatcgggagtcagtaaatatcttattggcgctatgagtcagcgtactgtccagagtttattaggctcatttacagttggtacatatttaattgacttctttaacatggcatataactcatctggattgatgatatattctgtaaaaatgccagaaaatagattatcttatgaaactgactggaactataactctcctaatattcgtataactggaagagaattagaccctttggttatttcattcagaatggattcagaagcttgtaactatcgtgcaatgcaagactgggttaacgctgttcaagacccagtaactggattgcgtgctttaccacaagatgtcgaggcagatattcaggttaatcttcattctcgcaatggattaccacatactgcggtgatgttcactggctgtattccaatatctgtgagtgctcctgagttatcatatgatggagataaccaaataactacatttgatgttactttcgcttatagagtcatgcaggctggagcagttgatagacaagctgcccttgaatggcttgaatctgctactataaatggtattcaaagcgttctcggaaatagtggaggtgttactggactatctaattcgctttcacgacttagtagattagggggaactgcaggaagcatttcaaatattaatactatgacaggaattgtcaattcgcaaagtaaaatattaggagcaatataacaatggggaccgaaaggtccccatatttttatttacggaatgaaataaaagcagcaactgaagcaacagaggtttcttcaatataaacctcaatttttaccggagcttctgactcaaatttacctgttactacaccttggaaaatactttcagtctgttctggctttgaaaaattttcagaaggaaaaattccgaactttttatctgttccaaaaattttaataaattcatcgtaaactgcttcattaaaagcattatcagcaggaataacgccttcaactacaagttcttgacctaaaaagcgcaaagaagatttcattttgtgttcctcatgttatgtcagtaagactactataacacaacataagggacttgtaaactacattttgaactttttagacattccgttgatgttaaccaaagaagccaagatttgagaaacttcgttttcctcttcttttgattcttctacaagaaattgattaaatccagccattggacgaacttcaccagtttccattaaatggtcgccatcatataccgattcctctaattgttcagaaggaggaacgattgtaccttcgattagatacttgttataagcagtttctttcataaagtacgtacttactttattaatcttcagtaaaattccacgcggtagaataacttcagcttctgatggaaatcctgataaatgacctggaacgataactttgattcgctcagctcctttaattaccatacccacgctagtttcagcatcttcattagcatatgtagaatgactacccatatgcatcaaatcttctgcgtcaactgaaccttctccttcaccagaaaatactgcgccggaatcatctagagccatatagtttttaccatgctcaccgaagatatttggtttaagagatgtggatacgaagttcttgaaatagaacattttgttttcaatgttatgacgcaaagttttaaaggtaacttcttgtccgcgataaagcgtagttcctggaggaagaactgaacctttagcgaatgcagaatccaacgtctcgatgtgcttaatagctcgttccatatattcttcacgggtagaatctggtttacccaaaaggaacgagttcatttcaacatatgaatctgcacaataatcttcaattacatcagattcggcctgagtcaatccttttggagttacttcagtgcttgcgtattcatatgcctgggcagcagattcattaatcaatttataaatgccattcatgacaaattgaataatagctgtcttttcatctggcgtagctttagaacctttaactaaatcattaataattttcttaataacatcaaagctattagaaatattaatgtcagcaagatcgcttaaaattttatcagttttataatcaaagaattctttattctttaaatattcttgagaaccttgatatgttatatcgctctgcaacttgatagatggatcacgtaaacgtgcatgggccaatgcaatatgatttcggaagttttctagttcataatcgctagatttaaaacgagaagcactcctcataccaccgatagctcctttgctgaagtttgaaccaatctggataacgccagagttcatcggaccttctgctttatataccggaactttagattcaaactcttgatatttcttagcagcgaagctatcaccctgaagtgaagcatcgacagtagaatattgagcttgtgctgctaatcgacgactaattttagttttttgaataacagcttgatccgtgcgcttatcattttctaaagcaatagaagcagcaacagcgacagctttaggaacagcattacctgttttaacatctacataaacatcaccgaccttcgattcaacttttgtgaataactcagttgaaataggaggtacacctggaatgtcttctaaattggcatttttacggtaaaccataatatatgcatactttttatcatagtcccagatttcctttaaaagaacatatcgacctgctcctttagtacgtactaaacggtcagcaataacttgcatttgacgagcagcgccatttgttttactttttagtacgcggaataggcatgcgtcaattttatactgtttcattgtttgaagagcagtatcaaaaacagcattaatgacgccaattggatttccacccaagtttctaagcttaaccagcgataatttctcgttgacacctatcattacgatatgcatcattttatcgcctggcttaacgtttttattcgtatcaccgccagaggtgtatgtacaaaatctaaatccaggaagcacgctttcttcaccggcttgaatagcaaaaatttgtggtattttatgcttaggatttaagttaacaaccggcgccgaagcgccgtcaaataattctgtaataagttccatgatttatccttgaacgaacttgtaaggcatgtttgtaatatctatgcaagacgcaataattccaagagatgattctactttctgtttaacatttgatgaaacaaatgatgcaaagtcaactctgtcttctatttcaatatcacctgtcattgcaactacttcgccggtttccattaaacggtcaccgtcataaattaccgattcggtgagttcttcggtggtcataacttcagcttgaatgagttttgtattattagacgtggttccgtcattattagaagcatcagttattttattaactttgaccatcaatccgcgcggtagaataacttcggcttctgttgctattccgagacttcctggatatacaacattaactttatgagctccatcaattgcccatcctatttgaactttaacgtattcaggattttctttatacgctcttatttcgtttggattaatagttattccttcttcatttttatcaactgttaattcattgcgagcttctggttctaaaagaccaataccagcatgtgtaattccaaaacgtccaaaaatgataggagttaaagaagtagatacaaaatttctgaaatagaacactttatttttaactagtgcttcgtatataggagcagtcatactttgagcacgataaactgtaatgccttccggtatgcggtcaccattttcaaaagctgaatctaaattatttatagcagattcaatttctttttcactcattacatcatatcgttctggattgtaacgacctaaaagaagattattaatgtctgtatatcctgaaccacaatattctctaatacctcgcttttgtgatggagtatatttagaaccatcacgggcaatagtaatatcaatcattggaccagcaccaattccagaaaagctataaatcattcgtttgaggaatttagtttttgctgcattccatgcatttttagttatttctccccagacttcatctggttgccctttacgagttttattatgtttatcaagccaattatctttatattcttcaaagaatttattaatagctgctgcgtatttctctaaacattttattgaagtagttggttcatttttgattgcgttaaaaattacatctttaattttttctgaaacttcatcaacctcactttttgaaaagaatttatagtcatagtgaagttcattcgcagttccttcggcaataatttttgctgccttagttttagaagctaacgaattaattccaagcttcatttcttctgcttcgggaattaaaggagcggtagcaggtttattgaaattagctgcggtagattcatacttctggaataattcactttcaaatctagaagattccaatgattgactttgcgcaattgctctacgtgaaattttaactttaacgattacagcttggtcagaacgtttatcattttcttgcgcaatagatgctgcaattgcctcatttttagttacttgagctccagtatctttattgatataaacatcaccgaccttcgattcaactttagtaaagagctcggtactaatttccggaactcctggaatgtcttctagtgatacatttttgcgatgtataagaatatatgcatactttttatcgtaatcccagagttccttaagaaggacgtatctgccacctgaacgactgcggataagtctatcagcaataagttgaatttgacgagcttgaccagcagttttagacttaagaatacggagcatgcaggcatcaattttatactgacgcatcgtttgcattgcaacagtaaaaactgaattgatgtaattaattgggcttggaccgagaccttttaatttagcaattgaacctttagcagttaatgtaaaaggaacaatatgcatcattttatcgcccatctttaaatcgcgattagtatcacctccagatgtataggtacataaacgaaagcctggttgttcaattgcgtcatcaacatgaactgaaaaaatttgcggtattttcttctttggatttaagtttgtaatcggaagagtagtatcttcgtcaaataattctgtaatgagttccatcatatcctctctagtgtttattctatttataaaattaaaggcccgaaggcctttagtaatctagtggtaagagagtacgatatatttcaaactttggacctttttcataggcatcaaatgtttctgtgaatttattataagcatatgcatctacaaattcgagaatgacttgtgatacagaagtagaaacatctccaccttctttttgagcaatgacaattgtttctaagtaagctttcatagaccagttacctcatgaaaatcaccaaatacatcctcgaatgtattagctttagttttatcttcacgtaaacgaatcgcaatcggaagaaataatttaacgtaatcagtacgtccatcagattttaaccaaccgttgcattcgcactctagaatttttccaatataataattttggttttccataatgcgagtacgatcaagttcatgcgattttacaccagctttatcttttaagcctgaaccagcatttactttaatttttccacactctgattcaagaataaatccacctgctttagtagggtctttacggtgaggataaattcctacaatttttaaatcaacatcaattacttctttaaatttatagagattttttgaacgagcattttcccacaatccatcggtatttttgagaataataccttcaagaccttggtcaatatactttttataaattaccttagcttcatctaggttatttactacctggttttcaattaaaattactttatcatatcctgatgtcatttgttctagtttagaaaaacgtacatcatattttaaacgaaacgccggaagaccgtatatttctaccaacggtacataatcccagacctgaaacttcatgcattgtgcttctttttcagaaatggttccctttaaagatttattggcgatgccattagatgcagtacgagattcagctacttcggcgaattctttagctttactaatttcaggataagcatcaaaaagaaaatctaggccttctggctcctttttaacttgctcatggtataccaattcgccatcaattaacacaccttctggatgaatctggcgggcttcagcggtcattttgattaactcttctttgagaaggtctaatcctagatattcattaccagctcgtgataaaagacgaacatcatctaattcatcacctctgacttcggcaaaacaccgagctccatcagcttttaattgggcaaaggctggaaatttgatattcttattaatgcctttttcatcataagaacttgccagcatttgaggttgttcaggaattaaacctggccaaactttgtttgcaatagatactgaagcaccgcattcaaggtctcgcatcatcacccgacgcaaaacttcaacatcatcctttttaccatcggtgatatatccagttaattcttcaattgccgcatttccagtcaatttccgagtagctaatgtgaattcaatgaagtcaagcatatcggtaagagtcaacattccaaaactctgggtagcaataccaggtttaggccatttcttgatataatactgtaacccacgagaataagttagacgatatactcgtttaagcaattcattatctttattcttttcaagaattgcttgcttctgcttagttgaaccaatagatgctatttcgttcagaattttaagaatcattgttcatcctttagagtttggtttacagctctattataaatcaattcatcattaagctcagtcaaagacctatgatatgtagttctaactttatttccttgcatccagtgcttgatataaatgaaaccttgctctacacattttttaaaaattcgttcgtctttttgagctcggaattctggattgcatctaaaaaattgatttacgtgaccataatcacgtgtagtattaccttcattttcataaatagtgtgaacgacaaacattagaatgctccttggaaaatattatcaccactagtaaatctattaaaataccctgcatcaccaggcttagtataactccacgtatggaatggattcatatgatacgggtgtgtataatatggattatatggatgtgtataatatggattatacggattaaatccaggagttctccaggtagtgttccaacgaaaagaatcgtttttaaccatcttctcaattacatcttttatagctttttcactatcaaaactttctttattttccttcggtgaaaaaagcttattttctacatcattccatgtataaactcgctgcgcagtttttggaatattgtcacgctctcctcgagccatccaataaaccggaacatttaatatttcactcgcatgatcgcagtggtgagcaagatcgtcaatataacaaattacgttatatttctcttttgcctttttgaataactcttcttttgaagaatcatgaccacacatcattacttctgagaaggcaccaggaaaaagagcattcaaattaaattgacgattcaacagagcgtcaatagaatcacccaatgctgtaacagctacaaaattataatcttcttttaatttgttaattacacacagagcatctttatacggagacaagtaacgaataaaatctgaacgattgtatttttcaattaacttgacgccaagttcttcatcacaattaaatagtttacctggagaaataaatttctcatcttggatcatttttaaaatatgttctaacggaagattatatttctgagcaaaataaggaagacctgattgccagcttaaacatactccatcaatatcagttaaaatagtaggcttcatagagagtctcttaataggtttaacacatcaataaattcagcttcggttagtattgtatcatcttttgttagaccactagccatgctgtgcttcaaaacttttcctttcgaggcttgtaatgcatcgcgaaagcccctattttggatcgctgcttcaaaatatgcatttgtgtataattctttccacgctggggagtatcttgaaaatggaactccaagccagaagagggtcccacggtcctgagctctagcataagaccttccagcttgttgggcggcaagcccggataacccaaatatacgacgttgttgttcaacatttttcaccttgcacccttggaggaatccttcaagacctccaaattgaataccatccataacgaaaggccattgggcgaaattacttaatgcacatgatggccacctaaaattgcttctaatctctaactcagacattttcaatgcttataatttcaacatcagcccaatgaccatagcaaggaagacgaaattcaactggccagttagggtccttttctaatataatagactcaactcgtggttcttcgtgttcatcagtatatggatttttatctgttactttatatgtgaccttaatgtactgaattccaaaaatcttattaattatattcatactaattcctttaatccgtaaataggagataattcatcgcccatacgaaggtcttcatttccatctacccaggaaacaatataagcctcttttatttgaataccactccatttaaatggaggtagaaccttagaaattaatccaggtataccaactccctttaattcaacagtttgacctaaaaagaatttcattagaacctcatctgaaaaccgtgcgatttaacattaccgccgccaatatcagagatattaatttcgcgcgcaattgaagggtcaatgtcaatttcacgattgagtttagtgatagctaaagtatcgcgcccatttacagtacggaactctaaaggacatactacattaacgtagtttttaatcgattcgctggtaggttgcaaatgagcaggaaggtctttaggcgccttagagaaaaccacttcacagaagtttttacgagtatcaaaataagtagtcataaacatagtattttcctcagcaaggggccgaagcccctcattttattttaaatatcaaattcgttaagaactacatcaaagattgcttcaagatgctcaggtttagctctattactcagaatatgacgaatccaagttttaaccaaaagcttgcgattagcaccattccagcaaggatgagtccctaaatcgcgttcacggaaatcatcatccagagcgattttaaagttggaaccttccatcgtgattgaaaccgtgataccgttttcaaatcgcatataaacgtaattaggagtcatatactgctcaatttcgcatactgatccattttgatgtttccaaaggcaaatagtatcaatagaacctgcaataccattagaaacatatttacgttcaaagttgatgtagttcattttattctccaagatgtttaattgcggtacaggtatataatatcatatcctgtaccaaagtaaactattttatgcaactttaatccaattatctaaatttaattcacctttggctttcattttttcaatcaagaggtcagcggtaatacgaccattttgataccacgtaacatcttcagagtaaccagtttctttatcttcataagtctcacaacgaattttaccaataatcaaagttttcaattcgtatgtatctccagtaaaaaagttagttaacattattttccaagagaaatcatcagaaggaccttcaggagtcatgcaacttacaaattcaaattgttctttgtataagtgccactgaagttctttagtttcgatagctttatagccgtcgtgatctttacctttgatgtatgagttaagattgattttcattttattctcctttgtttgtgtaagataatactatcacaaaggaactatactgtaaacaactttatgcaatctttggaaaataaaaaaggactcccgaaggagtcctcaacttatgctttctgcttaccaaaacgagaagcatcatctcgaagaaccgcacgtgctcggcgcatgatcttctcaacagtttgattgatacgagagttcgacccacgcttgtagccagcgcgtttagaatcaccaactttcttttcaactgctttctttgctttaacttgttttgccattataaattctcttttaaatgaaaatgcaggacttattggcattgcctgcgcaagccctcaagggggtacttaggttttgtatatttaccgacaggataaccataaacccgtcatcattcacattcaagaggtacaccgtaaaactgccggggtcttaaaactataatgattcgcaaatcattaatcagacagttcgacggctcctcgattttagctcacactaaggcagtgaatctccaataaattacttcagtgttaccacaaagtgacgaactgcttttcgtgcagcagaagccagaggcttagcatatttaagttcatctttttcctgaagctcagcagctaatgcagtttgagcaggattcagatgtttaaaataacgcaggatttcaagagcttcggcttcaacatcaatagatgcgccatagttttcgtgaccattattccatgcgtttcgttgcagttcaagagcgtgttgtaattgtttaatcatttaaaaattctcgttagagattaaaactcggtagtcacgttcttctgaatttcatcttctttcgacagatctctcagttgtagactaccacatagaattgttcggttaacttattattccgacacccaattcatattattatttatatcacttataaagacacggaatagctttatagtgacaggtaacgaatttttgcttaatttcttttggctgcttaagacccagagctacaaaaggatgtggaacgtttcgaatttgaccaactggaagagaagtcaaatcaccaacttcacagaaaccttcaggaacatcaggaccaacagagtgaattacacacagttcaggaacttcaccttgaacacgtttaccgataataagtcctgattctgtaacttcttcatcaccggcttgtgcaggttcagaaactaaaataacatattcaccgacagcacgaattggtagctgttgtacttcagacatcgtttttcctttttgttaacagatgaattaataataacaaataattcttaaagcatttatttaccaataaattgaagcaaatgctcaactttcataccattaacggaaatcaatttgtcaatagaaaaacctcgccacgcaccaagctcaacatcaaatactggaatcatgtcagtagattctttccgagtagattcagtcaatttaccagtttgcatggttggcataaagtctgcatcacgagtacctttcatagtacgaatagtaccgtcagacttttcaaaaactacgtttgaaacacccatggacagtttagttttcaaaatttcacgaattgctactttctgctcagttgtcagtttcatttatttacctattacagttttaatatgagttgttccacgttctttaagggtggaaagtaatttttggcatttttctaaatcagatttccaactatacggtctatcaatactagtccaatcagttttataatactgtttccatttagagaaaaaatatttcttatactctacagcaaatgagatgttctcgttagaataagaactaattgctgtaagctttaccaaacgaaatttcattattcaccacagaattcgttgatattttcccaatttaacttattcaagtttttcttaggaacattaaacacttcaatacctgcatttcgcagaatatcatcccagccaggtttatttttatcatatgtttcgcaataaaccagctttttaataccagattgagctattgcttttgcgcaatctgggcaaggagaaagtgttacatacatagtagcaccttcaatagaagaaccatttcgtgcagcaaacaaaattgcatttagttcagcatgaatttcatttttagacgaccattcagagtgagcgctacgatgttctttcgccaaaacaaaacgatcagttgaaccaaatgatacgcattcaggcttatgaccttgaatgatagtgtgtttaggcttattcaacaaccaaccttgctcagcagcataatcacaacagttcacaccccctgctggggaaccattatacccagtagaaataatacgtccattcttttcaattactgctcctaccttccaggagcaacattttgattcctgtgatactaaatatgcaatttgaagtactgtactcgctttcatttcataatcaccagataagcagatttagcagtttcaacacgataaatttcgtgacgaagtttagttatacttttaataacagaactaattatattctgcccatctttaaagcggtttttcttatcaataaaaattgcgccaaccatctttttgtgaagctcaactggatacttcgtcacaataatagcatcatacacagaaggatgaatactattcaccagagtatcattcattaaagttattctaatgaactgtgctgtttcagaatcaagcgctctatgatcgccagcatcattttcaagacaattatcaattatatcagttaaattcatcatagtacgccatacaccctttgtgcttcaactaatccatcaaaatccaatttaagatgcgatatttgatcgccatcacctggattcacaattactaatactgaacgaggagtttcggtaataacacgaaccgatgtttcaggaaatcgttcagaaaccttatttactaattcctgcgcaaatagtttaactttttcttggaattctttaacagtaattggtttttcacttagcagcattttgttttcctcatttgtttggtagagctataatatcacaactctaccgtaaagtaaactattaaattgctttgaattctgctgtctgcgattcaaaacgaatgtcgcctttgataactaactcagcatcaagaccgaatacaacaatgatatgcgcggaacctggatatagcgtaattgcaatagaatccacctggtctggaagcaaagtgttcaatacatgagtcacttgagcatgaattcgaagctcggctgcgttatcaagcttttcaaacatattattagcaataatttggctaaacactacttctacgattttagaataagtcggaaacatatttacctcacataattttcttcaagccaatcaataacatccaatgcattatcaaaagttgaaccatctactttgtcttctgtttcataatcaagaacatctaggcctaatcttccgttaacaataggccatagacaaaatagatatttcttttctttttcaattttatcacaaagacgataaatcttttctatgttattcataagttttccatggtaaaggcagtttagttttctttactgttagttcaatatcaggattcttttctcttaatttaaggcattcctcccaagctctgatttcactagtgaatacacaaaattgcccattactagtaccgactaaaccactatttacaataataatagcccaagtttcatgatgccacgccattaaaaatctcccgaagcaacttgccagcattcaacaccgatacgacgccacatctcaactacttgagttcggtcatcaatagctaatttcacatcaaaatgtggtgcgatgtgtttccagaaaatttcttctttaactacatcatctttacgggtatcaccttgttcgcgttgacactgcataactaatggaacgccagcaatatcctcaacccatttacgagtcatacgataatatttcgttgggtcttcttcggttccactttcacggcctgaaacgactacgatgtaatatccttgcttatcgtacatcttagctagttcaataaccataggattgacaacatcagtatcgcatttttcaaggtcataaggaccacgaccattcatttttgctaatgtgccatcaacatcaaaaataactgcttttggtttaccaggagtcccattatatactggaagaccgagatactctcgcatgcttttatacattgagcgtaaaacatcaattggtactgctttagttccgcgttttgagttacgtttaaccaattcagtccaaggaacatcaaacactttatgttcaactttccagccgtattctttggcaaaagtttcccatgctaggcgacgttcaggattcaagttagtatctgaaatgattacgcccttaacagaatcgccaccgtacagaatacttttagctgtatcaaactgcataccagttacgatgccttctttctttttggtatacttatactcgtcgcgttcttcatgcgccataatagattggcgatagtcatcacgattgatattataaaacccgggattcttagcaataaattcacgagcccaagtactcttaccagaaccaggacagccaatagtcaaaataatctttttcatcatttaattcctaagaaaacttcaagaatacgaatattatgctcacgccgtcctttgtataattcagctgttgattgattcactgatttactctgaacattggatgaaataaattttatcatgtgatttttaagctgatgcatatcaagcccacgggcttttgcttcttttcgtaatgctttaccagcatcatctaaagctttagcatgttcaatgtcttcgctaatgcttgatacattttcacggcatacgtcaatgtaacggtctgaacattcaatataacgttctagcagagttttcatttatttttcctcaaccaatgattgaatataatcatacaggtctttagatgctttaccccacttattttgatattcatttttgagattagcacgtgattgagctaataaaacatcattagttggaggtaaagattctaaccgctgaatctggcgtccataaatcattgcagccatctcggattcataaatcaatcctttgagatgttcaaattgatgccatgaaatcatttacatttatcctcttttaactcttgacgataatagcatatcatagttttctggtcatgtacatatcgttttacatcattaagccaaatacgaaattcctgagaatcttcaaatggcataccgacccaagctttaccatcgataactttaacttgccaagatagtttagcttcgtcatatgactttatttgtacaggccaattaggatgaactgtttctttctttacttctagaggctttgtagaacaaccaactagaagaccaatagataatattactgctgatagtttaatcatttagaaaggtcctggatgtcttctgcgaacttgttgaaggagttgttgatttgtttttcaaccaatcctggcttatgagccaccacatccgccttctttgcgtctttgcgcagtttttcattttcacgctcaatagcagcaattgcctcacgatttttattattcatcgcatcaatataattatactgaattcgcaaattatttaatgctaaggcgttttcattggccgtttttgtaatttcagtaaccgatgtttctaatctttctaccttattttttaaaataatagatgttccgccaaatactattacaagtaatagcaaacctgctgtcgtattacttaattgcataaagttttaataacctctataatatcgtcttgagaaagaccgttaattaaaatatgatgttcagcaggagatttagaaattttaaagcatgcctcaacatcttctgccatatccgatgcgctacgatttggattactaattccaagacgatgttttcccgttaaaggattaacgatgatatagcatttacagttgttaatatgaacattaggttgagtctgattaatgaacacatcacaatcatacttagcgagttgattttctaaaaagactttcatctcttcaaccgcatcaggaagcatatcacgggcttgctcaagacgacgatttcgatattctttaatggtcgttttccgcttgacttgcttagctaaatctttcttaagatcggtgatatatccaactcgacgatttcctttgaatacagaaatcccatctgtagtatcaccgtatgcttcaacgaccatttcagtagtaataagctgcaaatccatcataaagtcctcatgttatgtcagtaagactactataacacaacatgagggacttgtaaacagcttagtatccttctgggataaattttttataatttttcaaaaaattctgttcgatttcacacataaccttttcttgactatcgtacccctggtataggctcataatgataccgaacaggtgatccattccagcacctttagcaacaccttgcgcttccatcgcataagtctttctatccttaccacaatgcttattatgacagtcaagaactaaaaacagagctcggtctaagtacttcagataagtcgtttcaaatgcttcaatttttctgtatgaatattcatcgtcagcgtacattgctttaagatcatctgatgcaccatcaataatagtcttaaacaatttttctggattatctaatgaactttttgtgctatgaagagacacgtaccagtcagacttaattttaaaatgagaaccatctttcattacagcaacatagccttcgatgttttctgcatttttagcttcttctacccatttagggctatcaatttcgaatcgttcaactagatatggacgaagagcagcatctttataaatatcatcgtatgaaatgtattcacccgtttcgttttcacgaatattcaataaaatgattttcatctcttgataagcaagaacgattctattagttggagcgacgaattcgaagttagcagtaaatccatcttcggctaattctttaagtctgtcgcgcaacgggtgatgattaatattcatcaaaattccattagccattaaagcctgttcggatttgattgaaccctttgatttgaacagaatttcatcaccgtctaaataagttgataccaaagacccgtcttcttttgttagaatgtaatcaacatcatttaaatcgatattcatcgtgaatgggttttcattcaagttaaaaaacttttccataggacgagaggcgattcttactggtttttctccatccatttcaaacataattccacgacattctaatgcgtctggaagtaaccaatcagaataagatgcataattatatgagaaaattctgtaagttcttccagatgcacttacatcatccgagtaaaaaaacttacgctgtgaatccttacacagttccattaaattgttaaaaagttcttgcattgtgtatcctcttttgtgttttgaatatagtaccacactccatgtggaagcatcattttttcttatgttgaatattccaaggcgggttaaatagcttaatgaatagtggctcctctaggtcaatcgttgcgattgtcattgtacctaactcatttgtcatagaaagattaaaacattggcgggcgtaaaattcaactttgcttccttcctttagcgcagcatgaattaatgcagatttagtagaatcagacgttttgtctttacggttaatagcagttctataatagtttattcttttacgtaaatttttagtttttccaatataaacaagctcatcatttatagcaatagcataaattacgttatacttgtttggaatagataattgttttatacttccgttgtcgtctaattctagttcagtatatttaataaatgaatattctgttgcaatttctttcataataaaatgggccttgcggcccactccttaaaagtattttttaaaactcatcataactttatcatcaacatcattatcaatctgtgcaacaagataagatgacagttctacttcttgtggcgcggattgaacattatcagaattaagatattcacgaatccaaggatatggatgtttaaccggagcatcggtaattgggcatggaagaccacactgtttcatacgagatacagttaagtaatcaataaagctccacatgctatttgtatttaatccaggaacatcgccatctttaaataaatgaactgcccaatctttttcttggcggttaacttccatgaaaatataaactgcttcttgttcacactcttgagcaattttaacccattcatcgccatcagtaccagattgaagttgacgaataatatattgtgtacctttaagatgaagctgctcatcacgtgcaatgaacttcataatcttggcattaccttccatgatttccatgttcttatggaagttaaaggtacatgcaaaagatacataaaaacgaatagcttctaaggcattaataacgtgcaaacagaggtaaagagatttcattagctcacgcttccaatatgtctcatgctctatggcatctttaatatcatcttcgtctgcgttaatttctttttggtattcgatatcagctttagcgttttcccaataacgagttttagtcagaacatcatcataataacgtccaatggattcagcacgtttcataatagcttcatctaatacaatttcatcaaataccttcgatggatcagtataaagatttcgcatgatatgagtatatgaacggctgtgaatagtttcactaaaagtccatgtagcaacccatgtgtcaagacttgggtctgaaattaacgacataagtacagcagacggcgcacgaccctgaatgctatccaaaagtgattgatacttcaggttattagtaaaaatattttgctggtactgaggaagcttattaaattgtgcagcatccatcatcaagtttacttcttcaggacgccaaaaaaatgataaagatttctcaataagttcttcaaatactctatgtcgttgaatatcatatcgagctaaacccaatccagaaccaaaaaacatcggctcagtcaaaatattaacaggggatgtattaaaaactgtactcatttagaatccttaaatttacatttatcataatgccatcttaaagcattacctttattaactttcttgccacaatgcggacaaggcggatactctgtaccttgcttagttctcaaagaaatcaaatcacgggtttctttagtatgaggaacatctcttgtcggagagattgtaccatacatcggattaagcacgccgactttagcagcagctatattctttttagcttcttcggttttaggttttctcatgcgagctaaatgctctttggtaaatttccttcctttaagagctctacttatcttttctctagtttccatagaaacttcacgtcctgtagcagcttcagataaacgtcgtctacctaattcgtacagttgagaagaaattttatatgagcgatttttaccagtcaagcacattaaaccaaaagctttctttaatcctggggtgtcatatattttacataaaagccaatgagctataaaatgctctctacctgttaattcaactaaattttctttatcatcagaacctcccatacatctagggattatatgatgagtctctttatatcctaataaaggttcccgggtttgagcccgggaaattaaactattatatacgttttgataattcattacaatttacaggatgaacaatcttcagcttttggagtttctatttcataatcatcagtaccggaaccatcacgggtattatgataatagaaattttttccgccaaaataccaaaaatacaaaaggtcatcaatcattattgacattggaaccttgcctttagggaagatttgggggtcatagtatgtattcgccgaagctgattgacaaacccatttcagcataatagctacctgcgtaagataaggtttattacctttcttagctaatttccatgtatagtcgtaaaggtctatgttatgctcaatattgggcacgacctgattaaaggagccctcttttgattctttaacagagactggtccacgtggaggctcgataccgtttgtactgttagaaacttgggaagatgactcacatggcataagtgctgataatgtactattacggatgccaaagagcttaaggtcttcccgcagcgccgaccagtcacaaacgtattttggagctgcgatttggtcaatctttttattgtaccagtcgataggtaattcgcctcgagaccaacgagtgtctgaataatattcgcaaggtcctttttctttggcgagcttaatggatgctttaatgagtccatactgtaatctctcaaatagttcatgtgttaaatcgttagcatcttcataagaagcaaagttacttgccagccaagctgcatagttagtaacacctacaccaaggtttcgacgctttttagctttttctgcttcaggaactggatatccttggtaatccaaaagattatcaagagcacgaacttgaacttctgccaattcattaattttatcttggtcttgccaatcgaagttatccaacacaaatgcagagagagtacacaacccaatttcagcatcagggctattcacatcatttgttggaatagcaatttcacagcacaagttactttgacgaataggtgccttttcacgaataaacggagtatagttattcgtattatcaatgaactgtacataaatccttgctgttcctgaacgttcagtcatgagcaattcaaatagttcacgggctttaatacgctttttacgaatattagggtctttttctgctgcttcgtataattcacggaaacggtcttggtctttaaaataagaataataaagctcgccacccatttcatgcggactgaacaaagtaatgtaatcgttctttccaaatcgttccatcatcaaatcattcaactgaacaccataatccatatgacggatgcggttttcttctacgcctttgttatttttcaaaacgagaagattttcaacttccaaatgccaaataggataataagcagtagcagcgccgccacgaattccaccctgtgaacatgatttaactgcagtctgaaaatgtttccaaaaaggaataacaccggtatggcgtacttcacccatgccaatcttagaaccttcggcacgaatcataccaacattaataccaattccagcgcgtttagagatatattcaacaattgaagcggaagccttattgatagacttcaacgaatctcctgcctcaataacaacacatgaactgaactgtcgagtcggagtacgacaaccagccataataggagttggcagtgaaatctgtcgagtagatactgcttcataaaaacggataacatgttttaatctatcaacaggttcatcttgatgcagtgccattccaatagccataaatgcaaactgtggagtttcataaatttgaccagtggttttatctttaactagatatttttcttttaattgcatcgccccggaataagtaaattccatatcccgctcgtgcttaatttttgattctaaaaatgtaatttcttctgctgaatattttgacaataattcagggtcatatttaccttcatttacacagtaagaaatatggtcaataaatgaacgcggttcatactgcccataaacatgcttacgaagagcgaacattaaacaacgtgcagctacatattgataatcaggctcttcaaccgaaatagaattcgcagcagccttaatgacaatagtctgaatatcatcagttgtcattccatcacggagataagatttaatattttcatataattcataaggatcgactgatgttccttcagctgcccaagataaaactttaataattttttgtgggtcaaagctctgagaaacaccactacttttgataacattaattaattgcataagtcctcaacttgaaaatcgtctttaaacaatcggttaactatatgagctattatatcaccatgacacggctttggtttacatgtgcatcctagcctcattccacgtaaaggctctaaatgtgctttagttatttctccggatttaattcgacgtataaaatcttttttgaataattcaatggcagcctcccggctgccagcatctttaccgacgtaatttccccaaaatgtaccacggtgaatattaacatcaaagtcggatttgtatttattcactacccggcatagacggcccacgctggaataattcgtcatattgtttttccgttaatacagtaatatcatagtaacagtcggaagaagttttaactgtggaaattttattgtcaaaatactcacgagtcattttatgagtatagtattttttaccataaatggtaataggctgttctggtcctggaacttctaactcgcttgggttaggaagtgtaaaaagaacggcaccagaagtatccttaaatcgtaaaatcatatatcctctcaattaaattaaaattataccgccatctttcctttaattgacggatgagatacatagttgttaagaacaaaattatgcggctttgcgaattgactcaaccaaaatacctgcgattctgtgccccattcatcaaattcatctggaaattttaattgtaattcgcataaatccataggttcacgacgcaaaatttctttacattgttctacgtgattcatatagatatgagtattaccaccagaaaatatcaaatctcccggaataagattacacatcttagctacaatatgaactaacgtagcatatgatgcaatattaaatggaagaccgaggaaaacatctaccgaacgttgataccactgcaaatctaaatagccattacgcacattaaactgatagaacatatgacaaggcggtaatgccatatatttaagttcagctggattccacgcagaaacaatttgacgcctatcatttggcagttttttaatacgatcaacaacttctataatttggtctacaccgccaaaatcacgccactgttttccataaattggaccaagttcaccgctatggtatcctaaatcttttgcctgattttcgtaattttcatcccaaactgttttgccttggattaacgaatcgtgttgaattaatcgtaaatcattaacatttgtgcttcctgataaaaaccatattagctcagcaatgcatgcattccaggcgagcttcttagttgttactgcaggaaaacctttagttaaatcccatcgtaatttagtaccgaacagagcaattgttcctgtgcccgttcggtcatcggtttcatagccattttcaaaaatgtctttaattaaatcttggtattgtttcatttagtaccttatataaattataatacattttatgaagctgaataatcaatacggtttagcatcaaattttctctcaatttcaggcgtgaaatataattctttaccgcgtttggaaaagcgaccaataatatgataattattctcatcaaacgtgatattaccaatatccatagctttcaaccaaatatcgatatttctatccagctttatatcaaaattccaatacggagaactattaccgaaaataatgcaagcggattcagtgaaacagctactataaatcttgtctttaggaactactaattgatagacacctttaataaactgaggaccttgccattttggctgtttctcgtctttttctaacagaatagggtaataattaaaattcatatttccgccacgcgttatttcatttatatactgattccgtaagggttgttacttcatctattttataccaatgagtttcaaccatttcacgcttgcttatatcatcaagaaaacttgtgtctaattgaaccgttgaattaacacgatgccttttaacgatgcgagaaacaactacttcatctgcataaggtaatgcagcatataacaaagcaggcccgccaattacacttactttagaattctgatcaagcatagtctcgaatggtgcgttagggcttgacacttgaatttcgccgccagaaatgtaatctatatattgctcccaagtaatatagaaatgtgctaaatcgccgtctttagttacaggataatcacgcgcaaggtcacacactacaatatggctacgaccaggaagtaatgtagataatgactggaacgttttagcacccataatcataattgtaccttcggtacgagctttaaaattctggaggtcctttttaactcgtccccatggtaaaccatcacctaaaccaaatgctaattcgtcaaagccctcaaccgttttagttggagaataagcgaataccaatttaatcattttaattcctcaatataaaatatgtcagacggttcaatataattgctcaagcgctgaccatgataattataaatgcaaaagtaaaattggtttttaaatttatttcgcactaaagaaaccgtatagtaatcaccgtttgaggtttgaacgacaaacaaattatcataataaattagattttggtagatatcagcgatatctatgtcttccccaaccttaagcaaatttagtgttttcactatatttcctcaaacagactttttcacaattttccaatcagctttaaactgctcgacgtcagaatggtaaatccaaaatcctgcgctttctccgtcttcataaagaggacatccatcgcattcatcttcccatcccatgtcacgtaaaagatgttcagctttttcaacgagatcagaatctttaccgatgatattaaaataccatttacctctaacttctgaatctttgatgctctggcgttgtaatctcattttattctcctcagtagttgatagggtaatagtatcacactactaccctgttgtaaactactttttgaaagtttttcgcaaaagttcaatgatttcatctacattgttttcgtcaacaatgcagtgaatttttgttacgccagaaactataccttcattagcggattgaggcttttctaaagttacctcagtaaagtatttgaattcttcagagtaaatctcaaaatacgtctcaagtgggccacccgccatgtatttagtgccatcttccatagttacacgtaccacacattcaccagcacaatcatcactttccatttcatctacaacaaaactaggtccgtgcttctctattaaatttagcatcattacattgcaacggcactcgttagcaaagtcatttttaaataaagggttaatgatataagtttttccaacttccattttgatttcctcagtttaacggggctatcaaatagccccttgataattattgttcaatcagtcccatgtaaaattctgcgtcttcagaatccataccatcacaatactcattagccataaagcgggtgaggtcttcaagaggaccttcaataacgatttgaatactccaaaacttagaatcttgcacgcttgtgatactaagttcaggataacgattacgaataatttcttcgatatattcaaaatcaacgatgtcaatatcaactttagccatattattttcctctttaatcatcagcagtattgccgatagttgtatagtaccatggaaggacaaggatgtaaaccgttttgtgaaaaaatttttgaaataaaaaaggggaccctagaggtccccaattaattagtaatataatctattaaaggtcattcaaaaggtcatccaggtccgtgtcatcagcactagatgaactgccagagcttgagctcataaaatcatcttcagtttttgttttgaagtcatcaacattaaatgcatccaaatcatcagcaactttatcggctttcttagcagcagttgctgcggcaccacccatagcagcagttcccataacttgactgaacttagtgctcagttcttcaaacgatttgaatttatctttagaagtcatttcagaaaggtcaaccatttgttcgaacagttctttctggaaagattcatcatcaatgtttggaatcgcagattgattcaggaatttagattcgtcgtagttactaaaaccagaaacttgtttaactttcagtacaaagttagcaccttcccacggacaagttacatcaaccggagtttcacccatttcaacatcaactgcaatcattgcattgattttatcccagattttcttaccgaaacggtatttaaatactttaccttcattttctggagcagctgggtcttttacaacaagaatgttagcccagtaagaagttttacgtttaacaagaccgtattctttattgtcagtgttgtacaaatcatttttattgatgtactgacatactggacaagaatcgtaatcaccgtgggtagatgaacagttttcaatataccatttaccgtttttcttgaaaccgtgatttacaagaattgcgaatggtgcttgttcatcatttttagacggaagaaaacgaattactgcttgaccgttacccgcattgtcgagtttcagtttccactcgcctttatcttcagaagaaaaaccacctttatttccagccagtttagccatttgtgcagcgagttcagcagtagatttacgtttaaacatttttatttcctttttaatttaattaacagttggtgctatgacgatgtatgacctcatagctggtcagtgagataattataatctatttataataagcaattaatacttacaagatttcacagtttcaataaaaacacttttagctttctgtgaatcaatatttaaaatttttctataagcctttaactttatagaataattattccagactaaattatcagtctgttcatcatgtttatcgattatatttaaaaacgaatcaagcaagataaacgtctcaaacgaaattatattcgattgaagtagtttaaaaatataacttgattgaacttttggattatactcaaagatttctttaaaagcagaaacttcaacttttttactaaaatagtaaatattgcgaatatcttcttcaaacttaaatttaatttgctttaagcgtccgatatattcacgataaaacacaagtgcatcagcgtcagagatgtcaccaatccaagcatcttggttagcaaccagattgcttataaagattaaagcaagttcctttaatttatatttttctgataacttctggaaaaaatacttatcccttcgcttttgataagcggcatcagacacccgcatgcaccaattatacttaattacatcatactttccattcatatgttgttttatcattaagtataatttataaactgatttaccatcaatatatctttcaccaccagcaggcatgcggagtttaatcataatagaaaatctaatgtattagttttttcacaacgaacaacagaaggacgtaaaagattttcgtcaatagcttctgactgaattttttcaattatacccgaaggaataaatttagcaaattgagtttcaggaatagaattttcttctaagaatgctgttgtagcttcaagataactcattccaaactcttctaccattttttcaataataaatccattttcttggcggtcaagaagctttgcaatttcatccttttctttcttaattgaaagttctttttctgaaagaccggtctcatcgaccggacgaatatcatttagagaaaactgtgtcataaagttcaactacctcttcagtttcagcttcaaacacatcacggttatctttatgatacaaagctaacagacgattaaacatcttaccatcaacgccaagttcatctttggcacgaattcgaatatctttaatcagttcattataaccggaaattttcagtttatgatcagatgcttctttaataaatttagccaagtcttcgccatggatagcttcatcaaattcaaccatttcttttttagccattattcacctcaaaattcattaatgctattagttaatttagaaagacccgcttttacaaaatatgaataaattttgccacgaggtggtaatttatatgaattatagtaattcacaatgtttgaagcaatattatcaggaatataatcaaaatcaattagaactaaattttctttataacgattatattcagattctgtgagaagcaccttagcttgctcacggtcattagcaatagcttcaacgattgaagttttcattgaaggagttcgttcaccttcaactctggtaaaccaaaagtcagatcgtactttaactgaagcaacgttatcctttttgtcgcctttaaggattttagtcatacagtcaatttcagcagaaccgcttttaattttaacccatttcttgtgcatcggtgaccattgcttaacatttgggtatttgtgaagctgtgtaaagtcaccatccgacgaaatgattaaaatcttatgtccttctaaagagaactttttaacaagaacagcaatgtggtcatctgcttcatacttatcaatatccataacaatgtatggcatataagctttcaattcatctataactttatgactggattcaaaataaccttcccagtcccaagtagattcttctcgtgcttttccacggtttttcttataataataagcaaaatcacgacgccagtatccagatttcgcgttatcaatacacaatataattttagtgtatccaagagtttttgcttttttgacattaaacttaattgagttcaatatcaaatgacgaaccattgataaattaattttttctttatctggaaagtttaccaaagcagttgaaagcgcaatttgactaaagtcaattaagcagattccttctttgtaatcttcatccagcatcatttctaaatccatatgaacctcgttcaattagtgagatttctattatataccatccgaatcttaaagtaaacaagtataaatacttattattgaaaacacaataggagcccgggagaatggccgagattaaaagaaagttcagagcagaagatggtctggacgcaggtggcgataaaataatcaacgtagctttagctgatcgtgccgtaggaactgacggtgttaacgttgattacctaattcaagaaaacacagttcaacaatacgatccaactcgtggatatttaaaagattttgtaatcatttatgataaccgcttttgggctgctataaatgatattccaaaaccggcaggagcttttaatagtggacgctggagagcattacgtaccgatgctaactggattacagtctcatctggttcatatcaattaaaatccggtgaagctatttcggttaacactgcagctggtaatgatattacatttactttaccatctactccaattgacggtgatactatcgttctccaagacattggaggaaaacctggagttaaccaagttttaattgtagctccagtgcaaagtattgtaaacttcagaggcgagcaagtacgttcagtactaatgactcatccaaagtcacagttagttttaatttttagtaatcgtctgtggcaaatgtatgtagctgattatagcagagaagctgtagttgtaacaccagcgaatacttatcaagcgcaatccaacgattttatcgtacgtagatttacttctgctgcaccgataaatattaaacttccgagatttgctaatcatggcgatattattaatttcgttgatttagataaactgaatccactttatcatacaattgttactacatacgatgaaacgacttcagtgcaagaagttggaactcattccattgaaggccgtacatcgattgacggtttcttgatgtttgatgataatgagaaattgtggagattgtttgacggggatagtaaagcacgtttacgcattataacgactaattctaatattcgtccaaacgaagaagttatggtatttggtgcgaataacggaacaactcaaacaattgagcttcagcttcctactaatatctccgttggtgatactgttaaaatttccatgaattacatgagaaaaggacaaacagttaaaatcaaagctgccggtgaagataaaattgcttcttcagttcaattgctgcaattcccaaaacgttcagaatatccgcctgaaactaaatgggtaactgttcaagaattagtttttaacggtgaaactaattatgttccagttttacaacttgcttatatagaagattctgatggaaaatactgggttgtacaacaaaacgttccaaccgtagaaagagtagactctttgaatgattctactagagcaagattaggcgtaattgctttagctacacaagctcaagctaatgccgatttagaaaattctccacaaaaagaattagcaattactccagaaacattagctaaccgtactgctacagaaactcgtagaggtatcgcaagaatagcaacaactgctcaagtgaatcagaacaccacattctcttttgctgatgatattatcatcactcctaaaaagctgaatgaaagaactgctacagaaactcgcagaggtgttgctgaaattgctacgcaacaggaaactaatgcaggtactgatgatactacaatcatcactcctaaaaagcttcaagctcgtcagggttctgaatcattatctggtattgtaacctttgtatctaccgcaggagctactccagcttctagtcgtgaattaaatggtacaaacgtttataataaaaacactaataatttagttgtttcgcctaaagctctggatcagtataaagctactccaacacaacaaggtgcagtaattttagcagttgaaagcgaagtaattgctggacaaagccaagaaggatgggcaaatgcggttgtaacgccagaaacgttacataaaaagacatcaactgatggaagaattggtttaattgaaattgctacgcaaagtgaagttaatgcaggaactgattatactcgtgcagtcactcctaaaactttaaatgaccgtagagcaactgaaagtttaagtggtatagctgaaattgctacacaagttgaattcgacgcaggcgtcgacgatactcgtatctctacaccattaaaaattaaaactagatttaatagtactgatcgtacttctgttgttgctctatctggattagttgaatcaggaactctctgggaccattatacccttaatattcttgaagcaaatgagacacagcgtggtacacttcgtgtagctacacaagttgaagctgctgcaggaacattagataatgttttaataactcctaaaaagcttttaggtactaaatctaccgaatcgcaagaaggcgttattaaagttgcaactcagtctgaaactgtgactggaacgtcagcaaatactgctgtatctccaaaaaatttaaaatggattgtgcagagtgaacctacttgggcagcaactactgcgataagaggctttgttaaaacttcatctggttcaattacattcgttggtaatgatacagttggttcaacacagtcgttagaattatacgagaaaaatagctatgcagtatcaccatacgaattaaaccgtgtactcgctaactatttgccattaaaagcaaaggctgctgacgcaaatttattagatggtctagattcatctcaattcattcgtagggatattgcacagacggttaatggttcactaaccttaacccaacaaacgaatctgagtgcccctcttgtatcatctagtactgctacgtttggcggatcagtttcggcaaacagcacattaactatttctaatactggaactgcaactcgtctgatttttgagaaaggacctcaaactggaactaacccagcacagacgatgactattagagtttggggaaatcagtttggcggcggttcagatacaacacgttctactgtatttgaagttggtgatgaaacatctaatcacttttattctcaacgtaataaagctggtaatattacgtttagcattaatggtactgtgatgccaataaatgttaacgcttccggttcattgaatgcgaatggcgtagcaacatttggtagttcagttactgctaatggtgaattcatcagcaagtctgcaaatgctttcagagcaataaacggtgattatggattctttattcgcaacgatgctgctaacacctatttcatgcttactgcatcgggtgatcagactggcggatttaatggattacgtcctttagctattaacaatcagtccggtcaagtaacgattggtgaaagcttaatcattgccaaaggtgctactataaattcaggtggtttaactgttaactcgagaattcgttctcagggtactaaaaccgctgatttatacacccgtgcaccgacatctgatactgtaggattctggtcaatcgatattaatgattcagctacttataaccaattcccgggttattttaaaatggttgaaaaaactaatgaagtgactggacttccatacttagaacgtggcgaagaagttaaatctcctggtacattgactcagtttggtaacacacttgattcgctttaccaagattggattacttatccaacgactccagaagcacgtaccactcgctggacacgtacatggcagaaaaccaaaaattcttggtcgagttttgttcaggtatttgatggaggtaaccctcctcagccgtctgatatcggtgctttgccatctgataatgctacaatggggaatcttactattcgtgatttcttacgaattggtaatgttcgcattattcctgacccaatgaataaatctgttaaatttgaatggattgaataagaggtattatggaaaaatttatggcagagtttggacaaggatatgtccaaacgccatttttatcggaaagtaattcagtaagatacaaaataagtatagcgggttcttgcccgctttctactgcaggaccatacgttaaatttcaagataatcctgttggaagtcaaacatttagcgcaggtcttcatctaagagtttttgacccttccaccggagcattagttgatagtaagtcatatgctttttctacttcaaatgatactacatcagctgcttttgttagtttcatgaattctttggcgaataatagacttgttgctatattaactagcggaaaggttaattttcctcctgaagtagtatcttggttaagaaccgcaggaacgtctgcttttccatctgattctttattgtcaagatttgacgtatcatatgctgccttttatacttcttctaaaagagctattgcattagaacatgttaaactaagtaatagaaaaagcacagatgattatcaaactattttagatgttgtatttgacagtttagaggacgttggagccacaggatttcctaaaagaacatacgaaagcgttgagcaatttatgtcggcggttggaggaactaataacgaaattgcacgtctaccaacttcagctgccataagtaaattatctgactataatttaattcctggcgatgttctttatctcaaagcacagttatatgctgatgccgatttacttgcgcttggaactacaaatatatctatccgtttttataacgcatcgaatggatatatttcctcgacacaagctgagtttaccgggcaagctggttcttgggaattaaaagaagattatgtggttgttccagaaaacgctgtcggatttacgatatatgcacagagaactgcgcaagctggtcaaggtggcatgagaaatttaagcttttctgaagtgtcaagaaatggaggtatttcgaaacctgctgaatttggcgtcaatggcattcgtgttaattatatctgtgaatctgcttcacctccggatataatggtacttcctacgcaagcatcgtctaaaactggtaaagtgtttgggcaagaatttagagaagtttaaattgagggagccttcgggttccctttttctttataaatactattaaaataaaggggcatacaatggctgatttaaaagtaggttcaacaactggaggctctgtcatttggcatcaaggaaattttccattgaatccagccggtgacgatgtactctataaatcatttaaaatatattcagaatacaataaaccacaagctgttgataacgatttcgtttctaaagctaatggtggtacttatgcatcaaaggtaacatttaatgctggtgttcaagttccgtatgctgtaaacaacacaaacccatgcggtgtttatccaggtaacggtgataatgctacttttgctgtagcaaatatcgatattgtttcgtggaatggtattggttttaaatcatcacaaggttcagcagctcgaactgttgtaattaatgcacgtaatggtgatattagtacaaaaggcgttgtgtcggcagcaggtcaagtaagaagtgatgcggctgctcctatagcagcgaatgaccttactagaaaggactatgttgatggagcaataaatactgttacggcaaatgcaaactctagggtgctacggtctggtgacaccatgataggtaatttaacagcgccaaactttttctcgcagaatcctgcatctcaaccttcacacgttccacgatttgaccaaatcgtaattaaggattctgttcaagatttcggctattattaagaggacttatggctactttaaaacaaatacaatttaaaagaagcaaaaccgcaggtgcacgtcctgctgcttcagtattagccgaaggtgaattggctataaacttaaaagatagaacaatttttactaaagatgattcaggaaatatcattgatttaagcatttccgctggcggtaatatcagtggaaatgtaactattgatggaactttacgcgtcaatggaccaataaacaattttggaaatttttccacaagtggccagattaccgctggtagtagtatttcagctcaagtttttagagcattgcaaggttcgttttatacaagagcatcaaatgatgcctcaaatgcccatttatggtttgaaaatgccgatggcactgaacgaggcgttatatatgctcgtcctcaaactacaactgacggtgaaatacgccttagggttagacaaggaacaggaagcaccattaatagcgaattctatttccgttctataaacggcggtgaatttcaagccaatcgtattttagcatcagattcattagtaacaaaacgcattgcagctgatacagttattcacggtggcaaagcctttggtgtatatgatacggattcattagttaactacgtatacccaggcaccggtgaaactaacggagtaaactatcttcgtaaagttcgcgctaaatcaggcggtaccatatggcatgagctttgtactgctcaatcaggccaagctgatgaaatgtcttggtggaccggttctactcctatttcaaaacaatttggtattcgtaatgacggtcggatgattgtccgcaatagtcttgcattaggcactatgactactgattttccatcgagcgattatggtaatggtggcgcattaggattcggtgcttatttggctctaggtgataacgggactggtttacgctatcaaaaaaccggtgtttatgatttagttggttccggattgtctgttgcatctattactcctgacagtttccgtagtactcgtaaagcattatttggacgttcagaagaccaaggcaccacatggattatgcctggaacgaacgctgcatttttatcagttcaaacacaggctgatgaaaacgctgctggagacggccagacgcatattggctataactcaggcggaaaaatgaaccactatttccgtggtaaaggcaaaactaatattaatactcaggaaggtatggaagttaatccgggtattttgaaattggtaactggctctaataatgtaatgttttatgctgatggcggtattacatctgttaagcagctttcaatatataatggcatatatttagcagctaataattctactgctgggctaacattcgctccaactactacaattgatggtactaagcaaattttgtgggaaggcggtactcgtgctgggcagaataaaagctatgtaactgttaaagcgtggggtaattcatttaacgcatctggcgatcgttcccgtgaaacagtttttgaggtaggtgatgggcaaggttaccatttttattctcaacgtgtagctcctgcgcctggttcgactgtcgggcctattcaactccgagttaatggtggtttattaacttcaggtagtattgttgcttctggttctattacaaccgaatcttctttgagtgttaataatggcatgtcagtaaacggacaagctaaattcggtggaactgctgatgcattaagaatttggaatgccgaatacggtgctattttccgtcgctcagaaacagcattacatattatcccgactcctaaagatgccggtgaaagtggtggaataagtaatctccgcccacttagtattagtcttaataatggtatggtacaaatgcgccattctgttacgttaggcgatgatggcgctggcggtaatatgattactgtggacaacgataccaaacttgttgttgttactagtaatagtcgcatttctcctaattaccgtatgcaggtaggacaagcagcttatattgatgctgaatgtactgacacagttcgcccggctggtgcagggtcttttgcttcacaaaataatgaaaacgttcgtgctccattctatatgaatattaatcgcacagatacaagtacttacgttcctattttgaaacagcgatatgtccaaggaaacagttgttattctctgggaactctaattaacggcggtaacttcagagttcattatcatgaaggcggcgatggcggttcgactggcgctattataaaggatttaggttgggaatttaccaaaaatggtgattttatatctcctaagcgtgtttctgctgggggttcagtttatttaggtacagacggcaatattacaggtggttctggcaattttgctaatttaaacagtacaattgaatcacttaaaaccgatattgtatcgagttacccaatcggtgctcctattccatggccaacggatactcctcctgacggttacgctattatggaaggccagacttttgataagtctgcatacccaaaattggctatggcttacccatctggcgtaattccagatatgcgcgggcaaactattaaaggtaaaccaagtggtcgagctgtattaagcgcagaagccgatggtgttaaggctcatagccatagtgcatcggcttcaagtactgacttgggtactaaaactacgtcgagttttgattatggtactaagacgacaagtagctttgactatggcactaagactagcaataccacaggtaaccactctcatactgtaagcggtactacgagttctgctggtgcacaccaacatgcgcgctcaggtcctcagttacaagccggcatacccaataacatattctatgacggatataatagtgtaggtgcaaacgccaacgctaaaatcaccggatctgtgagcggtgctactgcagggtcgaatatagccaaaacttcttcagacggtgctcatacccatacttggtctggtactacaagcactacaggtaaccatgctcacacagtaggtattggtgctcatacccatactgtaggtatcggtgctcatacccacacggtagcaattggctcgcatggtcatactatcactgtaaatagtacaggtaatacagaaaacacggttaaaaacatcgcttttaactatatcgttcgtttagcataaggagaggggcttcggccccttctgaatatgaaaatatatcattattattttgacactaaagaattttacaaagaagaaaattacaaaccggttaaaggactcggtcttcctgctcattcaacaattaaaaaacctttagaacctaaagaaggatacgcagttgtatttgatgaacgtactcaagattggatttatgaagaagaccatcgcggcaaacgagcatggacttttaataaagaagaaatttttataagtgacattggaagcccggttggtataacctttgatgagcccggcgaatttgatatatggactgatgacggttggaaagaagacgaaacatataaacgcgttttaattcgcaatagaaaaattgaagaattatacaaagaattccaagttttaaataatatgattgaagcttctgtcgcgaataaaaaggaaaaattctattataaaaaccttaagcggttctttgctcttttagaaaagcatgagcatttaggtggtgaattcccttcatggcctgaaaaagaacggaaaccttggtataagcgtttattcaagcattacgtataaatatcttaaaaggagggtctatggcagcacctagaatatcattttcgccctctgatattctgtttggtgttctagatcgcttgttcaaagataacgctaccgggaaagttcttgcttcccgggtagctgtcgtaattcttttatttatgatggcgattgtttggtataggggagatagtttctttgagtactataagcaatcaaagtatgaaacatacagtgaaattattgaaaaggaaagaaatgcacgctttgaatctgtcgccctggaacaactccagatagttcatatatcatctgaggcagactttagtgcggtgtattctttccgccctaaaaacttaaactattttgttgatattatagcatacgaaggaagattaccttcaacaataactgaaaaatcacttggaggatatcctgttgataaaactatggatgaatatatagttcatttaaatggacgtcattattattctgactcaaaatttgcttttttaccaactaaaaagcctactcccgaaataaactacatgtacagttgtccatattttaatttggataatatctatgctggaacgataaccatgtactggtatagaaatgatcatataagtaatgaccgccttgaatcaatatgcgctcaggcggccagaatattaggaagggctaaataattatttgttcgtatacatctctagatatcgatatacaccctcaaaaccctcgttgaattcgtcgatgagggttttcttatcttcttgagttaattcagaaacaattttacggaatgaattctgatttaattttctaccttcatgcgttactccaatctcattcagaaatgcaataaaattagcacgattctcaacaatatcttctctggaaaatttaatcaaaatagacgcaacggtaataatttcacgaactgtatcaatgtttttattcattaactataccactcaattagttgactttgttataatatcatcagacgcttgatttgtaaactggtctgtgttattttcttcaaaaattttttctacgaattccttgaacgacttacgttcctgagctacattatgctcgattactttttcaagattatgactcattcgaaataatcttcaatttcataatcatggacgtaaatcattatagtttttaatacatcatcaatactttttcctggagctggaattacgtagaaatatcctgcttttgagaggtctttataagttccaatcaagaaatcattattctcaagatgtagttcttcaactaattcattaacaattgaatggtataggtttggtagaaacttatatagcttttctagaatatcaattttgattgtgtattgaaccacagactgagaatcaataatcatagaccttccccttatgtttctgtttgcgattagattctttaaacgctttcttcttatccttatgaacagaagctttattaaaattatgttttgcgactaaattgttcatagtgctgaattacctctctcaaacatttgcatgtgaatgaaaacttttagctacaccacattcaaatatatgttctcttaaatcacgtgtatcggtatatcccatctcaacgataaaatgccgtattagatttttatctttatcattgagagaattaaaataatcggattttgaattaatttccctggccaaattgaatcaccttcagttgacgttttaattcttttatcatctcttcgttcatcgcaatataaagatcgcgtaaagcaggttttaacattccatttactggagaactaaatggacatacataatcttttcctacgagctttttagtgaattcaatattacagaactgaaatgccggctcattggtataaattccccaattagttgacatcattttattggcatattccagtgcctggatttgattcataattccatcaatttgaaactgtttaatattcattagtaaaggtcctcagaataaagttctttttcactaccaccacgttcaatacgtacttgtccagcgtaagttgcaataatcattgcttcttcacgtgtccaataattactatattggtcaataaacccttggtcatcatcacaaacttgttgagtaactaattgaggtttaactacatctaaaacttctgccatatctttagaataatgacgagcacctggaataataagagttcgtccatcttttaatttaaaacgattagctgcacagacaattcgtcgttgatacttttggttttcatcccagtacgcagtctgccaacagatttcaggaacttctttcagaatatcttcttctgtgcatttataaccatgcgctttaaatttttcaacaagactttctggagtctcacgagataaaggcacattcagcatttttaaacgattaataaatgggttcatttaaaccatcctttaatacgctgccacaaagttttctgttgagctctgttaacaccaattgaacgaataactggttgagattcctggaattctttataatcggcaaggtaaatttcgtaagctgcatccgtaaatgaacttatcgctgccataaaattattgcgaatacctactggagcatctttactttcacgaataatcatgtatttaccagtcttaatctttacgatagttccaagataagctccgtggtaccaaatatcccaaccctcttgagtaggttctgcgcaacgacgaagttcattaacaatttctaacttgttcattatttattcctcacagttcagatgctacagtgattactgcttcaatgttttctactgagcgtttaatgtcaagatacacattaccgtttttagcgattttacatgacattccgatgtcagtaaatttctgaatatgatgttccatcattttgtatccaaaaattcgcatatttccgttgttattaatttcaaaattgcgaattccgtgagtgcgtttttctaaaatagcaagatagttactgcggtaagtttcaacctttttaagaacaaatccattttcatctaaaagatttaacatgaagtctttatcttcttccatatcggaagtaatctcacgagctttacgagtcgctcgttttttcagtagttcaggagcattttcctgtgcatataaagttgccgcatttgaaataatatcctgagcttcaccagtaatgattaatccatcaccagatttctccaccaggccttttttaatcaataccccaatattactattaactactgcgttacctaaatctggatgcacctcacgaacttctgcagctgtaatgaaatctttcttagcaatggtaattaaaatcgcagcagttttttcattcagaacatcgttagaagctttgatgatgtaagttactttagacattttctaatctccgtaattctgtatcagtagttgatagttgtatagtaccacagtatgctttggttgtaaaccgttttgtgaaaaatttttaaaataaaaaagggagagcctcggctctccctaaaattactgcatgactgtgataactgtcatgataacacgttgaattccgaacgcaagaagacctcctgctacggctgggacaacgcctaaacccgccagtaaaatgctaccagatactaatgcagcgcttgtgataccaatgaatggactcatttgatttcctctaaatctttggtgtattcggtaactacatcagtagttttccaatattcgttttcttcttttttagctttagcttcttcagcaagtttctttgcttcgtcggaagtcatatgaaaaatattcattccaactagtttatcaacataagaagaatacatatcgattttcgaaagttcttcggtcagttctttacgagttttaccctgtacaacaatttcacctgaaattactttcttaatgaaatgtgccttggcaaaggctaaacgaaaagctgattcagtttctttaattttgttatcaattcgtttttggacataagttttacgaacttcaacaaagtctttaattaaatcgactacgttatcataaacttgcagctttcctttctcattaatgacggtaatattctgagaacgacgctcaatcaacccgaagtctttcataatttttgcatggcgttcttcttcattatcgctcaaagaatattctttacggaatttaactttgaatccaaaaccatgctcaccgcaagcatcatcccatgtaatgaagcctttatcttcaagtgggtctaagattttactcacataagtttcacgatcatacttatacggaatctcagtgatatgcatttgagttcgtgaagtaaacttatatgttccacgaatttcatattgaccgtcaatctcaacgacttcaccacgaaattctgggaattctaccttcggtttagttactttctttccttgaagagcttgtagtacagctttcttgacagaagaaacactatgaggaagaatgtaagttgcataaccagttgcaataccggaaacaccattaagaagaacagtaggaataataggcaaatagaaagcaggcggaatgtgttctttatcttgatgtaccggagcatattcagtatctttatatacgttatagaaatttttacttacacgagcaaaaatataacgacttgctgctgctttttgaacggtacgagaaccgaaatttccttgaccatctaacagaggaaagttattattccaagtgttagccatcaaagcacctgcgtcttgcgcagagttttcaccatgatgatatccaaggtctgctacaccacctgcaatagaagcaagtttgtgaaacttatctttatttcctcgcgccaaatcaagagctcgagcaataacaaatcgttgaactggcttaaatccatcaatcatatttgggatagcacgattttcaaccgtgtacatagcataagccaatgcttcattatcaatgatactttttaaatcgcgattattcagttgcataaatttaccatactagtgaatgtagtgccataataacatcagaaatgaaaagcacgacttgaattaatccgaacattactccgtaatatagtgctaccaataaagtagcaagggctaatgaatagcccaagattttcttaatcattagtagataacaacacaaatgttaaatatgcacacataccctgggctaaagcttgtgaaaacacactgctagcatcgatacagatagttaaaacacatgctactatccaacaaataaatgaaataactcctaataattttgcgatattcatattttcctcactggcgtccgaagacgcctttggttttaagattgttacgatagaactgcatcacatgttcattatggaaattactcattaatatgcctgcaaaacaaatttaaagttatcagccaacatacggttcatttcttcaagtgtttgatactcagaatgatgattacgagtaaatgccaaagctaactgacctttaccaaatcctgtcgtcagaggtttcatcttagaagcaggcagataaaatactgtgtatggaacattgttatttgcaatagtacgtgcaagctgagaccgacgttgacgaatatgacttagaactgcactgaatccttgcttagaacgctgattacctacataaaatcgtgcggacacgcatggattactaaatggacgaccatctaatttactcactaaaaagtaaaatccaggtttagataaaatgtctttatgtggagttcccaaaaaccactcaccgcccttgattgtaccaataacagtagcgcctgcattattcagatcagtaacagtcatatatttcatattaatttcctctaaattattttctactccaaggccgcatgaatacatacggccattaaattaatcgtcgcagtcgacgctcaattcccagaattcttctacagtataagtttcagtatcattttcaatacagaaacgttcattactgttatttgctaaagtagcattaactgtcggtttctcgctagtgctcttaagaggtgaaatacgaattaactgatcaccgttatctaaacagaaaatttcaccaacttttacatctttaaaacttttcataattcacctcaaggagtataaaatccaaacgcagttgttgaccatcccatccaatatgggaaatttgcaccaatgtaaaacataagaatataaaaccaaatgtttaataaattcatcattttacaccattccaaattgtttcaactacggattttaaaccattttgatgaatatccattccgactaccgccatcaaatagattccaactacaactgaacctaaggcaaaaatcagcatgaaaatgaataaagccggaaaaatattatcgaaaaaccattcaataaatgtaaaagcactgcgtttacgcttcatattttcctcacataaatccaaagtaaacgtttaatacatcaatcattaaaacgattgggaatatactcaaaactactagtattataactacattccatatagctttaacaatctttttcattttgtgttcctccgtagttgatagttgtatagtaccgcagaggaacagtcttgtaaacaacttttttaaaaatattcgtaataaatgtgaataccaatcaccactgccgaaacctgtgcaacccaccacgcacaagcaataagtacagaattcaaaattttcataataacctcatcacaaaagtaaatgttaaacaaattactggaatactaattaaccaaacaaaacaccaccacaatgaactcatagttcaatctcagcgattttcatttcattactattaatagccgctttaagactatctgaaagaattacacaccagtggtcattcatatgaccattaactaagcgtgtaatttcttcgggagttgaaaaataaggcgtatcagactcccaatgcgataatcccaagcgagtataaatcataccttcatcatcgctagaatattcaactgacacaaactcatcagttattttatgtttagcgtaataaaatttaaatttcatttttactcctccgtagctgatagttgtatagtaccacagtccttgtggtatgtaaaccgttttgtgaaaatttttttaaatggaaagataccatccgttgtagttgctttttcttacaaccttacgaaggtcttctctatcaccgatgaacttcggagtgtactggatgacacctggatgaatttctttagtgttgaatataattatacagtcagcgacctgatgattcagaataggccctagatttattccagaaccgtatggatactctccgctgcatcctgttgttacagaaatccaacgtgagtcagtttgatgtgtcttaacttctacacgaagcccgcagtatcttggatgcgccaatacatcccatgcgtatgtatacgggtcattaacatcctcttggcctttgttaacatacccgcttagccaatctgctacaaaaaactctgcgtacaccgcgatacgacatctttcgataacttctgctttatcctggttcgggttttgttttaaagagtatcttgctgtatcagcaattttgaccttcatttcactagtcaagtcactgttcgatagggtaaatgtcggaatctgaaatagtctctgtaaacccggattcgttttctgcatttagactttcctttttaccgctgagataagcgttatatactttaagagtgccgtaataaattcggtcattttcatctaaagactcacgatcaagttcatcgagttcctttttatccatgactataatatcattgcagtaaagaaacccaagtttttcgtgaccaaactcaaatttattgcagtacacaatattagcgtgatggtttccgtgcagtttaatctcttttatgtcggaatcaccgatattcatacaataaatcataatttttccttaaaacaaaagggccgaagccccttattttatttgaattgtgcaattcttttctctagacattcagcataagatttcattgagatgaactgtgaaagtagcagttcttgctcaactgcactaactgttagaaactttgcgctttctaaaaatttactcagtgcattaattttgagcattaattgatcgtattcttcttttactcgtgcttgataacctaacataaatttcctttagtcaagggccgaagcccttatttaaattgctcagtaacgtcttcaactacttcgtattggcaagtacgcattttagcatcgttgtaatcaatcggaattgatactacatcacgtggatgtactttaacttttacaactcggctagttgaactaccaaagtgacgaatataagatttagaacacacatgcagaccacgagaacaagtttgtgtatcatcgtcattcacacgagtacgtggcattttaactactttaccaggactgttatcaaaggtgtttgagtgacagtcaaagtaattgctgcgaactactttccaagcatagaagtaaccatcttctgtaatttcaatatcgtttgctaccaagaaatcaaagagtcgagataccgctttttggcttgggttttccagcagattttccaagaacgggaaataaaattcaaagttttcgcctttttccatcgagtcaagaatacgatcaaccaaaccagaccgcaattcgatattttgatagaacaagcttccaccttcaattcgaacatcgccggaaatatatttttcaacagcacggcgaacattaattttttgtgcagcttcttccagcctatccgctacaagcagattaagaatttcctggaagtttgaatgagtattaggagttgcgttataagttacaccgtcaacagtaattgaaatgaattttttagatgcattccaaataatgtcagatttagcaactggagcaataactgcatcgctattaactttaactgtaatatcaccgctaatagtaactttagagcgtttagcttcttcagcatttttcaaaacacgacggattgtgtcaaccgatacatccttccaataagctaattcctgttgggtataattaccacttgaatacagtttaacaatttcagcttgttcgtttttggtcaggcatttaatattgtacataattttccttattaggccgcaagggccttcatagttttagcgatttgggaaacttcatcatcacttaaagagttgcgataaccgatgaagtcggaaacaatacggaatttcttggtaaactcagcaaccattttatcactattttttgaagcattacgtgataattcatcaaaaagattagttaccgtccagatgtcatgaccgatggtatcttttccaccattaaaatatacaccgcgcaatgaactaactatattagcgagtcgtgtatattcttcagaaacttcatctgtactgaagtacttcatcataaaatctagttcaggatgcttgataattttatcaatatattgttgagctgaacttgaataacctacatacttatcataatctacatcatcaaaagcatctacatataaatcacgcaaagcttcaaaaatacattggcactgaccgagctcttttacctttttctgcaaaagcggacgaataacataaaattcattaatgccaataagattagccatacgaatcaaaatattcatagatggatgacaaagagatgtagtaccatccatagagaaaatatcagaacgatgcatatacgctacatacccagtaatttcatctgcttctgatgtgagcgtaaataattcctctttttcccagcgcccgtctttaatttcaaacttaaatgcagtagcagctttaggacgaggagctttacttttaactgccttcggaatataacttttaactaaagcttcaatttctgacaaataatgaatgttaacttcatcactttcaaacattgccataatatcagggagtaaatcaatctgcgattctacttccggattaataaacagaagacgctcgttgtgatgaatatttaaagtgttattaaattctttatcatctaacgcatgcgctaatccacggacaatattaacacgatttttaatattatcaataacgatattaatttttgttgtattaataccgaacagacgataacttgatgcaatggctgaagtttcatgactttgcttaatgcgcttcagtcgagggtcaagatttacttcatacacaactcctgcattacatagtttactatcaggttcaaacatgctttgcatcttcttatatgacagatttttagtcgtaaatttgactgaattactaatcatataatctcgagcagaatatcccatcttcatcaattcgcggtatgtatgacgaggagatgtagattctttaaatcgttttacatcttcattgaatgccttctcactaagctctttaacacgctcaataatatttttacgggtacgatcatctagtgaaagagcttcgcgtgatggagcaatatcaagtgaacccattggaaacttaatgtaattcacttcattgcggatgcttaaccagttacggtctctaataacaccatcaataggataaacaataccaccatagatagcatacaatccaccacgatctggccaatatctttctggatttacgccgtaatagtcatcaaaatccggaaaataatcaatttcgcggtcaagaccattaatgatagccaaatctttgaatggtcgcatgatataagaaacttcataagcaaagtttctaaagtctttttcttcaactggaactacaatttcaataccagttttatcgtctggacccatttcttttacgaatgtaggtttaatttgcggaccatcaccatccatgtaagctacataaccacgaatttcgcctttatgatatgaagtaatactaaacgtatcagtatagctaaacggagatttagaacctaaaccaaatccgccaatgaaatcgttagattcagccttagatgaactaaagtatgaattatacaacccaggagaattatcatcaccttgaatatcaaaatcgctcatacccggaccaaaatctcggcaaacaaatcgcggatctaatcgtcctggaacttgaatgataaatttttcaggatttccattgagagcatgggcatcaatcatgttggtaatcaattcacggactactgcgcgaatcttgtttgtatacaaatcagatgacagaattttaaatactttaggagatgctgtgatgctaaatgcttttgatttagaaccattaccaagaattgtttctttttcagtggtgataatcataatttcctcattaattcatattacgcttaataacttcagcaacttctaatagttcatctttagttgcactgtcggattgaattttatctctaatatctttaaagcggtttttaaattcttcggcttctcccatatcgaaaaagcgttgaatgattctatattctcgatgaactgctttatcaaaaagttctaaatttactttatatgatttcatttcaatatcctcatttgcccaattaattataccacatccttgtggtaaagtaaactactggctcatccattctttacgaagatcagcattatctcccatgagcatttcaaaaagctctttccagttctcaggaagtttaacaacatcatatactgggttttgaatcatctcacgatattcagatttttccaaagagccaagtcccttaatataacggatgctatgtttaggtagagcatctttagcactctcatattcagcgactgtataaaaccattcttgttttttaccgacctgagcgatgattacaggagttttgacaaagcgaattcttccttgctcaaacaattctggccaattactaaaaaatccgagcagagaaggataaatgcttcctagaccatcatggtcagcatcagtcataatagcgatattatgataattcaagttttcagctttttcaccgagaactaatccagtgattgcgcaaatatcaaatagttctttgtttttaagcatatctgcataagacataccccaactgttgagaactttaccacgtaatggataaccaccatgaagttctttatcacgaacatcaatgagatatccaatagccgaatcaccttcagtcaagaaaagagtagtatcagcatctttaccacaaagattcgctttaatatgtttatgaaccttagctttagaggcctttttagctgctttagtttctgctgctttttctgccgccaatttacgagccaaagcagcttcaataattggcattaaaattgcttcattgtttaaaatagcgcgtgaaatctttttagcatcaagctgaatatgactacgaatttcaccaaatggagaagtcaaacgctctttagtctgagaatcaaatcgcatgtttttcatatcacgaacaaacatgacgatagtcaaacattctttaacacgtgctttagttacatcaattttgaacttgcgtttgatttgtggaataaggtcttcacaaatatcatccataacacagtcaatatgatggccaccattcttagtatgaatgttattgacgtatgttaattgacgaaaaccatccggtgaacgaccaaccgcaatagaacaattttcttgttcttgaacgatagcatgctcatcatattggcgtgcatatttcttaaaattaccttgaacctttttaccattaaatgtaaattgaatatcaggataaactactgcaagtgtctggagacgatccaatgtaatgtcaagataaacttgagatagctcattagtttcaaatgacataaaatcaggaatgaaagtaacacgagttcctttccattttccaggaatagtttcccatgatttattttccatgccatttgaacaacgaactacaatattattttgaccgtcgccagtttcaccgacaaacatcacagaaaaaatgttagttaaactagaaccaacaccgttcataccgccagtgacgcgttctttatcatcaccgaaattaccacctgcttttggaatagtccaggcggcaacaggaccaggaatttcttcaccagtaggtgttttaaccatcgcttgtggaataccacgaccgttatcttcaacagttacttgattgtttttgatagtaacattaattttattcgcgaatttaaacttagtacgaataccttcatctactgagttatcgataatttcatcaataagcttaacaagaccaggtacatactgaacactttcccatttaccaaacagaaagcgctcatgcatttcattagcagaagaaccaatgtacatgccgctacgctttttgatatgttcaatatcgctcagaattttaatttcattcttaatcatcacttatcctcgtttggtttcgggaatattatactccggtaatcataaagctaaaggcccgaaggccttttatttaaaacggatagtcgaatccttgaagaatagaccagaacatacggttccttctactttctgcccggtaggtccaatagcacgaaatccagtatgttggaaatcattttcagagcaaccgaaccagttatatccagtgatttcaatattagtaaaaccacttgaagacaaaactttggttgcattatcagcatcagtacatcctgctaaagacactgctaatactaatgctgcgatagaacgattaatatatttcataatttcactcaaatttaatggcttgaagaagactaataattctcaagcgacttctttcatctttaaccgtaaatgaaagagggtcaccagatttcatagtgatagtgcattcaaaatcaaaatcttcgggaacttcttcgaagaagtcaaattcttcatcatatattagaacattactctgaaaactgtgaagaatttttccatcatttccagatgctgtactaatcattgtaacgttattacctttcatatcttcaacgataaattcgcttgtagatattacggcattaatagaaccattcctataaatagcagaaaatagatatttcttttcttcaccttcgcgaatgcgatatttcttaccaattttaaacataattaccctttaagtaagtcgtaaaaaccaccattcacatgcttaggagcggaaactaaccgaatagcaatccgatgacaatcaggacatacatcagtatccctttcagaaattttcttgattttttcgtattcttttgcacagtctttagattgacatttataatcataaagcggcataattattccttaaagtgagctttcaacatctgatacaaagaccacgcctgttcattattttcaatagtaactttcatgactgggaattctgtgaaatcttctatttgttcttgctcttcctgctcttgttcttcagcagcctgatatggattttccacttcatcaaagaactcagcttcgttagtagaaagccagataaagttttcatcaaggatatcaccatgttttgcatatccaattgcaccagtaaatgacataattttagtaggacgaccaagatggtcagcatctaaaattttaaaaggatgcatacctaaacgacgcgcatagattccgttatcagtatggtctttaataaaattttcttgagcttgtttatttttaaattgataccatttattaacttcaaatctaatagccattaataaatttccttccagtaagttgtaccgtcttcagtgatttcacggaatacaccataaatcggttgtttatcaccaaccttttcatacacataaaccgaagtcaagtgagtaaacttgatggtgtgttccttttgaactactaccaaatctggatcgaataatacatcttcaaattcgtcattagtgcatttctgaacaattttacgtttcattacaatttcctcattaattaaacagtggagcgatgcgtttcagaagagtagcagcacctttggcgaattttacatcatgaaaaacagtttcttcttccgttacaacacgagctttaatgttttcacaatcccaatttttacgaacaatcttcaaaagctgcagtaaatctttgcattcagcaatatcgataacacatccacgagaatcttccattatcgcacgataaccgtaagccataccataatcattgaaagattgctcgatgataattaagttttccattttattctccaagttgttttctgtatcagtagttgatattgatatagtaccataatcaactactgatgtatatagttttatgaaaaaattttaaactttatgcatagcgagctttgctatagtgtttaatccaactttcaggaatgactttatatgttcctaaaaataccgcgttgtacagcttaacaccgtcttctacccattgatcggtaatgtatgcacacatagcgcgagtacggttaacaacaccttcctcaccttcagtaaattcaaactcataaggagcaacgaacttgatagcttgaccgagtttccacttaaagtctacacctacatgcgaagtatcaatcgtttcaattcctttagcaggaacagcttttaaaaacgcagactcaagaaatttcgcacgaacatagccaaactggggtttagactttccatctttaggaatgatacgcacttttacttcagaatcttcatctttaacgccgtgtttaagctgaatgcttacaacttcaaccaattttcctgctgctttagaacgggatttatcagatacacgagctaattcaccaatattaataatcatagttatctctcacttgttaaaaagattttatactccacgggaccattatactctggtcccaagagtttgtaaactattaattcaaaatagctaccactgcactacgaggtactacgctaaaatcacctgcatgaacaacgttcagaagttcaacaccatcttcaatccattggtctgttacccaaccacagaccgaaataaatggggtcttaatagctaccgcatgagtcaaaaggtcagtaggatcaacttctttgaagaggataagctctgcttcaaaggccatagttttaattacttcatcattatctaagcgatgtgctcgaatcacgtaagctttattcttatcataccaattactttttgaaaaacttttaaccacaaactcgccttcaccaaaaacactagtcagttctttataacctatatttagttcagtagttttaatttcaggttcaaccagtttgtaggttttgccgatttcaatagcggtagtcatagtagtttccttaatttccagtggtttaacagggcatacataagtgcttacaacatcaaaatcaatcagcttagctaccggatttggtgcgtattcaggattataattaaatttcataattatctcatttcaataaaatctacgagttcagcatgcgatttgcggaacattacttggtgcccaccaatgataacttcatcttcaggaacttcgtatacagcgagataaaatcctttagaagataattcttcgcgctcttctcgtgtgaaccatctcatcatatcatattcgctagcgaaagcaaaatgataaagagctataaaccatcctggaatatagtgatctacgcctacatattcttctttctcaaagttagtattaattgctatattagcatttttaactaataatttgtcttcgtgcggaagaggaattcttttattatcattactatgatgcataaaattaggtctgtcataacctacgtgtaataaccactcttcgctccatgaatctattatactcctgtatggcgttatttgaacacaaagatttcgacgtattgttatagcatcttcattattaagaatactaaaagatgattcaacacgataaattttcattttattatcctcagtagctatggtgttataataccataactaaccgaggaagtaaacaacttttatcgttttgttggaaaagatagaggatcgcattcttcctctgatggagcgtcttcaagacccatagcataccgcaaagcatacttcatcatcaggatgtctttcgcacagtcatgaatagaatcatgtgcaacgaatccatctaaagttccctttggaagagggcacgtggtcatatcacgaacaagcagaagtgcttcaattctagtacgaatatcacgctgattccagaatttacaaggttctaacttaaacgtatcaagttcattctcagaaacaccattaagacgttgaacatcacgaatgagatcgactaaaattggaaaatcaaacgacattccacggcaccagccttgagatttccaaggatcgatattatgtgcattgatgtaatcattaaatttcgcaataccgtcgatagtgcttacatcttcatcggacggtgcaatattttttcgagcttcaggagattgattcttccaccattcgatagtacttttagtaaaaagacgatgtcctttttgactttttaagtcaaatttaattttaatcccacgtgaaactagttcatcgaatgtttcaacaacttctgggttagggtcaaaagcaattacagccaaatcaataacagctgctttttcaccgcttcccattgtttcaaaatctataataaaatcaaacattaaattttccttgctaaatcgcgaatttgacctacagtataatcttggatataaactttattaataggctcatcaataaattttgccatagattcaatatctttttgtatctcttcaagactgtatactatctttaaagctttttcgcgaatagtaatattttcaggactagaattttcctcaatgacagctttaacatttgtcataagagatttaaactgatgcaaacttaattcaatcattaataaccgccttataaagatggctaatttcacctaaaacataatcactgattgtaacagttttcacttcgccacaaaagaattctaacgcaattaaatctcgttcaatttcttctaattgaagcattaactttccagattcaatttttacatttctacgatttttactataagctaattcataaatttcgctaactttatcttgaagcagataaaactggtctttagttatttccacgaatagcttcctcaaatttaatcatacataaaatacatcataacgaccacgggtaacaccaacataaagaagttgttgggccaattcagcatctgcataatgaatacaaggcgtataaatgaaagcacggtctacagacataccctgagctttatggaatgttgatgcaggaagtgctttcactttactgaactgtgatttagcatcccaaaaatcactccatggagcttttccgcctttgttccaatttttataagtttctgccgttttacctaaaaataggttaaacttatatagctcttcatcagatgaaattattttaatcttttcacgataatattcatcatcgccgtaagtttctactgttaaatcccaatgacgaattaagtattctccagaaacaccacgagctttaacaaaggttgatgtatactctgcttctataatacgaactaattgtccgttattaaaaataatttctgacacaggctttccatcaattttatatgttttaattaatggttcctgcattacaataatttcaccgacaataaaatctttatcagtttcaaaaatctttttgcgaataatgctatttaacttgtcaacagatttattcgtaaatgccattacgcgattttcaaacaaatcatctaatgattttacgattgaaaaataatttaccataaaatcgcgtaaagcggtatcaccagtaaatccacgtactccatgcccgtcaacaactttatcataaatccacttaccgttgcgaacatcagtagctacatcaataataggagcattactgcgtttaacttcagtaagttcacactgataaaaatctttgtgtgtaaagaatggactgatataagcagtattttctcctggatcaacaggtctaatttgcttattatcgcctattccaattatagtacaccacggcgggatagttgaaagcagaattttgaatagctttctatcatacattgacacttcgtcgcagattaataccctgcatttagctaaatccggtacttccttctgttcaaaaagaacgttttcttcatatgttaccgggttaattttaagaatactgtgaatagtactcgcttctttccccgacagttttgaaagaatctttttagctgcatgtgtaggagctgccaaaatgataccagtttcacccgtagatattaaagcttcaatgatgaatttggtaagagtagtcttaccggtaccagcaggtccattaatagttacatgatgtttcttttctttaatagccttcataacgatgttaaaggcatttttctggccttcggtcaaatcatcaaatgtcatcgtaaattccctgcaattggtatactaacaatacgcccagtatctaaaattcgctgatataatctttgtgtgtctacgtcaggcttaacatgtttaacttctattttattaaaccaaaatttacgtggagtctcaactaatcttggaattcccttacctaaagctagttgatactgctctttaagagtggtaaatactttatcagcaatcttccattcaaaaaatacagcaggacgatgttcatcaagcggaactggcgccgtaaatccgtctttgtctcggtaaactatcgcgtatacataaaccatattatcctcggataagtttaaaaattgaacaatttagcggatatcctcttttcagtttaagtttatcaataaaagacaagttttgataccgctctacaccttgaataattttatcacacatatcatattgcatttctgcttctgacaactttttcacaattttccaatccgaacctttaagaagaacgttcagtttaacaacttcagcgccttctgctatgcgagaaccgtcaatacgagctttaagtgctataattcttagcttaatgtcagaggtctgttttgatttagaaagctgagaaatgtgttcaattcggttttcacgttttttctgtatagctttaatttgattataagtctttttgattttagcccatttcttttcatctaaatttagtttatgaacttttttcgcagatgaacgaccaattcgcaaagcaaataaatcacgcttttcaattaactcttctaaagtataatcagaacgaaatgtattatactttttctttactgcaataacattccctttaatgtatccaacgttattatcaaaacgttctaatgataatttctctccttcaatacgattatcaaaaggttctcccgagtaagcgcaaactttctgatctaaaatgttcttaatgtaattgaagtctaagttaaaatctttagaacgtctttttgcagatgcctgagtatgctctagacgacgtttaattttacgaatttggttattagacagcttcatatttttctcacatcttacggacggttaactacttatactataacatttttaccttaacttgtaaacaactttatgtaaaaatgctttaaaactttcatggtataatgaatctaagtccttccattatagattaaatccttcaaattcaagagtatagatagtgtatgttgaatactttttgtactcgtatctatctgcaattctaaatacacttccagctggtatcattacttcttgttcatctgaaactaattccatattacgataacgatggctatccggaaacttaaagtttggattgtattctttacagcgtagagcttttatagcatactcctggaaattgaataccatgggagctttgaattcaaaaataacttgtgtgttatactctaaaccggaagcaaaatgcagagctatatttttatcatatgaagctgatactactttatcaaatataataacatcaattccttgatttaatacttgcttagtctcgactggaacacctctccaaagaggtttatcgtttggaaccaaacgagatttgattatttcatttaaccaagtatggtcatctggtttgttggtaatacaatgaattaaaagttcaatttcagataaattaaacccttcagaaagtaattcttcacgaatagaagcacgcaccgatgcatccattgattttattttaaaatcttttagttgcattactgagtatttcattcaactacctcaatatcataaactttaaatgttccaaatgaatcgtgtaatttttcttttgaaatagaagttattctatactttccaattggaatcatccattcttgttcacgcacaatcatcattaagttatcagtacgctctgaatctagcccatcagtatcttcatacgtgtacttaaactcagtattaggagaagaaagtataatatcgctgatatggtcagaataattaaaagctttatcagtttttaagcgaagtattattttagtaaaatattcagcataagaaaaagaacatgctgtgaataaactagtagtaaatgaatctaccctgttcgttgaaaacacttctccaacttgtaaatctttaataagttcttttgtcgattttgatataccacgatataactgataaggcgatttagttaaatgctttttaacgattttattcaactgctgatgaagagcttcattctttttggcttccatacattgccaaagaattgactgctcaaagtcagtaaatttttcacagacttttttatacatatcatattgaaaatcaacgctttcagcttttatagataactgttcaacatctgcaagattaataatcatgatagcctccgtatacttcagaagctatcatatcatcgttagaaaggaaagtaaacaactttttgaattattttgcccagggagcccagggcggagggtcaagatggtatgaagctagttcttctagaagagcatctggggcttcaattccataattctgtaatactatacggtactctttcttataatcactagaatcattctggatattcgtagaatgattatcttctaacatctcaaataaatccatattaattcctagcgataaaaaccaaaatgacgattagcttcagcaatctttctttcttcttcggacattctccagcgtaatccaacgtcaaaatgagcccagaccatcttaacaaatgcatttatatctttaatatcttcaataatgaatgttttacttttcgaaggttgactcgctaatttaactttatcatcttcaaacaggtcaaaaagaccatattcatgagctcttttatagcctttaatagttaaagcttcggaagaagaaaacggtgaatcagtattttgcaaaatatcttcagtatgctttataattagaataatattttctggatattttctttcttttatatctttaattaaaaaatccggattttctgctaaaggaataattaatgagcagtttttatcaagcgtatttactgatttaccttctttagacataaattctattgaataatgttttgctacttcaatcatgtgatttccttttgcctactaatggaccgtcgggaattttgttttcctggatatatttctcattttcttccatcattttactaccaattttaagaagcaaatccattgcttcatttgcttttgctttagcctcttccagcgtcatatctttgctcatgatttatccccatagatgtctctcatcaatttaagcgctgagcgttctaatttcttttctttctcagcactaatcattgatttcatccattcttccgattcgttctgcatttctttatttgcttgttcaacccaaccatcatcaatgtacattgagtttggtctattgaaccattcaagaatcttcttgagagctttcatttattttacctaaaacaatagtaggagcattgtcaaatttatgaatttttagcaaatttggatttaaattattccataaagaggtaataaaatatgatagcgcactttcgtccgtaattataaatttatttcctttatctattttccaatcatatattgaatcatatgaatagaaggacaatggtttattattataatatgcttcactaacatcaatatagttagatttagtaaatgcttgaattgccataaatggagaattttgtacagtttcaataattccgatctttttaagttttatttcaacatcttctggaattggcattgaaataaaatcttctactagatacatgttattgtcatatcttttatcaatcattactgctacggtaattggaacatccttgacaaaggccatactaatactattgatagacatttcaaacaaaattgcttccataattttcctcaatcacaagatgtagatgaacaactagaatcacaagaacttccacatgaatcccctgcccatacatgaacaggaacattagtatcatatgaatcagaactagactgtgtattctgtgtgttagatgatgtagtaggtgttgaccagcgccaaggatttttataatattcttgggcttcttcataagtcatagtaactgcttctactgttccatctcccatataaacatactcaactacagttaaaggaaggtagtcatttgaaataggaactacaccttccccaggagttgtagagaaaaaatccgtaaagaaacttttaaaccaattaaagataaacattacaaaaagcctcttttgaattcaacttgcttttcaccataatcatatcgaatctctgcattaaattcaacagaaccatctgcgtacatcataaatgaatgcacaacaacttctgtagaccatggttgcaattcatatttcttcattacatgccgtgaaatgataatatctaaatcttcattcggtttaatccaacgatttaacatagtgctctcctctataagataattctattataccatactcattttggaaagtaaaccatttaaatgaaaaaaaggactcccgaaggagtccttgaatttattcaccagttactttccacaaatcttcatttgcagcaatccattcagtacgttgattttcttcatatactgtagaatatgctgctttttctgaagggaatgtctggtaatgagcaccagaaattttgtgaacatcagaataaagagggaaagctacggaaatttcctttccttcaattttcttatttccatctaatttctgctcaaatgttttgatattaacataaccgcgagtactagccatgtaattctccttttatttaaattacatgattatttataataaattctcgcggaacgctaaaatacccaattttagttaatataacaacatcgccgttaataattaccggagaataatcggctggagcattaaatttccaatgggctctaatattatatccatcagaaccaaatgctcgactagccggtctcccggctttttgccatgcataaaaatcaaatttcattttgaatgctctataattaattttaaggcttcttcgcgcaccaacttgcctaatggtatatgcccagttttaattgtgtaagctttgtggagctgattagataagagctcacatacgagctccttgtcataatctttaaatagctggtcaatacgtttcttgcgggctttcttaagctggcgtttatttaaacgagccatcaataacctcggtcttgacgagcgaaattttcagcatttttcagataataaagtttaaatatttcttcagctgacattccaagagcaatgaatttattcatgaaaaagtgaaattggtcaattagttcaaatttaatttcaagttgatcttcaggagataaatcttgaattttcttggattgcatttcagaataacgtttcttccaaggtttccatacagcagaagcttctttttcaccattactcataccaccaagagaagtatatagctcgcgagtttcatctgcgatataatcatcttggtttcgcaaccaagcaagaacttctcctgcagtttcaagtgaatcaggatgacgatttgtttctggcttatcattagccaaacgaatctgtaaatgccgctgcatatcaagcataacctgcaatgggtcaatattgtgcataatattctcagcatatgcacgatttgctttatcaacgccttcgatcaaatgagcgcattcattaaagtgagccattatttttcctttcaattcattaataagttaaataattatatcatttgaatataagcaattaattaaaaatatatacttcatcagttccattcttttctttggaatgatatatgttaaagacatattttttattaagatgcttaacattgtattttttagaccattctttaagaagagtgttttcctttccgtgatgctctaaaacattcgacagtccaaattttattcctctgtcatttaaagaatctaaaagatttaaaaggtctttttcttcttcttctgaccaaaatttattataatcagcaactgttataagatatggagggtccacatatacaaaatcgccgtctagaattttgacatctttaaaatgcaatgaactaaagattattttatcacaattttgtttaaagtgattaaagcgtttttcactatttttgtttatagttctttttccaaacggagtagtaaaatttcctttatcgtttatacgaatcatattactaaacccgtgaaaatgaagaacataaagtaaaagaggatctctagttttattataatcttcacgtaatttcaaaaactcttcttttgatgtttttgatagtttgtattgctttattacttttaatacgtcatcccatgatatatcaataagacatttatacatttcaataattggtgtttgaatatcattggccaatacaggaccattgacgttcaaagacactgataaacctccacaaaataaatccacgaatctgtcatattttggaaagtggggcttaagttcaggtaataatgactgtttattacctgtatacgcgatagctcctagcattatattctctcatttattgcagcaaaaaatgaattatacaattcatcatcatatgtatttgatagtaatactaacacgttttgcgatttagcatattcattaaacctcgcctgaatagttggattatcagtaaatgattctctttttgtccatttattacgcggataatatccgcatggcaaaaaatctaatatcatcaatgatacagggttttcagtttttgtgtattcttttaatttctctttatcttctaaatatattccaacagaatcaatagctgtacctccaccaacttggtgtttaatttcaattatatgctttttaccgttgcgagaaataacaatatcaaatcgtctagtacgcttcttagttataaaattcgagcaaaacaaattatttgatttttcagtatcatcggttaaaaccattttttcttgataactaactgaacaatcagtgaaatattcttttactttattaagtatgaaattttcaactacggcagatattttatatgaatctccgtttaaagccatttcatgtacaattttattaatcattatatcatcctcagcaatttattttataataccataacaagctgagaaagtaaacaaatttgtgaaatttgcgataaatattaatttaaaggaggacatatggtacaaaaattaatggcacttgttaatgccataaaaggtaataaaaaacgtatagcttttactatttctgctatggtaggaattttactctggaactttattttatcaccaattgcaattgcgcatggtgttaatattccagtagttactcttgatacattcgtagatctagcatttgctttagttgggttaatttaaatcttggcatatttagatagccgcattttagccatcaacccctgggcaatattatttttcatatattccataatttgttcaggggttgcaccttcctttctaatcatatcattgacatcttttgatttccagggagatttatcccaaaacataaccctttctcctgcatcaactaatttagtcattcgtttgatagtgtcagggtgacgaggttcattatctaaaacccacactcgtctatctttaaatggaacaacttctaggtctaattgaccacccgtaatagctataccattttcaataaaaagtgaatctataggtccttctagaacatatacatcaccatctttaactcgttcgactccatatatttttgttgcctcaggataagctttgatggtgatatatttttggggagcatctttctttaatgcacgtccttgaaaagactcagcttttccattagcattataaattggaataacaagacgaggctcaggtatttcctttttgtatgttcccggtgctatgctattaactaatttaggccattcagttgtaaaccaaagatatttccatttatcctttggaatacaacgagcttttacatattttataattgcatggtcttccgccagtttatctaatctaacgcatgacggaagagatttaattattttcttctcaggttgtttagaaagttctttaggtttttctactggacgacttttacctttttcttttcttatttcaaagatatactcacgatataaatcaggttcaaactcctttaaatatattccgattggtgcatgatagttacagttataacaatgaatatttccttcattattatcaccataataccatccacgagctttattctggtcggtttttgaatctccacaaacagggcatctaaaccgtaatttaaaagttgaactattatttacttgtgtgaatttaggtaaatgagctaatgcacggtatgcaaactcattatcaatccaaggtattgatgacatttttactcttctttttctttagattcctcttttttctttttaggaatctgttcaggacctttatttactacagcacctgatgttgttccagtagagatattttcaggattaccacctgaatctccagctaccatatcttctttgataaattctttatatgttttcatattaacctctattcataaaagcattaaaaatttggtcatcaatagatggaatagcaaccttttcggcatcatttagcaaatcattaatttcatcagatagcataacacatgtgcctttatttcctgtaattgttactgcacaattacgaacgttttctttatcaaattttaggttaatattttcgtaatgaaaatcctttaatgctgaatatatttttaaaataaaattgtcttttactacaataaacccaacctcactattaaaacgtggttcatggaaactgcaataaaccttttcatctatgaaatcgtatgaaattttttccatttttaaatatgaaaattcagaactatgcatactaacctctaattactcacctaccacttcagcgatgatatttttattattaaagtttttatcgcaatatagaacataattatactgcattacaccaccagacttaagctgtttttgcacttcggctttcatttcaggacgatcgcgctcaacgatattcataatatctgcttcaatttgggtttcaacttcagtctgatccgcagtcatagaccattcgcacaaatctttatcatagcctgccatagcaggctgagcagcgcaagaagctaaagcaaaaattgtagcaaagataaattttttcatgataatctcctcagtagtttatgtttatatagtatctcaatttccaataaaagtaaacagttattttaaaacttctgcataatcacatgttacaaactggttctctaacttgacaattttacgaaagtatcttttgcattggcgaatctgccgcttcgtagggcgaacagcaaacttaataaattccactcgaccaaatggaggactttcttctgctggaatatctaacaccaattcccacgtatctgcaataagtgctttgaattgcgtatttttcctgacgttatacggagtaggtttaaataaaacaatatgcatattatcctcggcaatccacttcgcacactttcttgtcatcaatgaaagctttaactaatgctttattaacttcagcatattgagtagtagcccattgaacgtcatctttcatcattgtgatttctttaataaacatgctttcattcttaaaccaccccataaaaactacctttaccaattccataacaatctcctcatttaaccaacaagactactataccatagtcttgtcagcttgtaaactaaaattttaattcatttgccaaagcatctaactgagctcgagctgattcgtttctttgatagcgattctgttcagcctgaatctgttgtgaacctgctacttcactcacttcggttggagtagaatcttgttcaatttctacccatttttgatttcctttttgaacacccatcaaaaacttattccacttattcttatcaccatatcgtgatttgatttgcttaataagttgttgttcagcagctgctagctcctcagtttcaatgaccgcaagcataaaatcagctgttgctggaagaccagcagattctgcaatatcgctcatgttaacatcggaagagtcccaagcttgtttaccgacctgtgctgcagtccaaagaacagtttcagtttcaacagccagagcacgcaattcttctgcgatggctttaacagttgtgtaactattttccgaataaactctgatgcggcaagatttacaaatacccagatagtcaacaataatgattgttggaacaaaattcttcttgagcttcaattcgtttaaaagagatcgaaatgtattagcgtctgctccaccagtaggatattgcttaacgattaaacgaccgagagtagatttctcacgccatttttccatttttcctttatactcagcgtaagaaatatgcccatcatcaatgtcatcaagagaaacatcaagcatattagcgtcaatacgtttagcacagacttcttctgccatttccatggaaatgtaaagaacattatgaccgagctgtaaataatctgctgccaatgaacacaatcctaatgacttaccaacgttaacaccagccattaaaacgttcagtgttccagtctcagctccgcctttagtaattttgtttagaattctgagtttaaatggaaccttacgagctttattcatataagatagccaacgcgcttcatagtcatccatccaatcatgaccaacgtagctatcaaatgaaattgataatgcttggcgcatgatgtcaggaatagcacctacatctggcattttcttatttcgtttttccggaggaagctcagcattagtttgaatttcgattattttagatgtagcattaaacatcgccctttgctgaacatatttttctgtttcttttactaaccagctgtggtcttctggagaatcagccagttttgaaataagtgtttttacaccagaatattctgtttcagtaaatgaactattttctaatgcaacatttaacgcattaatagatggaacgctatgatactcattaacatgagatttaattaatttgaatgtatttttagctggaccactttcaaaatattctgaatccatatatggccaaacttttgaaaaataagcttgatcaaatatgagatgagaaagaataatttctaccacacttactccttaaaagaatttaaattttttctttgaccttttattaaatgcatcttgcagttgcattgtaatacatttttctacatgaggagctaactcagcttttctttcttggtcaagaacagcaaagtccattacgacttttccatcaacccaatctaattttgtcacatacacaatgtgtgtagaaccatcttctagtttaatgacaatctcctggataacattttccatagcggatttaattatcttaagagactcattaaaaagacgttcttttctttctttttccccctccgaagagggggattcatcgataatttctagatctaaatctaaatcatctttattcattaaattcttccatatcacttaactgttcgaggtcagtttctaaatcagctgctgatttacttttactttctggagatttaaatttttcaacctttgagttaatcaattcatcaacttcagcttcaacaatttcattgctatcaatagcacctaactgataagcacgtttaatagcatctcggaatggttgatgcttaaataaaggaccccagaatgtagtgcagttggtatcttttgcacgccaagatttttcttcgcgaatcatctcgccggtttcttcgtcaagaaattcacgagcataccagccatttttaggttttaccacgaatcctaattctagagccatatctaacaatccagaataaggatcgataccaccgtcaaatttaacatcaataaagaatttacttttttctttaacggtacgagatttttctacatttagaacaaattgatacccctgaagatcagaaccatctttaatctgacgtttaccgataatgaatacggtatcagccgaatacattacgcctgtaccacctgtcattacggttttactaaacatttcaattgtttcaattgtatggttaaccgcaacgcacggaatatttttaatgctaaaataaggagtaacaatacggaataatgacttcagtgatttagcacgagtcatatctgccacagatttttcattcaaggcatcttccgtttctttcttagaagccatattaccgattgagtcgatgaatacaataaccttttcaccacgctcaatagcttcaagctgattcaccatatcaattttcagctgttcaactgactgaattggtgtatgaattactcgttccgggtcaactcccatggatcgcaaataagctggagtaataccaaattcgctatcatagaatagacaaaccgcgtcaggatatttgttcaaatatgccgcaaccatagtcaaagacatatttgatttaaagtgtttagaaggccctgcgaaaatagttaaaccagactgcataccgccatcaatcgcgccagaaatagcaatattaagcattgggatttttgtacggattacatccttttcattaaagaatttagatgtagtcagttcagcagtcattttagaagttgaagctttaatcaaacgggattttaaatctgcaatagacattcattttttccataggcatcattatattttcctcactggttaaagatagagtaattataacacaataaatttaggcattaatcaactgctattggatgaatagcattaaacttatgaaatgcttctgatttttctttacgcgaaacacacatgcgaagaacctttagtggttcatcttcttcacccaacgattttcgtttttcaatattagaagttttccaacgagcttgctctggaaactctctattgatttgctcaagcgctctattatgtttagaattactacgaattgaactacatccgccaggagcttgtgcttttccagatacaactagatatttgaacaaggccaaatgcggataaccttgattaattaaattgagaaatgcatacatatcttcgcataaatcaatttttccatacccaatttgttctgtagtaagttttccgaggtcataccatgtattcgtgaatccatatgaattttcacgataattaccccaagatgaagtaattttaaaaataggtagacgagcatggccatgataatacccacaatccatggcatcctcaacatattgaatcaattcatagaactgttcacgagtcaattgattgactttatccacacaacgacgatcatctctttttcgcattgaactcatacgaatagtagtatcatcgtcaatcatccagattcgttgacctgcatacatatcagtaattgctttacgagtaccggcaattccgtttacatcatcaggaatagttataattttagctctagacccataggcatcataataagctttttcttcgtgttcacgcactacaatatgcggttcataatcagtcggaaacatatcaagggcagaaactgccccgacacgctgataacttggaattacgaattgaatcatttccactcaccgttataatcttttttcacaatatgagtttcgccagtattccaccaatgatcaaccaagtaaaaatgacgagaatatacatgaagacttccaacattccatataatagaacctgctttatactgacgagttgaatcgcctgcattcaaatcagatactaatttatctaatacgtatttttgccatgcataatcattacggaatccgaagaccacgtcatttgagcgcatgcttactactgcattgactttcttatcacgaatcaggtactgtactgtattagtacacatgaaatctgacataccatctttattgtagtcaaattgcatggatggacgagtataaatcatgataccacgtcgagaatcaggattttgaccaagttcagctaaacacatatcatactgggcatagttatcttctgaccaaatagcccaaccataattcgagttaatttcgcctttagaagatgctacctgctgccaaatctttggtgtttcacctggaatatctttaacaaacaagctcttagatttataccattcaagttcacgctgaatgtattcatcattaagagcgccaaaaataaacggttcatctgctacaaatgatgcgccaataatttcaatagttttaacaccagttttatcaactacgaaatctttttcttttaatgcaagccccaaatgaagacggatttcttcaactgtcatagagtcactaatcatttaaacctcaattgatacattcatatttaacttgtaacagtaataaaccccaacctaaaataatagttggaatcataagaggaaccgttacactatagtatatacttattataatcatcaagattaaaagcaacactgctataattttgcttttcattccttctctctgatgataattacctgatttggttgtgcagactttttagtttcacccgcaattgaccaaataaatgtaataaaccaaccaataattgaccagttaaacagtaaagatgtgaaaaagattcctactgtcgattttgacccacgcatcaaggcgataaaccatggaagcatgtatataataatagccaacacacctgaaactaaaaccataaaaattgaacctgctactaaagtttccatgttttcctcacttagtcaaattttttacacatgaattataagaattcactacatactccatcggagcatttttaccagtacgccattggtaattattagcccaattagcccaaatttcggcgcagtagttttcaattttttcttcgcgtgtaattacatccgaattacgatatgcttgagcagattcatctggacgaatagcttcgtcaaaattcgcctgcatttgttcgactgtttgctttggagcttctttataacacttgacattaggattataaaatttgcttgaacagtttacaatttttcctacatcagactgatttactaccggtccttgagctacacaaccagtaagacctaatgcaataaccaaaatagcgattttcataataatttcctcaaatgcaagtagtaattactccagtagtgcttatgcaggtattacccatttgcacacctaaagatccatttgtattcacatgaagattatcatcaattttaactgatattttaccattagtgtgaataacggtgctagattcaatcacaggttgagtatcattttcaacactaacaaatggaactgctgctaatgcaactaaacacattgctaagcaaccataaacaattttcattttattctccaaatccgtattagttgatagttgtatagtaccacagaggaacagtcttgtaaacagttttgtgaaaaattttttagggaattctaaaggtccagaatcatctgtttttcataagtatagatttatattacttgtatgaaaaagggacccggaggtccctagatttattctatcaaccaaacaggaagtctaacgaagctttttcttcatagtccataccagccgattcacacatacccgcaagcggtttaacaaacgatttttggaacaaagttgagtagtcaatccaagacagtacatcagaacgaatttcttttggaagttctgtgcccgacggccaagcaatgcacttgtcaccaaatggatttccttcacgcaatggaagaaccattaccttatttccatccaaaattggagctacacctaaaccgctaacagctcgacgataagttagcacaccacgaatatggaacgggcatttaaatcctggccaacctttatcatcatatttcgctatatcgttcgcagtttttacttcagcaataactttataatcaagttgacgatattctttctcaaagttcttgtagtattcttggacagactcttcaccttcctgaagaatacgacgaatactttcttcgagagcttcttgcactgcttttggtgttgaactctgctgagtttccatacccatgatttttagatgtggttcagcaaatcgcttatcttccatatcataaacgttcagagcataacgctttttcgctttccaaaatccaccaacgccctttgaaccaagtggagggcaagaaatagcttcacggtccatatgcatcagatgctcgcggttattcatataatcacataactcacgatatgcaacatcaatcataggttccatctttttcttaccgaactgattcatgaattcaactaaatcattttgttctttaaagcggtcaagaccgactttttcaataactttatctacacaaacatataccgaatcagtatcacctgctgcaatgaaatcttcaccattagttccgcatactttattcagatattcattaattttacgagcaatccactgaataccgacttgaccaaaaattgtgatagcagtagcatttcgcaaatcatagtaacggaaatgaatattaccaagagcaccataaagactgttaataagaattttacggttcagctgatttgtgttagcaagtgtagccgctttttcacattcttcaatcaaactattgagaacagattcagtataattcgatagttcatttaagaaatcatcactgaacttaacatatcgttcaacttcaggtttagttgaacaagaccctgcgcctttcataataatctttttaatagcttcggcattcatttcttcagcgaacattttctttttccaatctttacgctggaaaaatactttagcgatttcctttggaatgataccttcttgatgcttatcatacatccatccattcggagaacaagaatattcatcactcggtttaggagctgttcctgcgatatattcatgaattggatgaactttaaactgaccacgaatagtctcaggactaatgttaacctgacgaataatgctcggatacagagacgtcaagtcaaaactcataatatatcgacgagcaattggtttaggttcaaatacgaatgcacccggaaaactctgtttaacgtgcgaaccttgttgaggaataaccttatgttcacctttcaatgagttaaaaataatagcatcccaggttttaataggactcattacaccggaaaaaggcattttagcgtaataagacatacttaaaactagatcgataaacccgcgaattttatcaattgcttgaactgattctacgtcaatgatgttataactaatgtatcgttgatgattagtctcacgaagtttattaataggaccgtcgtatggtaatttaccttttttggtttcatgctgagcaactgattccaaagagaatgacggcaaattagtaaaagcgaatttcttgtacaaatctaaataatcaagaatagatacgccatcaatagaataaatttctttgctgccgtacatattttgaattagtttagattttactcgaccgattggagagaagcgtttcatactacgttcaccgagaaccattttaacgcgattcatgatatacggaacgtcaaacccctcaatattccaaccagtaaaaatagcaggtcgtttctgttcccagagattgatatattccatgagcatatcacgctcattatcgaatggcatataaattactcggtcaagaatttcttgaggaacttcatcaccaccttcacagtcaagcttagcagctaactttgcatcccattttgatactgaaccgtacattgaattcaaaaggtcgaaaacataaaaacgatcatcaattgaatcgtaatgagtgatagcatcaatttcatattcagctttcattgggtcaggaaatttatcaccagtaacctcaatgtcacagttagctacacgaacaaattttcggtcataaacaatttctgaaccgtatgtatcactgatataagcgagtttaaaatcgttcataccgagagcttcgagaccgatgtcttccattcgtttcatccaatctcgggcatctttcattgatggaaatttttgaggagcacagtttttaccgtaaatgtctttgtattttgattcttccttacagtgtctaaacatagttggaagatattctacttcacgagtacgttcctttccattttcatcaatataacgttcaacaatgttatttccgactgtttcaatagagatataaaattctttcatagatattccttagtttatagcccgagttattaggctcttgatatattatactccaaataaggggccgaagcccctttgctttaaatttctattgtacgacgcgatataacggacttgccatctttatttgtggttttgataatcgcatgaaatgcgcgttggcgtgggtaaactaatcgttggaattctttttggaattctatttgtttatcttccgggaggtcaaaaaccagttgggtagaagacagaccatatgtttgttttagattttcgaatattagaaaagcttcggtaaactgaatctctgattgtgtcatataatttaccttaattaccaatcgtatatttaggaacgagtttccattcatgtttttgtttaaaagaaataactcggaagttattagttaaatctttcataaaagttctttgtccaggaacgatttcaatcagtccccaatcttctaacagccatgcaatcgaatcacgacgaacttcatcttcttctgtcatttcaacttgacggccatccatacgaagcatttctttaaaatgaacgatatagtatagtccttttttctgaagaatatgacaggactgatacagaactttatctttattattagcaattcccatacgagtcaaagtttcttttactttcagaaaatcttcaggttttttaagagtaatttcaatcattttaccattccaatgctagttttttgagttgtttctgttcttttacgttcttagtcacttcttttaaaaaatcatccgtgactaatcctttaagttcttttaatactaaaggtagttttccatttttagtaagaattgatttatagttaattgcatcatttgtattaacttgataccgcttagcaagtaacttaataatcaatacttcggtggaatcttcaactagttttgcccatttaccatatcttttaccacgaggaactgcagccattagataattaaaatgagcttcatcacttaagcctgatccaattaaattcatagcatatacagctggcatgcactctggaaattgtgataatgcattttcaaccatgaattttgaataatctttttgagcaatagagcatttagttttattattaatagctccaattatttcaaaaaattcattttcagctttttctttaaaagtatcagcagcagattggacagctgtccaatctttagaataccaagcaacttgatgctcgtttaattgaatatcatcttcaaataagctcatatcacttccactgcatttcgcatgctaattgaatgaaaagataagctaaatgcaattcagtattagctgcaataccatgatactgattattttcgccgacaatttcgtacatacgaataatactctgtggtgttacacgtgaatagatttcttcggcaagtttaccaataaaccaagaataatctgctgcatattttggtgctaaagctctgagttgtttaacatctttatttttgagagactcaagaacatcatcaatagcaccacgatcgttagtaaccagtgataaaataccagcatccaaaacacctttagatgaataactatcgagctcgccaatagttttacgaaaatcaggaaaattctttttaaccaaagctgctacaactttcatatcagctatagcaataccttcatgtttacagatttcagtcaatcgacgaatcatctgcttcatcatttcaattttatcttcatcggtcggttgaccgaatgtaataactcgacagcgtgactgaagtggtttaataataccatcaatattgttagcagtaataataatactacagtttgaactataagcttccataaaggaacgaagatgtcgctgagactctgctaaccctgagcggtcaaattcatcaataacgattactttttgacgaccatcaaatgaagcggcgctggcaaaattagtcaaaggaccacgaacgaaatcaattttacaatctgatccattcacaaacatcatatcagcatttacatcatgacacaatgcttttgctacagttgttttacctgttcctggagaaggagaatgaagaataatatgtggaatcttacctttacttgtaatagatttaaaggtttctttatcaaaggcgggaagaatacattcatcgatagtagatggacgatatttctgttcaagaatgtgttctttttcatttacggtaatcataatttcctcattcaagttttagtgtaaattataaagggccgaagccctctattaaaaatcgtgggtagaatcagcttcaagagctactacataattcgcgtgttcaccttcaaatttagcagcgccttgtttaccttttgcccagagcagaagtttataatttcctggttgcattttcatatttgccatattgataatgaaattaaatgtattttcaccatcataatcaccaagagtcaaagaatatttaacacgggtaagagcagaatcttctactttattaaaaccattaattacgattttaccttcttttaccgtgatagcaattgtatcaatttgcagaccacgagatacacgcaacagttgttgaaggtcttcagctttaatttcagtaacaacagatgctaccgggaatggaattggtttattaggagcaactactgtactcggatctgctgctggccaaaaaattgttgagcgggcatcagcaattttaatatttccatcttctgactgggaaatttctgcatcatcattaactagagacagaataccgagaaaaccgttcaaatcgtaaattgctacatcaaaatcaataacgtcagaaatatttgcttccgcataagttgtaccattaaccgcacgagtcataataaattgaccggatttaagcataataccggagttaatagtagcgaaatttttaagcagagcagtagtatctttagacagtttcatgtaatttccttcaattcaaatgagatttaattttataactaatttaataaagcaattaacgattaaaatcagccgcaattgtttcagcaacaatttgagcagcaacaattaggcgttcatctgcattaccgcaatattcatcttcaaggcgttcaccacatgaagtcataataaatttagcaccggcgtttagggattctgcagtatgtttgcgcattagttcaatccatttattacttacttcacgatcgatagcttcataatacgcatgacgagcaggtgcagatttaattttgttctgaataacttccattgcgttatcagaaagagacaaaacccatgcgcgacgaattttattttggttttgcggatttgagtcagaacgcacgtgttttggctgaatatcttttacatcaacagtataattcacagtaattttagtcataatacacctttagtcataataatcagtaacagtccaagcttcatttctattggacattatttttgtatattctgctttaaatgcattcctaagcatagattcagtaactatatgctcttcattagaaaaattatttctcagaatatatcgttttatttcaggaaaagttaatagatgctgtccagttgaatattccatgtttttcctccatagagattatactctaataaattaaagcataatctcttataaattaaaccattacagtaaatcgaccaactttcttcatttgaagatgctgaccatatgcttgtgggtcatggtctctatgtgaaataacaaaaacattagtattttttaaactatctaaaatagttgaaatagcttttacaccttcaacgtcggtcgctgaatcaaaaacttcatcaagaattagtgtgtttattttaacacctgaaactttttcagcaatatcacgccaagtaaataaaagagcaatatcaattcgtgctttttcaccttgactgaatgaagcataactaaaatcttcacgaccacgggatttaattgtctcattaaattcttcatctaatgtaaacacataatccgcttccattattttaagataatggttaatctgcttattaaataatggaatgtactttttaataatagcacctttaataccagaatctttgagcatatcagtcaaaattcctcggtggtatttttccattactaaattagtttttgtcttaacaattttatcaagttcttcttgaagcagtgctatttcatcagcatggtcaataaactcagaagatgctttttctatagccgctttaacttttttagctttatctactgtcgtgattagagattgctttttattgcgaatatcatttgccaacgactgctgggttttaatattatctcggtattcatcaacaagaacttttaaattatcacggtgtgttgaaagctgttcaaacgaatgcgtgcattcagaaactttatctttaattttagaaacaactttatcaccggaactcaattgtgacaaacaggttggacataatccaccttcgtgatacatattaatgactttattatacgagtcaatttttgatttaattaaaactgcttcttgaccgattttattaaatgcatcagtcgggtcttcgtctaaaacaatattaactaatctttcattagcttcttctatttccgattttagcgttctagcttcttttgccaaatcatcatacatattttgcagacgagtaagattgtcacccgttaattttttctggcgttcaacgttatcattatatattttaatttgttggataatactatcttttttaacatcaagcacttggttttgtgaatttaattcacgtattagtgctttattaagcttatccatttcagctaatgttcctacctcaagcaggtcttccacaagctttcttcgtgcaggggtcgacaaacccatgaaaggggtataccctgctgtaccaaggacaacaatctgcttgaaactggcatatgacattccgataagctgttcaaattctgcttggaaatctttactgctggcagattcattaagacgtgtaccgttaacggtgatttcgaaaacgtttggtttttgtcctcttttgatatagtactttttctcatcatattccatccacagttcaactaaaagttctttcttatttgtgctgtttattaattgacctttctttacatcacgaaatggtttgccaaaaagcccaaatgtgatggcttctaacatagtagacttaccaccgccatttcgtccagtaataagagttttttgaaccttatctaattgaatgtcaataggatttccacctactgacattatattttgatacctaactcggtttagtttaaaattcttcacaaaagattccttttaatgtatcttttagaccattctatcatatcatcataatctaaaaagtattcatcaaattcagccatgcaaacaacaccttgtgctgcttttgatgtgatataaattattccaacatatctagaatcttcttcggtgtaatcaatatttgctatgaattcatcattaatgtcaaatgtcgaaaacttcacagtatgcatccttaatacaagatacagccatatcttgtaatgatttaggtgtgtcattatctaaaatgttgaagttaaaagatacagcccagtcagtgcagactgtaacctttttaatacaattatcttcaacctctaacggttcaaaccaatattcaataatttctttatgcccaatatcatcttttacttcgcattcaaaatgctgactcatcataacatttttaaattcatcaaaagtcattgtgttgcctctacatatagctggtttgcatattgaataagtgcttcacggtcagaatcagtgatgtctggaattgcattaatgtattcttccatcaacgtctgaagagattgaacttcaacttcttcactgtcatctgactcgacagagttatcaatttttgacacaactcgtaatgaatgcacaactttttctagttcagattcgaacttcgtcagatttttgtctacttcagttactataacacgtactgatagatttgtaaaatctttatagtcaatttttcctttaaacggataatgaattctacgatgccaggtagtattgtttggaataaattccattcgttctgtttctgtatcaaacatccagaacccgcgagggtcattctcgtcacctgcagttagtgtccatggtgtcccaatatatctgacgttagcagcctcagagatagtatggaagtgaccagaccacacttctttataagtcttaaggaaatcaggttcaagaccgtgagatttcattcctttataaaaataaaatccattcagttcccagtgaccaacacaaaaagaagcagatgaagttttgatgtgttcaagaatttcaccagtattttcttcgcacatccaaggaatcaaatcaatcaaacacccgtcaaaatctaccgtagtaggcttatcatatactttaacattaggatatttagccaaaagctcagtagaggcatttggagttaaagtatttttaaagtgcatatcatggtttcctacaacagtatgtagggtaataccagcatcatcaagcatttgaactatttcacgagcgaactccatagttttatgcgtgattgcttttcgcacatcaaaaatatcaccatattgaatccaggtagtaattccatttttcttagaatattctattgcttgtttaattccatccaactgaatggactgaacccactcatcatcagctttaacgcctaaatgccaatcacctaaatttaaaattttcatatatcaagaaccgtcattgaaatgcaaaataaaattattgaaataaatccatctggagtactaaagaatccaatccaacatgctctagtgaatagataaaatgcaagaaaaagtatcacgtatccaagaaatatcattatatcaaactccgtataaagctaaagggccgaagccctttattttgtaataatgtcaaactgttctttaaagcagaagcttgaatcttgatgctgatacaaaaattcataagctttttcacgttcgcggtcataaagagttcggtcagatgacagttctttaatacgttcaaatgttgattccatatcattttcatcaaaccaaatgataccgctatcatgcgaggtcaaaggagtattatcaacacggaattttaaattttcgccagtagatttccaaaataccggaattgttccgcatgcaccaagctcgagatgagtatattctaaagaacgctgtagatattttttgtccaacttactcagctgataaccaaatccggatttactcatacgttcaagcatttcgctatttacataacggtcaagaatttgcgttggcaaattaggagcaattttaatttggtctacttgatgaagacgataatactcgtatggaattcctttttctttaataggaatgaacgctggagaacgttccagaccttccataatagtacttagtcctgcaggtttaagatgtttttcgtgaaaatcaaacatctgataaaaacctttccatgtagtcgtacgaccaatccaacggttgatattcatgttaatttcagaaacatctttccagtaggttgatcgaaccttcgcaatatccataggaggctgaaagttatatacggtcggtgcttcttcaatatcatcaaacagagaaacagtttctggataccactctttcatcagaactttattaaaatcaccattatcagaatggctaaaaataacatcagctcgacgaacagtttcttctaatcccaaatttcgacgcaaagaaagagaagaatggtcatgttgataaactacaacacgaacagaaggtttaatgttatcaataatttttttatagttattaatcgtgtcttcttcaaccgaagaagcaggaactgaattgataattagaatatcacaatcatttaccagcttaagtgttttatcatattcttttgccaataaaaccggaattgaaaatgatttataatcatgcgcgcaattacgagtaaatgatttatctttagcataaaccaaagttacttcatgaccatttttaataaaccaatcacgttgctcgagtgagaattttgttacaccacaaccttcaagacctcgagccataaaaatacatactttcatttaatatcctctttgttttggtttattttaccaaaaatttataaagcaatataggagccgaagctcctatccacataatacgccatacagaggctcattagaacttttaaattttatgcgcttatattttatagttccttctgctttagctttatcatgagactctttaaagagtctcatcatttcctctttagaggaacgaattttattataatctatttttataatctatttcagaagtctgggtgttcatctttcataactgccaccattttttgacttgataagaatcaacccacactttcatattagggtctgctcttacaataggaggattaacttctttaattgaactatcatggtattctttttcagaaattttcacacaaagatgaccattcaaagattcagtaaatcctgcattaattttaagacgcttgaattttacgtgtgtaagcatcaatcatatcctcaatttgcgatctagtagtcttccaaagaatactgatgagttcatcgttatatggctgttttagaatatcccgacttttcttgatagcatattcgtattgagcaaaattattgttttcagctgcgatctgagcgtgcttataaagacgattcagttcgcgtttgtttttagacaataacttatttgcttttctttctgcttcaagacggttcttttcttcaatagaagaaataagcttttccacttcatcattaatttcgggtttatcagtcatattatttctctaatataaaataaaaatcatcatctgttaaatgatacctgtaatttaattctacaccattagatttaaaagcggtatcatacggattttctggatcaatatcaatgtcaagagctaaaacttccctgagatacattttaagtaaatagggaatagcttcaacttcaggtatttcttccaagaatccggagaggttaatcgttagcctcatataaaaaatccaaactaggagaatcgtctacaacacttttcttttcagcccccggtgttctataggttgattcttcgtaatgcgtcattttatcgtagatgtcttgaataaaagtttcatctactaacgcaaccatatcgtcgtcacgactgtcatagacattgtgaacgaagtaactatatttctttgcaacttccttacgttcttttttaatacgttggacgaatgcattaaaacaagcttgagttatatatgcatgcgggtttttatatttcgtttcatcaaaattgtgaagccccttaatagaagcttctataccatctgcaatcatttcttgtttccaagactgggtgtatcctgaaaagttgaaacgtttagataagccttctgcaataagcataatggctaatccgatagtatcattttgacgaactactttatttgggtctttattatttgctaattctgttttccaatcaataatagcttgtaaaagctctttattgtttacgtaattatatttaggcttagtttctgacattttcacctcttagctcaattcatagatctattatatcataatatttgaagatctatcttaaagcatagagaatatcagttatctaagtaaacagtatgcttggaatactttctccatcatctttttaaattcatgaatatctatataatgactagttagatcagcatgatataaaaagtctaaaaacttttcatgtgtactaacatattcactttcatttaattcagaaacatggctttcccaatatccaacaccagtcttatttgggaaaaatgaaattttcatgtattggtcaacatagaaaatgccataattttcaatagtaatagaaatattaataaatttcatacattcatcaacttagccgcttcaagagctgcatctagtgaatcaaattggtcaacatattcaatcaattcgccgtaattggcatataaccaccattggctaaattcatactcaaggatgaatccatttccttcaatttgagttaaaccattgccgtttgtatttacttcatatccggcaagacgcaaatcgttaataagagcttcgttcataattataccttagtaattttcaggtctgcaaattttttcttgcgttgatttttcatgcgacgaatagttttatcggaaatttcatgcttttgataagctttagattctacaccaaaagctttaacatcaaattctgacaagatatattgaaccaacaattcacggacagtattgcgtccaatcttctgatcattctgtttcatcgtctgatgaagctctttttcccatttatccaaaatttgaggagttacaatatcgcctttttctagcaaagaaactactttatcatatgcgtaagaattgatggcgtttttaatttgaatagtcatacattatcctcaattgcattaaaattttattatccaaaaagggccgaagcccttagctaaactttttggcacccttccagccttcatacatcattgcggctgatattaatattgctcctgagcaacttgaatatttgtgattccaaaaccagtttagaaaaacttcgtcatcaataccttgtgctatcatattttcaaagaactgacgacgagcttcggcaattcgctgcgataatttagattcaggattcatttaaattttccaattaccgttttcatcaataaatttaatccagtcatttactgaccacttagttgtatcgccttttggagtaacatttaaagtatatagcccttgcttaaaaagcattcgtttgatattcatattttcctcagctgtaacgataacactcgtttgatttacgtttagcaactcgttgagaagtattataatcaaaatcatcgtcaatgtaaactgattttttcaactttcttacttcaccacgtaattggcgatttagctcatctttaacttctgaatcaatacctttcattctacgccatttatctgagcgaaaaatgttttcaaccatatctttatgacttaccccatcaggagctttacgctttccgaaatagtcataatcacgaactttcaagtctttacgacgatacgttttacccatggagtttaatttccttagcaactgaactaaatacagcacgatcacaaatcatgtgtttatgtaacttgagtataatatagcaaacttcaaaactatttacatgagtaacacgaacagcattaccattaatgagataatactgtccctttttaatttctttatcaaccacaaccatatcaattcctcaaaggtaattcatgtgttaataataccacagtttgagctcgttgtaaacaactttgtgaaaaatatttcagggaatgataagaaaggaacgatagcttagaatggtaatatacagaatgtaagaaagatgggcccagagggcccatcttagtcttctatgatatctctatcatatccaagtgaaatgagagtttctttgaagtgtttaatgttcttttgtctggaatcattaatgaaaatgactggataacgaatgttaagagatgtgaatccagcgcgtttagcaagagatacaatcagttgacgatcatactcaatcttaccattattagtaagaactttataaaaagtaaaagaagcattgagctcctttagaagttttgtaactgattgacatccaggacaacgacctacttcatctggaattccatagacttcaatcttattctttaagttcgagttttgttccacgagaaataattccttggtaagcccaataaggaggattaacagaatcctcaccagagttttcttcaggaaaataaacctggataacaaatccagatgcatcaaaggtaaaataaaccgtaggcagttcacctaacaattcggcacgagcattaatttcttcgagatctcgttcacgtccagcccaaaaactaggatttagactacattcgtaaaaataatagtcattaccgaacatatcaaaaccattccaactctctactacataccgctcaaaactaatcataattaatcctttttatcaagaaccgcattcagcttgttagtaattttatccagacgctcattgaactcactagaagataagcccttttctggagaaattaaactaatcacgaaaaatatagcaataaaaggaataaggaaaatagctccaactgccataaacagaaagaatgttacagttgtaagaaaatcagctaaacctttacgaaatttatacatattttacccttaattgattaaccaagcattgataagcactaaactatattgcgaataaaattctggaccaaaatgaaaaatcatatcatttatagtgtccataatataattcaatttaatcatgtttccacaccccatcggtatttgaccaaagtcgctgattatctgatcctcgccacagctttttagtcggaagatttttctcatacttcccatcaataataacatcaacatatttaagcatttctagttgtttaatatcttcaaacttatatcctgtccacaaccaaatgcttttattgggataaagattttttactgtttgaaccacagagtgaatcacgtctctgttatcaggataaagagggtcacctccggttatagtcaatccttctatataatcattattcaaacattcaattaattgttctagtgtttcaccagtgaatggaacaccatttctagcattccatgttgatttattataacacccttcgcatttatgcaaacaacctgtaacgaaaagaacgaccctgcatccagggccattaacaaagcagcacgggtatattctgtcataattcataataatatccaatttttccaagcttcatcagtagaattacagcgttttagtataagatgtctagaaacttttatggcatttgagcactttttaattgaatcatatttaataccgtcaactgaaacggttttgctagttggagaaatttttccatacattggattttttgaaccaacttgaagtccttttaaagcttttgaaagcttttgtctagattccaatgacatgggagaattctttttaccttcaataattcgcttgcgatgaagttcgcgttcttcttcactcaaagaattgtaatattttttaacaccgtttgatatagataatttatctttctcagaccgctctccagctaatttacttctaacatcttttcgcttcatagctatgcttacggctttatttaaatttgcttgatgctctggcgtacgtttatatttctttaaagcacgtgaaatagctattttagtttcttctgttctctttttacctttatttgctaaactatttttgtggcgatgttcaagtgtctgttcataggcagttccaccttttccaccaggtttaatattatatgtattttcttttagacaatactcttcagttacaagttcagcttctttatcatacatttgcttttcattatcaaaaacatataaaatttctttataaaaattttttctaccatattttaataaagcagcacgaatcaatgttcctgatcccatataaccgtcatttatgttatcggtgctatgcgcaccgatatattcctttgaattaattatatttgttattttataaattatataatacctatgcatgttttactcgttttaccatttctttcattttacctaaattccatggaacaacgctaggagttccaagatatccgcatgttcttcttatggtgttcatctttttaggatcagtttctccacaaatagaacaaacaaatccgttttcagtaggagtcatttcatgggtacttccacatgtaaaacatttatctactggcatattaacaccaaaataatctaaatgttgtgcagcataatcccatacggcctcaagaccctttaagttatttttcatatcaggaagttcaacataagaaatgtgaccacctgtcgcaatgaaatgatatggcgcttcacgagaaatcttttcaaacggagtaatattttcttctactgaaacgtggaaactgttagtgtaccagcctttatcagtaacatcttttacgcttccatatttttctgtatcgagtttacagaagcgatagcaaaggttttcagcaggagtcgaatataaactaaaagcaaatccggttctttcagtccactgtttaagatgagcattcatcttagttaaaatttctcgtccaatatcacgaccgacaagaatattcaattcgtgaataccaatgtatcctaaagacactgaacttctaccgtttttaaataactcaattatgtcgtcatcaggtttaagacggaccccgaatgcaccttcttggtaaagaataggagcaacagtcgctttaactccttttaaggaactaattctacacatcaatgcttcaaaacacagatccattcgttcattaaatagctcaacaaatttctgttcattgaattgtgttccaatataagaatctaacgcgatacgaggaagattcagtgttacaacaccgagattattacgtccatcaagaatttcattgccagtcgaatctttccacacactcaagaaactacgacaacccattggagaaacaggaatagatgagccggtgatagctttattgttcttagctgaaataatatcaggatacattcttttgcttgcgcactctagagcaagctgtttaatatcatagttcggatcgtctttataaagattaacaccttcttcaacaaacataacaagcttagggaaaataggagttattccatcacgaccaagacctttaatacgatttttcagaattgctttctgaatcattcgttcagtccagtcagttcccgtaccaaatgtaattgttacaaaaggcgtttgtccgtttgaactaaagagagtatttacttcatattcataagcttggaatgcatcgtatacatctttttctgttttagattgagcataattcaatgcatcagcgatttgccatttttctgcatcctcagtatgttttgcataggtgcgtttaacataaggagaaagtactttatctacattagcaaaagtcgttccgccgtattggtgggaagcaacctgtgcagtaatttgtgccataattgcagtagcaacgccaattgatttaggagtttcaatctgcgcattacctagcttaaatccgttctcaagcattccttttaaatctactaaacaacaattagtaaatggaagagcaggggaataatcaatatcgtggaaatggataattccgctttcatgcgctttcataataaaagacgggaccatatttttggcaatgtgtttagacacaataccagccataaggtcccgttgagttggaaaaacacgagaatctttattagcattctcgtttaaaaggtctttattagttttatgaattaatccttcaatttctttttcaattgtcattttaaactctttctaagctgcttcttaaatgaagctattaattgtgttttggtgtcagattcattatattcaaatcctctttgaagcatctcggccatcatttcctcttttcctaaacgagaaaattcctttgatttatctccaacaaagttagggtgaatattattttgggtgtaatcggattttaaataagtaagtaaattttctaaccattcaagataatcaacaccttgtccctttaagccagaacgattaaatttatgcttcatttgaccttctgcggcattacagagattacaaagcaatccacgtacctttcctgcttttggtccatttaattcatggtcatggtcaagatgattagcttgaacatcaggatttagttctcgttggcaaattaagcatttaccgttttgtgcatcataaaatttctgtttttcttctttatataatttgccagtcaataacataataaacccttaccttaaatagataagggtatttattattttcaagtattgtaaaacatttgatgcaatcgcttatattgctgaatcattcggtcagaaaaagaaatttgagtttcaagccattcaatgtattctgcggcagcttgcatcaggttaccttcatagccatcgttattttcttgtgcagctaatttagctaatgcgtatgaaatacgttcaccttgaaaatcggctttaggcttctgaacaacttgattagttcgctctacaacttcttcaatttcgccattttcgactgattcagtattccacaaacaccaatacgtaattggcttatcgtagatgttaataatctttccatcagaaagttcaatttcaataattccagtatcaggttctatatcatcttcacattcttttgcaagttcacgaactttaaagacagtacctgcactaagttccggccagtaattacacagccctgtatcagcacgattaattctaaaccacttatctactgtaatcatgtcccatctccatatcaattaagtcatttatcgttggttcattatacaccgtttcttcatcagtgtaaaccggttcttccggctctggctctacagtttcccatctagccgcccaccaaggttttatagcgtaatccattctcttactgtctgagttactacacgttctcgaagctcaaccagttcaacggtaggaactgcataataccaatcagaatgataagaacctgaccgagattcatttaccgctacatgtacattatgttttggactaaagtaaacacactgacgatattgacatttaccatcttgcacccagtcttctatttcgacaggtttaagataatcggaaaaatcgaaatcatagttttccgaaaatgcatcatggtcttcaataatttcgctcagaactgcatcaacatctaatttattttcaatagtcatttttcaccaattaatttcgcaatttattaagttcttcataatcaatccaggattctaatcctgatggcaaatcagattcaatttcccaaagaagttcttcaattttatgaagacgatctagttcttcagcaggaatagtaaccattgacggagctcttgctacattaatatcgtaaatcatatttaccccagtttgaccatacaatcgccgtatttccacttagaaatagacttttcaccgttagaataataaacttcaagtttagcacgattatttttaatttgaataacctttgctgtcatcaaagttccatacccataataaactgcaacttcatcacctacatataccgcgcttccgcggtaatcgtgaatatagtcagttccttcgagcatcatttaaaatattctcgcagttggtcaaatccaccaatatgacttccatcaggagcaaatacttgtggcattgtcaaaccaatttgagtatcacggcctagtttagtcagaagctcagcgattttttcatcatcaaaaacacctttttccggcataatgttgataaattcaaacggctgtttcttcacagtcaaaagacgttttgcattatcgcaatacacacatttatggatgttgctatcataaccatatactttaaacatattattccttaattcctagtacttgtttaaaagtctcgtcgtaatcaagactttggcccgtttgttctttatgtttgtatataatatcacttacttctgatagcatatttttatatgaacgagttaaagcagatttaagcacgctgtatctatcaggaaatttaccatgttcattataataagctattgctaattcacggactgccttttcagcagtctccatatattctttacgcttggtcatttttaatccaaaatattattaggcattggttgaacactcacaagttctttaaagaactcagtagagtcaggcaatttaaccatttccggagcatgcttactgaatttatgtttacattgacggcatttatattcaagctctggtttacgccagttaatcaattgaacttgttcagtaccgcattcagggcaattaggaacgtttttagaagctctttcacgtcgttcaaccatagccataatagcatcccatgctggaggtttaaaatctaaatcgtcgcagccgtgaatctttccacgcatttccaaatcgtcttcttcaccagccataataattttaattagactagaattacttgaagctgcaatgtcttctaataaacgctttttcatttcaatacctcaatagcattacgtaaaccatttgcttttgcattaagagcttttaacaatttggtgtgttctgcaatttgggcttcaacttcaatcaaacgggcattgagatattcacgttcttcactcaaattatcaaccttttctactttaggctcttttacaactgtcttatatgtattagggttcttcagtttaattagaatgcgtgaactgtataacattgaaccattatcttcggtttcgtcatacatttccactacgtccataatttttaacatcatgcggagtttataagacaacgaacgaatagttttgttgtgcttattaatttctttagctgtcatggtgccaagattacgcgagtaataataaggaacctggatattaattaatactgatgaaccacctggcttgtgtgttacttcatcagcaataacccagtccttaacatgaactgtatttgtacggtcatcgcccgcggtaaatagtttgcgagcatgcttaaaaagcatattcacttggtcattgaattgacaagcaaatttatcagcaaatttagtttcaggaatggtagaaaaccaatcagccaaatgagtctttttaacatcattaacaatagtaaattcaacaaaatcggttatagatgtctcagatttaatgaagctcggcttcataaagtttttaatgttctcatgagctacagtagaagataacatacgagaacgtttaaaccattcaagcaaattgcctaacgaatgagaataagcgttttgagtatctttacagatatgattttcctgaccaacatattgaaggaaatcacgaagaatattattgattactgctctgtgcccgatctgataattacggtgtttagtaataagactgtcaaaataatcaatataatgtttacgagttttcatgttcttctcacttggttaatgatttatactccgagccatccttggctttaaattttacttaattaactgtaaagcctgttctaaacgatcaagacgattaacagattcttcccaaatccttttagcctgctcatattctttctgcgctttattagaaatttctagaacttctttataagctttttctaatgcaataacttctggacgaatttctaccggttcaggtgaatcatcaagattattcattagttcctcaagggtagtttcttctttaggagtattcacaatttcctcacatttttgttgataaatttctttatcagtaggtgaataagcacatttcacttcacgaagactaattacaattttatatccttcccatccgcatatattcttaaaaggatatgtatgaatattttctactgtttccatacaaagtaatgcagtctctaactgacgagttatagtgctagcaattgagaaaaatttattaatattcttttggttagcgtttggtgtaaaaaatccataattcacaaaaatagctactttattttcatcaagctcatattcttttacgataatcatatcagaagccaaaggatgaatttgacgataatcgccataacataatttagaagctgattttagaatttgtcctttgaaaagtctgaaattactaatccaacggcgagtaaaaatattctcagggtcttctttattaagatgataagaattaacatcaccgaaccaattatatcctactacatctttggttcgtttaatttctttcccaaaattaccaagaatatcccgattaaccaaatatgaaagaagacgagactctttaaaggttttcttgataacatctttatctacacggctagaaattttacgaatttcatgaataaatttagcagaagaaacaatacttgcatcaacactattgagccactgattgataatagaaagaacgctattttggccaaacatcggtatagctttatcatcaataactctattgaatgatttaatatattcgttgcgagtcatattaatctcctcagtagaaagtaagaacattataccacatccttgtggcgaagtaaactagtttagtgcatttagtgcgttgttcaatttagaacgttgcttcgtgagattttttactttttcttgagctttttctagcatcttttcagcttctaacgcttcattagttgctttaacgagttcatcatctactgccttgatagacttctcaatcgcatccgcgtgccatttttcaacaggtttaagactaggattttcaacaggaagaaaattcactttattaaatttccatgcatctttattacctgaactatacatccaaaatttaggatcgtttgatgagcaattagataaatttaagttatcttgtacttcctgctttttctcttgcgtgacttcgtcttttctcaaaaaatcatatttaaatgaaacgatcatatcaagttcatatgttgttgtatgttcccaatttcgctcaaaacgaggtaaaatcttagattgaacagcagcaacaacatccatatacttaaatgcttctgtcagctgtgatttaagacattcacaaattgaacgagaatttttagtattaggtttaaagctaattcgtgcagttctattattttctttagatggtcttacttccatttgaagagtataaccatcaaatttcagattctttaagttaatatcagaaccttttaatcgactagcagtagacaaaatttgctttaattgtttacggaatagagcaataaatctccattcaagacgataatgatttggattaaaaaatcctgttgataaatcaaccttactctgaccaacgccttgaacaaatagaggatttttataatcaatagttttacagaaatcggtgagctgctcacgagcagtcatttgtgtaatatatcccgctttactaaaatgacgtaaccattcactgctattcatatacttaaagtgaatggaactattaactctatcagggtctaaattattttggcacaaaaatgtcataacattacgggtatagctggcattacgaaccatatcttcaatttgagaacgagttttcatggtgttccttaagatttaagtaaatcaataattttaattaatttttcacgctcagatttagctttactactcaatccagatagtctaaagatttcatcgtcatattgttgaatagaaatatttagctcttctatttgtttactgaaataatcaatctgctcggaatgtttttcgttactacgaactggaacggggtttataggcaatttagttaaactggattcatccgggcgataaattaaaatacaacttgaaccaatcgggcatttagcaccagacacatattctaatgttccggcttcttttaaaacttcaaaagctaaacagagatgatgccccatattaacataatctgtagagcgagctctgacgtaataatcatcgccgcgaatactaaatttaaagcatttaaggtcttctgtattattggtcttaaaaatcatttgtttatctagacctttagctaatcgagcgcctaatgctaataatcgtcgttgattttcccacaaatctgcgatcatttggtcaaatgataatttcggcattagtcgaccgtaaagatcatagcctttattataattgcgaagaatttcacttgcattaatacgagacaatgctccaattttattaagggctttcatgatgcgattagataaacccattccagacccgtttgttcgcttcaaatgtttttctaatccaaatccaatatcaactttaaacttatctaaaatttctgcatgaacatctctgtcaataacattcaaatccaaagttgggttaaatctatgaaaaaatttatctggctctccacgacgaagtacagtccattcattcaattttttattaactaaagatttaattactgcattgacattattaattactactgacatattttcctcactcaatttcaattttactaaatacgcagaatatgatggaaaagactatataagcaccgcatacagattgaactaataccattccaaagaaccaaacaatattatcaaacaatgtctgttttacgtcgaaaggacgtaaacttacagtaatattatcgcctttttctattgatgaatacatctctggtgaaatatattcgctaaatctataaccgtctttgagttcatatacagcaataaacgataaactagacccctttccttgagttcctgtaagggtattaactacagtaacatcataatctttataatgcatataatcattaattgcgtaataaccatatgcaactactacacataaacaacatatcaataaattcaatcttttaattatcaactgtttcataataatctcaattaaaagggcttagaaccattataccatccttggtataaagcggttatgcgagtaccgtctttaaccgttcttcaaacttccgaagagtattctggcgttcagctctttgctttttgtaagtttcaatacgctctgaaatgagagtgtatcgttcatttactgattctttcataaaatcaggaatttcacgagaagctttaatctcgtcaaatttatcaataacagcttgctcttcagcaattaagttatcatacatcaaaatatctttcttgatgaactcaatatcttcttgagttacacgagataatttagatgctttatcctttttgtactgttcgttagtatcacgagaccagtgtaatgtacaatttttattcgtatttttgtaaatttctacaataccaatctcatcgataataacgatccaattccaacgagatttgtaaatttgtcctccatcaaccgtgatttcacctccgattgagatgtcattaaagaacttgctttgtgcttctgatttaaatttaccatcattgtaatttaccaggttgaaaatatctttagcgttcattttctgttcctccgtagttgatagttgtatagtaccacagaggaacggtcttgtaaacaactaaaagaaacttctttcacaattttttccactgaaccacgcgctcactgctttcttagtctcaggagcagtgttatccataaaccattcaaaggcagcctttttatgattctggagggcttctcgggctttaatctgctcacggtctattaacactaacatatgagcctttcttgtcaccatgggcttcttatgattttttgaatactcccagtcatttgtccatcgcattgtcgttgcgaattgaaatacagcttctttaattttagtttcgtaaatttcacgagcctttgagtataacatcattacctccatttaccagtttaattctagtcatctttttgatggcagtccatataatctatttctgaactgcctttttatcttagaagtcctcttatgaattatttcagaagagtaacctcagcaatttcttcccaaccgtttttgtctgtcataataaagtcagcaagataaagagcagtacgcagtgaaacattgcgtaaacgattaacattgactttcatccatgataatgctttataagtttcttcatcagaaagaccgcgcttttgcatcatgtcagttgaaagaataacatcttcaaccctgaccataatttcttcattagtgtgaacacccaaatccaaataaactgagcgggacactaatgcttgtaaatgtggagcaagtttagtaccacggtctaattcgcggtcaatgtcaacgtttgtgataaaaacaatcgttcctttaaattcaaactcacgctcaatgcctttttcttctaagtaagaagatgcggtgctccagcagactttacgggtctctccagtgtccagagcagctttcagaagattaagaatgtccatatcagagaaaacatccacatcatcaatcaaaaggacagaattctcttcacgattattccaaagctgctcataaagaccaataccggagattttaccattaatgcttttatattcaatgtatccaatatcatttgctttatttaaagctttatctaaagaatacgttttaccaatacctgctgctcctgagataattaatgaacgaatatttccattaataataccattcgtcatcattcccataacattaaatcttttattaatgcgggttttcatatcttcatacgattctttaacttcttcaacttttacaccatcatatgaaatatctgatttgtaaacccaaacaccgcgacgtttaccgtcaatttcaacaaaaactttaccatctccttgcgcatctaccggagcattatctgggaaccattcgcctaagagctcaaaagttccagagatttctttaccgaagtagatacccttattgatagttacagttttcattttattctccaaatccgtatcagttgatagttgtatagtaccataaagctttatgcttgtaaacagttttgtgaaaaatttttgaaataaaaaagggagcccgaaggctccctatcatttataataacttcggtggttttcaagatagaccttctcaaggaagtcatcccagaaactcatgtctactgttttaggcataccattcttagaagcttcagtagatgctgcttctacttgatcgaccacatcttccaaaaactcttgaactgttttaaatggatgtttacccaacttcacgtcgagaataaatggagcatcttggagtggataaatcaagtcgccagttttgtaaatttccaatagttgaagtccaccacgacaagcatgacttagtgctttccaatcaataccttcattagcttcggccttacgagcacgttcaccatattcagcatctaatttgttcagtgactgcttaagctcaataagagaaagcgttgtctgatatttacgacccagcactgtatagaacgtttgtggacctgttttctcatgattatggaacacccattcacagaattcgttttccggaagacgatgcttaatatcttcaactttagtacgacgctgcttaatggaaccgtcttcttggtaatcaacccattgctcagggatttgattaactactttcaatacatcacgtaatgcagccaaacgagaacccttgacgccgtatttagaagcttgcttgcggacatatcctaaataggatttcatgttagtcgtataaaaacgagaacggttgtcttgaataaacttccacacatcaggcaaatcagatttaaccactagttcaggtggagtgtgaagcatatccaatgctacagtttcaccatctgctgctaatttaaagaaatatttaagactgtatagttcatggtcaatatcatctttagtgtttttagatgatgtgttgttagtgtttttactcatgtgctctttgacatttccgacaagaatatcgcgagcaggaggaacaaagatttctttaaaatctacatcagattctggggtagaagttccataaagatgactaccaaaatagcttttcattactgttttcatcattcagccttatattcaataacaggacatactttagctttacgagcttttaaaaattcaacgataatcgatttcttgggttgaataggaggtaaacctttatttttcctatcaatgttttctacgtgtaaagcataatcctttttccatttataatctttatatttttcacgcaaatgtacaggaataacaaatgaaccaataataagtaaaacaaccaaaagcgcaagtataaatgctgatggaagcaaagtccataaactaccaaaaataagccaacgctgtaaactttctgcacaaataattgttagccctacgagtatagcacacccaaaaatagaaacgaaaaatgtagggataacaatagaccaaaaatatgcgcatagtgtcttaggtcgttgccattcatcgttaaacaatttgaataatttatagtgccaagagttttcattaataatcataactatcctttcattgaaggcgtaacagttgttaaatacttaatcatagcttcagcttctgattttgatagtgaaatttcttcaccgttttggcgaatagaaacaaaatctggatgacgatcaccaccagcttttaaaacacatataagtatcagcttcgccttcaatatttgaaatgattgaagcagttccacatgaatgcggtttttgataaatcaatacagcttttcttccaccatttgactgttcataggcttttaatacatcaagcaaatcagttcttttatcaatagctaagatgttattttcatcttcaatattaaatccttcggatacttcataaagagttacccataaatcaccgatgtcaataacagcatttacttttccacggctttcaagagtatgacaaattttcttgatttcgtcataactcattttaataatatcatctccttgactaaggaagatgtcatttttaaattcaacacgaattaaaccacttccacttgaaataaacatatttcctcactttgaaatcataattggaatgacagaatcaagataagtctttagcgcaatagcttcgtctttggtaaatgtgacaatatgtgctcgaaaatcgtcaatttgacgaatagatactacatctccctcttcatagcattttgacacatttaaaatagtttcatcattctgattgcaagcgttagtaataatagcattgcaatttttaaaccattttaaactgtgttttctttcattagaataataaaaatatttaatcttatctataaaactatcccaatggataactgataagcatattgactcgctttcaatattaaatcctgggcatgaagaataaaaatgaattttatgctcatcattaatgcttacaattttatcagtataaggattttcaatttgggttaaatgaatgatttcactaggcgtaaaatatagcatatcgtcttcttgtgtcaaacgatacatattatttactttttctatagccaattcaccaaaaagtgaactaacttctaatactaatcgtttcatattaatcctttttattggcacgaatttgttctaaaattttagagtattcctttgtatcagatttacgtacaatcgatacactatacggcatactatcggtgtcttttataaagcgttccaaatgacactctaataaaatttctggattataaatcgtgtacatcaaattacctgttgctccacgatattgacagatttctactgattgaacaccattccataattttgttaagaccaaatcacctacttctaatttaggaaagcccatgttattcaccaattaaagtttcaatataagaatcaagatttactttagcttcttccataagagttttgtatttaatcttgttagcatgtccggagaaagctgattcatcaataactgttgatgtatgaacagctctactatacgtctcaattaattctcttaatttaaaagcctgctcacttgtcattacatactcctttgaatcatatcaataatattgttcaccagattataggtaaacattgggtaattatattgaatcatcacatatataacaaacaaaactttcattctcttctccttgacagttgacaagattactataccataaccttgccaacttgtaaaccgttaaatgttgttttcaataaaattctgaagctttgtgtgagcatcaaccatgattttcatttcttcctttgcgaaagctgtacctctttcccgagcagaatactcatagtcagaaactgcattagcatattcttcaattagcttcattaaaaacatctgcttttcagttttcattattccacctaatcatttcaagatattgaactaacttagctttagatttatccaaatcctttttagctgcttctataccgtcgtatgaatatccttcacaatgctcaactgctaattgatatgaatctatttcaatatcacgtgctaatttaatgattttttcaaactgttcgcgtgttagcataattaaactctcgtattatgatcgataatttcatcaagaaacatatctaacgcttctaaagcattatcaactttagtttcaaagtctttaatgcctttattcgaaatacccgatgaataccaagcaaagtcaatcagctcttcatctgctttacgaattgaagccactaattccttgattttatctgcttgctctatactaatcattattccaccacatatgacagagagaatattgcacacgccatatgcgttgcagcttcatcacacatattataacgtttcttcaaaacttcaacaagttcttcactagtaacttcatccatgttgacgaaaaaatcaccattaatgatgacgtagatatttccttcttgattgagtgcttcaattttcatgatgttctcctctttatccgatagttgtatagtaccacagctcaaacggaaagtaaaccggtaaaatgaaaaaagtctcccgaaggagactaatgttattcgagggaaagaagatacttactctggtaaaacattccagtaatatcatctatcgtgctttggatggctggaggcatttctttataaatgctgttagattggtctagtatgcgatcaatcattttaattgtgtcggtaggaagtttactggcatctggaattgaaggtgtgtattttctaccagaataccccaaatattgctcaccaaatttatcaatcaaatctggcaactcggagaaaataaaatcgtatgctttgtgtctagcataacttttagtttcaaaatgtgcagaatgaaaataagcttgtgcagccattaataaacctaagtattcatccgcctttgaaggttttccactttgtgaaaagtcgctgaatttcattcagtctccaatttaatgttcataattctagcgtatgattgtgccatctccgcgcctcgctctatacattcaaaatcagaagagcacgggtcatttttataggtcgttctcataaaactatagaattgttcagacgattctacgcttttattttcaaaaagcatataaacgtgcctaataccagattccataaatttatcaaaatgaggatcgacattcgcttcaatcgatggagataaaacaaatgacaatcctagcatggcaaatagtgccgttgcttttaaggccataaaggcctcctatcatttttgtcctgtatttactttatgccgatgcacggccttaactttatcaaggtatttttcaaaatttcgcaatctagtatagtctgccggagattggttgagtgatacttctcgacgcaaagctgaaataatatttccaacttccctacgaatttcatctaattgaagcacagtaagattgcgaagttgcttttcagttaattgtagcatatatacccctttagttagataaacctatttataacttttgcactaaccgagctttttagttaattcattccaatgttttctacacaaagaaacataaatttcatcaccaatacagatttgattaccttctttaactggtgttccatcttccattaatcgagctgtcataatcgcttttttaccacaatgacaaactgcttttagttcaataagtttatctgcaatcgctaaaagttctttagaaccttcaaacaattttccagcgaaatcagtccttaatccataagccataacaggaacattatatgtatcaacaattcgacttaattgatgcacttgttcagtttttaaaaactgagcttcatctacaaatacgcaatgaatatctttttgtgcttcagcccatttatagaactcgaaaatatccatatcatctgtaataatattcgcttcctgtttaattccaatgcgagaaacaacttcacagacagaatcgcgagtatcaatagcaggcttaagaactaatacactcattccacgttctttataattatgtgcagcagtcaaaagagaagcagattttccagcattcattgctgcataagtaaaaattaaactcgccatatcaccttcttaaagcgtattcacataagctattaattcattttctttcttatcaaaccgatcagcaaattcttcctgctgttcgggagatagcgggccgtattcatcataaaaagtgtttgcttctatatgctcatctagaagttcatggataagctcaaacaatttatctttttgttctttactcagactcatatattaatttccaggagttttaaaataattcgcttttgcttaaatatttccatagttaaatgaccagtatctttttgaccgattccaatggcaaaacctttattaacagcgagttcaattaaattatcaagctcacgtaacacttcgtattgtaactcaaaactattcattttggtttaccttctttaacgaaatcaggataaggataaaatcctgaataaaatccttcacctttatgattgatgcatcctttattagaacaatagcaccaataatcgaaatcacaagccatttcatcattacataaagcaaaaacaacaggccatttacacttttcacaatgggcatttttaagaatactagtttggctcataaccatgtaacctttaagcaatattcttctacatgttgtttacgacctttcttatcaataaaggtatattcaacgaatgttccaatgtagtctttatctacatcatgtggactattaattggacatttagtacggcaaatgcgttcccattgacgaataatttccactttgtttttaggatcaaacggatgtgggtaatgtactttcataatccaccactattaaatcaatatcaggagtaaacatgtcgattaatttagaaaccttatcccaatcgccgccagcaataccacaacctatgcgtggaatgtaaattactggtttaaacaaaagggtttctgcctgtagatttaattctatcatgcagtttactaaagcaccataatcaagattaggacctggttcgtattgcgtatacaggttatagcatataccaaaaccattaggtttatgtttaaaaacaatagacatatcgcctaatttatcacgagaaccgtactcagtagtggttttatctatttctaaaattttgggataggctcttgctaattgaccagctacacctgaacccatagtatgaaaacaattgcacccgtgcgcaataatattaccttgaagaaatagggcgacaatatcgcccttgatatattttacaatcatctagtactcaatcctcgattataagaatctaccaaacggtcaaccattgaatgacaagcggctttatctttctcctccgcaactgaacattctaaggtattccactttttagcatatcgttttaacaatgtatcatttttgtatctgcttgatttatctctttctccgtctttatatgcatatattaatttctgcgcaaattcagcttggcatgctttatttttcccgcaataatccgctgcagtacggtttacatactctctaatttcagtatatgatgtatctgctaacgcagaaaatgaaattaatcctatacataaaaccaaaattttagtcatttactatttccaaaagtttattatttttaaggtaattagccttttctaggacttcagaagcatatttagaacctgctttaacattccatcccgaattataagaggatattgcttttcttatatcgcccttatgtatatttaaccaataagaaagttcaatgtacgcccaggaagctgaattggaccgtttattcaacattctttttatttcagcatcggtcatattataaccaagttccttaactcttgctcgcatagtaggcaaataattttggaacattccgtaggcgtgatgctttggtttagattttaaattaactccgccagagctttcttgccataaaatagcagccattatatgacctaatccgctcttgtggatatttttgtgtgttttatattttccatccttagaaaattgttccccgaattgatacgcgtaacgcatgttatcgagttggacattactgaaagtatgctcggagctatgtgccatcattgaaatggccaatagaccagcgagtagtgcttttctcatgcttacctcattgagttttaattactgctttagaagcctttcctggtaaacgacgactgttgataattgccatcctgcattgaagtgacgggtttttgaacttctcattaggcttacaaaccgtaaatccaagccaaagatttccatctgtgatttctaaacgtccaggacgatattcaaccccatcaataaaatcctcgtcaatgtcaggacgcggaggcatactcaggaattcattaacttctaaaacatggtcttttattttatggaataattcaaaaacatatgtctcatcaatctcccgttgaattgcacgatcaagaagatgttgagaatattttagatgaaacgatgagactcctgctgcttttgatgcctcacgaatctcattgttaatttgacgaaactccgactcaaagtgacgacgaagcttatttcgacggataaaaacttctgtattgatagtcatgttattctcctcttaactgataggaaaattataccacagtcaagaggaaaagtaaacagttattctttaaatctaatcaatttattcatagactttgaaacttctgcacgaacctcatgcaagtttttaagctgttcaagacgctgttcatagtaagcaatttcatcttcttcgagacagtcctgtgaatcttctttaagatagcgtgcatagtcctggaaagctttacggactacttcctggaagtcatcaagactttgaattttcttaggagcaacagatacacgacgaggggcagtataatactcataaccaaaccctgcgcttaattgagccattagtatttttcctctggttggaacactgcacgacaagcccacatactggcttctttgagtttcgttttagcaatagttaactgatcgaggctttcggcgtaattcttcgcgagttcatcatcttcacagctatcaaatgcttcccaaaattcatcgtataaagcatcaaagataagtcctaaacgaacttcagcgtctttaatagcatttactttaccgattttttcgtcggtatgtggcttataacctttaatatcttcaatcatatttgacttcctcaccagtacataaatcgtattcaactaaacgaataggttcatgaatgccatatccctgaacagaaatttctgtagtaggataaattccatcaatatcacccatattccacgcttcgttaaattgctgttcgcctgaattactaaaccactcggcgaaagcatttagcacatctttagaaccttcaataattatctttgccattataagctctcagtaaaggtacgagcaataacgtcgcgctgctgttccggagtcagagagttaaagcgaactgcataaccggatacacggatggtcagctgcggatatttttccggatgcttaactgcatcttccagagtttcacgacgcagaacgttaacgttcaggtgttgaccaccttcaattttaactgtaggctgtggctcaatttcaatttcacgagcatgcaaaccgtagaaaatttctgggtctacaaaagagtcctctttaaaggttttagagacaataattcgtgcttgaataccatcttcaaaataaatagtacctttatgtgtgccttcaagaatttgatatgctttcatataaacctcaattagaaaataaatttatccaagattgttctttaattaaaaatggctcagaatcatatgccattaaactttgggtgattagtcctttaaaaggtccatcaataaattccatggtaaaatatggaattttattcattagccgtgcattaggagcagtgcacaaaactctgcatcctttgaatacacctttttgtaatttgtattgcttgggataaaattcgctcaaaatgttattatttgctaaaatttcaaaatgattcaccaatttatttttaatagtttttggcgaaaaataaagatattcgaaaagctgagtgtctgtcatcattgcattccgattacgaaaaactgtggacgagtaataccaccaatgcaacatttactattacagcagtagtgtacagtgtcaatatggacactataaatcttatccatatcaggagatttgacaggctcgtcaattatatacaaaattcgcgaaagcgataaacctctgaacttgcttcctttattaccaataaaactgcgcacagaatcagtaaataaacgaaaacgtatatcatcattagaataacgcgaaaattcctttttaatgttatttgcagaaattttagcgtaagctgaagtgttagaaagaacaataactgttccgccatcatacagccaattagcagcaaagttagtcacagcaattgatttaccagattgacgtccaccatctatacgaagtgtacaatattctttaaataaatgcgacgaatcaggtacataaaatccactattacaaatttcttctactctagcatcagaatggtgtgtaaaagcattcatcagggatagataaggaccagttaaaaatgttctcatttcttctctctaagtttgggccattccgtggcgcatgaattgtccatttctgtatttacccattaccgcactcaggctcgaccttattacaggttggcgggaatccctcatagaatcatgaggtccaggttgttcccatattatttgaacgatttaacgtactgaatagaacctttactattcacaaaggcaattttaccatttttattatacatggtagcagtacgttgatagccataagtttgtttaccagattgataaccaactaatgcgaaattatcttcacccattttattctgtttagcgcgaatgcgttcatgaccatgcgccataagaaccttagcatcaccagttgcaatggatcgacgagttttttcatcttcaactgcattaacaaagtcgtcaaatgaatcaaatttagcatgagatttattatacagttttccatctactgcataattatatccctgtacatccatctcaacttctgtaccatcatccaatacagcagtgattttttgaccttttttaaatttcaaaagatcagtaaaagattcagcaataatttgagaattaatagctgcttcagtgataaattcttgatatgttttcatatgtttcctttaaatgtaaatatttttaccgtaatacttataccaatgtggtttcattaaaattttttcatcaagtcgttgttgactcaatttaatagctgatttgcatggattataatcatttttccattctactggaatatcgctgatgtcaggaacttcagtatcttttatactgaacccgcgttttaagcattccgttataatgtccgattgacgctttcgcaaaaattctaacttatcgtaaaagaaagtaacatgaccagaacctaaaataaatttagaagatattttaaaatctttaacgcgcttaccgtttgccacatgcttacgaactataccaaaaacacgcggcaattcacggtattctgcgattaaatgttgatcagcaagttcagatactaaagtcaaattaatacgagtcattttatccctccaagtaactgtgaatatactatcacaattctaggagaaagtaaacaactttatagatttttatacgcgtcccaagtgccagttctaaacgttgcaatgactcgttttgcgcgattaggtgtttgattataccatctacttttagctaagttaactgctgcttcatcccagcgtttttgttgaagcatacgcaaagagttagtgaatccagctacgccagtttctcccatttggaaaaccatattaatcaatgcacagcgacgaacagcatcaagagaatcataaactggttttaatttagcatttctcagaattccacgaacagcagtatcaacatcctgattaaagagtttttcagcctcatcttttgtaattacaccattgcaattacgtccaatagctttatctaattcagatttggcaacacttagtgatggacttttagtaagcaaatgaccaatgccaatagtgtaatagccttctgtgtctttatagattttaagtctaagaccttcatctatacgtaacatttcaaatatattcataatacctcctaagtatttatagaaggtatttataaaattaaaagaggttgttcattattcggtaaagtgaaggacccatcacatattgccactgagtacgaggaataagagcaaaagcatccatctctggaatcataacaccatctttattttcaaaataagactcacaatagcaatttctgaacatctcatgctctactggaatcgtataataaaataactgtaagtctttattactagaatatttaaatacacctaggtcttctagaaggtctggattataattgctaaaaccggtctcttctaagcattctctttttgcagcttccagtgcattcaaatcagaactttctacacgcccctttggaatatcccagcgatgtgccatcattccaggcttacgagaaccagtaacccgacccataaataaatctctatcttctgtcataaagataataccagctgatagtgttttcattttaatttcctgcattcagtgataaagttatttaaattttgagcgtatttcttttcatcaaaaatcttttgctgtctgcgtaaacgccatggcatttcaatgaacgtgtaccatatcccagataatattgctgctgtaaaaatattaacaagtatggttaaaagaatccaatctcctattctgtccattggattttttataaaaaagtaaaatacgaatgatgtcacaggaagactaataatataccacagaatcataattttatctgtgaaccattcagcgttcgttaacttagcgcgaccattatgaatacacacgaatttatcatctgttataatagatggcttagctgcttgatatcccattctaaactccctaatcaacaaatttttcatatcttcggaacaaccattccagtcaactctatcaactgaaatgccatcatccccatcatctaaatcataccagcgagtttttaaaatcatttaattttcctacaatcactcacaaactcttccattgattctttttcaatataagacatgtagctattatattcctttaattgtattttgtaatccttttttctttgccaatttattttaaaattatcataatgaaaatataacattgtaccaaagaatgaaaataatgaaatcgctatagtaaaacgaagttcactccaaacctctgttataattactgtgccgtcgatgtttaaaataaaacagtcaattaacaatccaataagactacctgcaagagctgcaaatgctgatacggcaagaattaatagtgcctcaggaaacgaatatttaactttatttagttttggcttttgcatcgtgattccttaacaaatttcataatttcatcaaattcatacatatcaagtttaagctgatgttcttttttaatctttttgcactgggctttccaatcacgtacacgtttacgatagtgtcttccttgataccagtatcctatccaatttataggtactaataaaattggaactacaaatggaagaattagcgttgacgcaaatattgtattagattcaatatcagtcataacgtctataaccattccagcaatcagcagaatcacaaatgatacggctaccacaggacctattaacacatcagtagaaattatctgacgctttaattcatacttcaacggtttacttggaaggtatagtgatggctttgacatattctctacattccttaacaaatttttctagtaataaatcgctttcaaaattgggattttccacaaatttatcaaaaagatcatcaacaatagttaagatattctttttactaagaatacgtttattttcatgcttcgtttcagaatcaactataagagtaaagaaatatttcttgccctgaaattttacagtagtatcaatataaaataaatttgacttttgtaaattacgtttaaaccatgcatcacttaaactataaacgccaagataatcataatcgtcgtttaaataacagaccgtccattcaggagaaacaaaatcagtaaattcaacgtcaaaatcgcatgttaataaatgaattgattcaatactgttaataagtattccaggacgtattaaagactttttacctctagaaaatcctctagaaagactttcatcagtttcatatgaagaaccccaataataattacgtccttctgccatacgtttaagagcatttaataattgatctggaacatcaacctgtctttggaactcttcaaacattgaattgaaatcactttgcattttcattcctacttactccaagtaataggggccgaagccccttatcattatttcagagaattaatatattcctgaacatcggcagaggtagtttcaaccccagaaatattaccattaaaggtttcaactcgggctagagtatcttcaatatcaactttagttagcgctgcaatttcaactacatcatcagcagtactaattccaagggcatttgctgcacgagtttcacggatatattccaatttaactgcaagttcttggcgagcatcatccaattcaactactttcttggcgatttcaattcgcatttcagcataaccatcagctttagtagtcaactgttcagctgttcgacgatatagcaagccgagtttagcatgcattgttacatcttgaccttcagaaagaagcttgcgaatttcacgctcttttgattcggcctgtcgattcttttcgacaataagttcacgaatacgtttttcttcattaatagatttaacagaagcagtttttagatctttaatcttatcaagtagttttgctgccgcagcagtatactgttcttcaacagatagatttttagccatagcagaaccaagtttagtgcgaataaactcaacaattttcttcagtgtgttcatagtatttccttaggttggtataattagataatatcacgtttctaatagattgtaaacttattcttcgtctagctcgtcgataaaggcgtcgatggcctcgacaacggcatcattgatagccaataaaataaaatcatcgtcagtacctttagaagattttaaagcattgatatatgcttggttggcgagttcccaagcctttttaaaataaggagtttcatcatcggggccaacgaaacgtacgccttcaaagatacggttagcataatccaatacccactgtacaggcatgttttgagaacgttcgttaaactctttaaattccttagattcaaaaagctcttcaggataatcatttctattacaaaaagctttactaaagttacgtttcataatgttttccttgtgatgataagtctatagtaacgccttcatacttagatgtaaactatttcaacatcgccttttgctgttttataaccttcagcccaagatacaaccgagtttttatctgaagattcaaattctggcattgggctttcgccaatgttcacgcagtatgtttcttcattttcgtcgaaccaaataattaatgtagtcatttatttctccgtttctgtatttgttttgataagtctataataacaccgtccttggtgtttgtacacaattatttcatattattgaaatattcttctgcgatttcatcgttatcatggtaaactttagaagacagtttaacataaccttcagcagtgaacatgttaatcacaacctttacagtataccactgaccatcttcattacccattactgcgtaagtttcaaacatcggatggtcaggaccgataactttaatatcattcactgtacgaccgaaatcttctgaaacacatttcataaagaagttgaacagctcaccgtaattatccatttcattctccaagttgttttctgtatcagtagttgatattgatatagtaccatggaaggacaaggatgtaaaccattttgtgaaaaaatttttaaaaagttttggggaattctagggcaggaaggggaaatcaaaggataggataatatattataaagggtagaaactaaatgatgtctagagaggcctggaaaggcctagataccaaaaagccccaacctttcggtcggggctaagaatgttatttgatttgtttagcagaccaaatgcggtctttaataattttttggatgtcttcaacatactcaagagagtgaacatgtgggttatctttgaaactataagcacgagctagcttttggccttcagttttgattactaaaagctctttaaggatagcttcatatttggagataattcctttaacgatatttttctcttgtgtgactttaggatctgctttaggagcaggtttacctgaagcctttgcaaaagcagcgccagtagcaactaaacttttccaggccatactaacagcattccccgtaaatccttctgctttcatgtcgcgagcaaattggaatcgtgattcatcagaagcatctttataggaatatttacccgctgcaatggctgcttttgcgacagcttgaatttcggtgctagacgcttcatttaacaccgcttcatttaaaaattgagtatatgatttcatcttatttcctgttttaatttgtagatttaatatacttatttatactaaaaagccccaacctttcggctggggctaagccttgcggcaaccttgtcggggttccacctgctaaggcaagtgtttgtacgaaacgccgggattcgaacccggttatcaagcagttgacgctactcaatatttttaaaaggccatatctcgaccatatccgaacgttccgtcaaaaacgctactcggcttacggcaaagatatttcctcgaatcgataattcggtgcgccgtttctgctgtgatgtaagagggcatcaataaacgcaaggattattaacgcaattccttactcagggaacatcagtccgacgacttgccggtagcgacccggcttcttgtctggtcgaggcagtagggatcgaacctacgacccaggacttagaaggtccttgctcttccttctgagctatgcctcgtatttggcggacgtgataggattcgaacctataaccaatcgcttaacaggcgatcgctctgccattgagctacacatccaaattggtggggagtggtggagtcgaaccacccgagtcgcaatgacaatgaatttacagtccacaccgctacctctacgggataactcccctaattcataatttggtggccctgggtggaattgaaccaccatctggcgattatgagtcgcttgcttgaaccttccagctacagggccttggtgctgattgacggaatcgaaccgccgaccttctcattacaagtgagttgctctacctactgagctaaatcagcaaaactggcggaggcgataggatttgaacctatgagtcgccggagcgactgccggttttcaagaccggtgcattaaaccactctgccacgcctccagtctccatacaaggatttgaaccttggacctcctgatcccaaatcaggcgctctaccaaactgagctacacggagtaaattaaattggagcggataatgagaatcgaactcacatcatcagattggaagtctgaggtaataccattatacgatatccgcaaatttggtgcgagaagtgggactcgaacccacaaggaaatcattccgcagcattttaagtgctgtgcctttaccaatttgaccattctcgcgctgggaataaaggactcgaacctttgcatcctggaatcaaaatccagtgccttaccaacttggctaattcccaattattaacaaaggctctttagcaagaacccttgatgatagagggtattaatcagtgcggtatgagttaataataacaaataattcttaaagcatatttaccatttatgataatacatatttacgatgcattcaagacccaaaggattcttgaaaatatcatattcaagaggacctttttctgtttcaataaagaaatcaaaatttactgtattaaatttacggtcttccttcactaatttaacttgagaagatgaacggtcaacataaaccttttcaacttcaaaacatgttaaaatgccataatcatcaatcaaggctttagctgcttcttgatcatatttatatccattttcaatggatgatactttagcataaagaatcattatcaaccttcatcaacaatagtatgagtatgggcatttacaatttgccaccaatcaaagcgattagaaccatacatcggtttgttttcattttctttgataatatcacgaagttcatcttcagtagcggctttcgcgattaaatcagcatatccaccacgaggataataattatcacctgcaaaaagtaaaaagtttggtttaatgttattgaactcttcaagagtaataactgttcctgatggtagttgaacaatctctacatatttatatcctaatttttgagcagcatctactgcttcaagcaaagtatcatgagcccatccaatttgacaacctggcttttcagatggattagcctgataatccgcgtacactttatacattctattcacctttagaaattttatccataacgacagcaattaaaccaattaaaaatgctactacaagtgaaaaaacattttctgctgtagttaataatccgcatataaatccaacaaacattgaaaaactaaaagcagaagcagaaattgcaatagcaacatttcgaattaattcacaacgtttcattttattctcctcagtagttgatagggtaatagtatcacaactaaaaccctatgtaaacaactttgtgaaaaatttattacaaaagatttttagcaataattttaagctgagctactgaaatatgcttggctttaaacaaagcagtttcttcagcaggagagataacgattgtagcaccatctttcttagcggaccatccatcacccaggtaaacagtacctttgacttcttcgccatcaaccaggctaatcatcggtttaccttcacgtcctttgtttgctttaataacttcagaagtaagggtcgcttcagtcaaagtagaagcgttagtcgttgaagtgaattcttgataagttttcattttattttcctaaattaataaatgtgttgatggagataatatcacttctccatcatcgtgtaaacaactttgtgaaattattttaaatcgtctgcccaatcgagtttaagaggttctttgtattcacgatctaatacaaccggaatttgtacatcaccgctaaatgataagggcccaacattataagacaatgttatatgcggtgtgtaatcatcaaaatcatgtgtagcacctagtgcccgcgcatacatgtgtctacagcgcagatattcagaatctagcacaagtacaagagtcgatccatcttgtgttttccatacttctaaatgtccagaagaagctacttcaaaacttccgcttgatggaacatacggaacatttactcttgaataacatatggtcgaatgaattttttctctaggaactggattaggaacacgtaaagagcgctgaagttcttccagcgcatcaagtgttaattctgaaaacttagctgctacataaagacccgttgaaaagtctttaaattccattattcttcatcttttgcttcatcagtagattcagcagtaagattcttaacagcttcaacgatttcttcaactttgatagtatcgccagtgatacctactgcacgagcaatttcagccaaagttccttgcagaattttggattcttccatcagacgagccgcctggtcctgcgtatcaagaatgcgagacttcagagttacgatttcagcagacagtttttgttcaatagtttgttcagacattatagtacctttagtgtatttttaattttagaaaaaagttcttcaagagaaccatcgtttgtaattactaaatcgccatcacgaattggcaatccagcttctgtaatatgagtatcattggatttttgaccaggacgaactacatgaattactgtagcacccatcgccctagccgcatccatttcatgatcttgacgagtatcaggaacgatataataatcataacctgagttaaatttatcaagataatctaaagcaaataattttacccaatacatgcggtcgaagttattaacaatcaaatccgtacctagggcttgcatcagacgacggactgaccattgatcttcaatattatttataacgtcaataatcttgttaaatgctacgaaattaactgattcttgtccttcgtcatcaaaaacaaacacgcctttaattgggcttttactattaagatagcaaaatgcttgttccataatcgtgattacttctgatttagtcagatttaaattagtctcacgatcatagtcaattccttcaaactctttacgagttaagcaaggatagtcagtatttgctgcaaatacaccccatgcataagccaatgcatctttaataggaccagcaagttgatatttaactgcagaataattattcatgataaaatctgcagtagtatcttttccactacgctttacaccacttaaaaagattagtttcatatgtttctcctcaaatttagttaagattataacacatgaaactgaagcattaaacttctgctataattttgccatctttttctacttgaaaatacgtataaggaatcgtagctgtacatactaaagccgggtctgaatcttccgtgtagctaaattctacttcagacagatcagaaacccaaggcttataaaaatttattgacatcacgatttcagttttgctattatctaagatgtaaagcgtaatgtactcaggacctgttttttgggcagtattttcacctgtaagatagttactagttcctagcatccattcatacattcctatccacgacttaagttcttcatcaactataaatctcacaatgagtggatcatactcaaatgtaacaccaggtcgttgtgctcgacccaggccaaacggcccagtcacggtatcagtaacaggtattctaattcctggaataggaactgactgagcatttaaagtaaaagcagatgtagtattactatgtggtattgatactacaaagttagttgtatttgcttggttaaaaatttgttgcagagcttgcgacatatattcctcataatgctttataactgttggtggtataatgggtctaagtcccttccattcaattccatttagaacaaacaacagaaaagaatggaagataatagaattaaatatttgaccagactttgtttgcagagaaacgttttccttttgaaacgaactgctgaagtggcatcaacacaacgttcgcccagtctttcggggcgatttcaacaaggctacccataatattaccaggtatatatgccttaatcatttggtctgcacctctaaatcctttcacttgactccaatcaatttttaatttcgttttattagtaatagtaggtgtatttgcatattgctttaaaagctcttctaggaattgctgacgagctttaggtggaatatagtgcaagttcaatccgtacattaaattatgcttacctaaaccaaggtaaattatcaaaggaaatttatcccagtaaggaagagtttccttgtgtttagcatcataagcaaaagcatatattcgtcccggctgcgggcgaacaactttatgtccttttacttgcttaatagtttcagcaaaccactttctagttttattattaattgctgcaccttcattacgaattttatcacgcaatgtttgtctgaatgaatttatcataagcagttgtctttcttgcttattgagtttattcattggttttgattcaagcttttgaatcttttcagccgttttaattcctgaagcatattttgacattgccgaagtaaacgtagagtatttgattcctctttcttcagcaaattgctttcctgtcattccttttgctttggcctttttatattcaagacctatctgaatccatttcttttcgtttaatgattgcttaacctttggaacttggggagtgctttcattaattatttgaaaaatagccattatgcccccttaaagccaagagctcgtaatccatcttctgttagaattctaaattttattccacgcttttcagctaaagcttgcgctgctttccatttgtcagtattaactgaatatgtataaatttcattcataaatcttttcttcgctgcagttgttagatgtgctggtttaactggtggttgtgtttcttttttaggctttatttcaataaaaaattcttgtccagaagaatctttcatccaaatatccatgaagtatctacgttttttcccttctgcattacaaaaataaggaattactgctgtttcactaccccatgcaataatttctggatttttatctaaccattcaaaaaagaatttttcccaatttgatctatacgtaatttttttagggtcacctctatattttgatatatttttaggaacccattttccagaatatgccattggattctccttataaatagataatatatttataaacaggagggcccatgctctttacattttttgatccgattgaatatgcggccaaaacggtgaataaaaacgcgccgactattcctatgacagatatttttagaaactataaagactatttcaaacgtgctcttgcgggataccgcttacgtacttattatattaaaggttcaccacgcccggaagaattagcaaatgctatatatggaaatccgcagttgtattgggttttattgatgtgtaatgataattatgatccgtattatggatggattacttcgcaagaagctgcttatcaagcatctatacaaaaatacaaaaacgtaggtggagaccaaatagtatatcacgtgaacgagaacggtgaaaaattttataatttagtatcatatgatgataatccatatgtttggtatgacaaaggcgataaagctagaaaatatcctcaatatgaaggagcacttgctgcggtcgatacgtatgaagctgctgttcttgaaaatgaaaaacttcgtcaaataaaaataatagcaaaatcagacatcaattcatttatgaacgaccttatacgtataatggagaaatcttatggaaatgataagtaataacctcaattggtttgttggtgttgttgaagatagaatggacccattaaaattaggtcgtgttcgtgttcgtgtagttggtctgcatccacctcaaagagcacaaggcgacgtaatgggtattccaactgataaattaccatggatgtcagttattcaacctataacttctgcagcaatgtctggaattggaggctccgttactggtccggtagaaggaactagagtttatggtcattttttagacaaatggaaaactaacggaattgttcttggcacatacggcggaatagttcgcgaaaaaccgaatagacttgaaggattttctgacccgactggacagtatcctagacgtctaggaaatgatactaacgtattaaaccaaggcggagaagtaggatatgattcgtcttctaatattatccaagatagcaatctagacactgcgataaatcctgatgatagaccattatcagaaattccaactgatgataatccaaatatgtcaatggctgaaatgcttcgccgtgatgaaggattaagactaaaggtttattgggatactgaaggatatccgacaattggtattggtcatcttatcatgaagcagccagttcgtgatatgactcaaattaataaagttttatcaaaacaagttggtcgtgaaattaccggaaatccaggttctattacaatggaagaagcggtagctttatttgaacgtgatttggctgatatgcaacgtgacattaaatcacattctaaagttggcccagtttggcaagcagttaatcgttctcgtcaaatggcattagaaaatatggcatttcagatgggcgttggcggtgtagctaaatttaacacaatgttaactgctatgttagccggagattgggaaaaggcatataaagctggtcgtgattcattgtggtatcaacaaacaaaaggccgtgcatcccgtgttaccatgattattcttacagggaatttggaatcatacggtattgaagtgaaaacaccggctaggtctttgtcagcaatggctgctactgtggcaaagtcttctgatccagctgaccctcctattccgaatgattcgagaattttatttaaagaacctgtttcttcatataaaggtgaatatccgtatgttcacacaatggaaactgaaagcggtcatattcaggaatttgatgatacccctgggcaagaacgatacagattagttcatccgactggaacatatgaggaagtatcaccgtcaggaagaagaacaagaaaaactgttgataatttgtatgatataacaaatgccgatggtaattttttggtagctggcgataaaaagactaacgtcggtgggtcagaaatttattacaacatggataatcgtctccaccaaatagatggaagcaatacaatatttgtacgtggcgatgaaactaagacagttgaaggtaatggaactatcctagtcaaaggtaatgttactattgtagttgaaggtaatgctgacattacagttaaaggagatgctaccactttagttgaaggaaatcagactaatacagtaaatggaaatctttcttggaaagttgctgggacagttgattgggacgttggtggtgattggacagaaaaaatggcatctatgagttctatttcatctggtcaatacacaattgatggatcgaggattgacattggctaatatacttccaatgagcgctgatttaggagaatccatggaaggttcttctatcgacgtcacctttaccgctcaattagaaacaggtgaaacgttagtatctataaatataactagttacgaagaaactcctggggttttagtagaagaaaatcgtttatatggaacgtatgaatctgtatttggatttggaaatgatgcattgaaatatcgtttagataatgaatttaaaactgctgcttcatgggaagaccttccaactgattctaatactcagttatatttatggaaagctcctcaaaacctccagaagacattcacttacgaagtaacattaatatatgactatcaagaacaaggtgaatctggaggttctggtagtaattctaggtcatcttctgatactactgaaccgacagatcctcctgctccagtaagaaaaactctcgttaaaaattatactaaaactatagttggaaattggagtcgttgggctaataaattgagaagctatgtgtatgagaggccataaatgtcaggattaagttatgataagtgtgttactgctggccatgaagcgtggcctccaacagttgtgaatgctacacaaagtaaagtattcactggaggaattgctgttctagtagcaggcgatccaattacagaacatacagaaattaaaaagccatatgaaacacatggcggagtgacacaacctagaacttctaaggtatatgtcactggaaagaaagctgttcaaatggctgatccaatatcatgcggtgatactgtggctcaggcatcatctaaagtattcattaaataggatttaaaatggcaaatacccctgtaaattatcaattaacaagaacagcaaatgctattcccgagatattcgtcgggggtacatttgctgaaataaaacaaaacctcattgaatggcttaatggccaaaatgaatttttggattatgattttgaaggctcaagattaaacgttctgtgtgaccttttggcttataatacgctgtacattcagcagtttggtaatgctgctgtgtatgaaagctttatgcgtactgctaacttacgaagttcagttgttcaagctgcacaagataacggatatttacctacttcaaaatccgctgcgcagaccgaaattatgttaacatgcaccgacgcattgaataggaattacattactattcctcgcggaactcgctttttagcatatgcaaaagatacttctgttaatccatataacttcgtttctaccgaagacgttattgccattcgtgataaaaataaccaatattttccgcgtttaaaattggcccagggacgtatagtaagaactgaaatcatttatgataaattaacacctattatcatttatgataaaaatattgatagaaaccaggttaaattatatgttgatggagcggaatggattaactggacaagaaagtcaatggttcatgctggttcaacatcaacgatttattatatgcgtgaaactattgatggaaacactgaattctattttggtgaaggtgaaatttctgttaatgcttctgaaggagctttgaccgctaattatattggaggtcttaaacctacccagaactctacgattgctattgagtatatcagtactaacggtgcagatgcgaatggtgcagtcggattttcatatgcagatacattaacaaatataactgtcatcaatattaatgaaaatccaaacgatgacccagattttgttggggcagatggcggcggcgatccagaagatattgaacgtattcgcgaattgggtactattaaacgcgaaacccagcaacgctgcgtaactgcgactgactatgatacattcgtttcagagagatttggttctattattcaagcagttcagacgttcactgattctactaaacccggttatgcatttattgctgctaaacctaaatcaggtctgtatttaactaccgtacagcgcgaagatattaaaaattatctcaaagactataatttagctcctattacaccatcaattatttctcctaattatctttttattaagactaatttaaaagtcacatatgctttaaataagctgcaagaatccgaacagtggctcgaaggtcaaataattgataaaattgatcgttattataccgaagatgtagaaatttttaactcatctttcgctaaatctaagatgttgacatatgtagatgatgcagatcattctatcattggttcatcagcgacaattcaaattgttcgtgaagtacaaaacttctataaaacgcctgaagcaggtattaaatacaataatcaaataaaagatcgttctatggaatctaatacgttttcatttaattctggacgaaaggttgtaaatcctgatactggtttagaagaagatgtattatatgacgttcgcatagtatcaacagaccgagattctaaaggaattggtaaagttattattggtccatttgcttctggcgatgttacagaaaatgaaaacattcagccgtatacaggcaacgattttaacaaattagcaaattctgatggacgcgacaaatactatgttatcggtgaaataaattatccagctgatgtgatttattggaatatcgctaaaattaatttaacatctgaaaaatttgaagttcagaccatcgaattatattctgacccaaccgatgatgttatttttactcgcgacggttcactgattgtatttgaaaatgacttacgtccacaatacttaactatcgatttggagcctatatcacaatgacagtaaaagcaccttcagtcactagtctcagaatttccaagttatccgcaaatcaggtgcaagtacgctgggatgacgttggtgctaatttctactattttgtagaaatcgctgagacaaaaacaaactcgggggaaaatctcccgagtaatcaatacagatggattaacttaggatatactgcaaataacagcttcttttttgatgatgctgacccattgacatcatacgttattagagtagctacagctgcacaagattttgagcagtctgattggatttataccgaagagtttgaaacttttgctacaaatgcttatacatttcaaaacatgattgaaatgcaattagccaataaattcattcaggaaaaatttactcttaataattctgattatgtcaattttaataatgacactataatggctgcattgatgaatgaatcttttcaattcagtccatcatatgttgatgtttcatcaataagtaattttattattggtgaaaatgagtatcatgaaatacagggttctattcagcaagtatgtaaggatattaaccgagtttatttgatggaatcagaagggattctatacctttttgagcgctatcaacctgtagttaaagtatccaatgataaaggacaaacttggaaagctgtaaagctcttcaatgaccgtgtaggatatcctttatctaagacagtatattaccaatctgcgaacacaacatacgttctaggatacgacaagattttctatggccgtaaatcgactgatgttagatggtcagctgatgatgtcagatttagttctcaggatataacatttgctaaacttggcgaccagttacatttaggatttgatgtagaaatttttgccacttacgcgactttgccagcgaatgtataccgcattgcagaagctattacttgcaccgatgattacatttacgttgtcgccagagacaaagttagatacataaaaacgagtaatgcacctatagattctgatccattatctccaacatattcggaaagactttttgaacctgataccatgactataaccggaaatcctaaagcagtatgttataaaatggattctatcggtgataaagtttttgctcttattattggtgaagttgaaacattaaatgctaatcctagaacatcaaaaataattgattccgctgataaaggaatatatgttttaaatcatgacgaaaaaacatggaaaagagtttttggtaataccgaagaagaaagaagacgtattcaacccggatatgcgaatatgtcaactgacggtaaattagtttctctgtcttcgagtaattttaaatttttaagtgataatgttgttaatgaccctgaaactgcagcaaaatatcagttaattggtgctgtcaaatatgaatttcctcgtgaatggctagctgataagcattatcatatgatggcatttatagcagatgaaacatctgattgggagacttttactcctcaaccaatgaaatactacgcagaaccattctttaactggtctaaaaaatctaacacacgttgttggataaacaactctgatagagctgtagtagtttatgctgatttaaaatacactaaagttatagaaaatattccggaaacatcaccagatagattagttcatgaatactgggatgatggtgattgtactatagtaatgccaaatgttaagttcaccggatttaaaaaatatgcatcaggaatgcttttctataaagcctccggtgaaataatttcttactatgattttaactatcgtgtgagagatacagtagaaattatttggaagccaactgaagtatttttaaaagcatttttacaaaaccaagagcatgagactccttggtcaccagaagaagagcgtggattagctgaccctgatttaagaccattgattggtacaatgatgcctgattcttatttgttacaggattcgaattttgaagcattttgcgaagcatatattcagtatctttccgatggatatggaactcaatacaataatttacggaatcttattcgtaatcagtatccacgagaagagcatgcatgggaatatttgtggtcagagatatataaaagaaacatctatttaaatgctgacaaacgtgatgctgttgcaagatttttcgaatcacgtagctatgatttttattctactaaaggaattgaagcatcatacaaatttctttttaaagttctttataatgaagaggttgaaattgaaattgaatctggggctggtactgaatatgatataatcgttcaatctgattctttgactgaagacttagtaggacaaacgatttatacagctacaggaagatgtaatgttacttatatagaaagaagctattctaatggtaaattgcaatggaccgtaactattcataatcttttgggacgattaattgctggccaagaagttaaagcagaaagactccctagttttgaaggcgaaattattcgtggggttaaaggaaaggatttgcttcaaaacaatatagactatattaatagaagtagatcatactatgtaatgaaaattaaatccaatttaccttcttcccgctggaaatctgatgttattcgttttgttcatccagtaggatttggatttatagcaattacacttttaacaatgtttattaatgttggtttaactcttaaacatacagagactataattaataaatacaaaaactataaatgggattctggattgcctactgaatatgctgatagagtagctaaattaactccagctggtgaaattgagcatgattcagtaacaggcgaagcaatttatgagcctggcccaatggctggtgtagaatatcctcttcctgatgactataatgctgaaaataataattcaatatttcaaggtcaattgccgtctgaacgacgtaaattaatgagtcctttatttgatgcatctggaacaacatttgcgcaatttagagatttagttaataaacgtctaaaagacaatataggaaatccaagagaccctgaaaatccaacacaggttaaaatagatgaatgattcaagtgttatctatcgtgcgatagttacttcaaaatttagaacagaaaaaatgttgaatttttataattcaattggaagtggtccggataaaaacactatctttatcacatttggaagatcagaaccgtggtcatcaaatgaaaatgaggtgggctttgccccaccttatccaaccgattctgtattaggcgtaactgacatgtggacgcatatgatgggaacagtaaaggttcttccatcaatgcttgatgctgttattcctcgcagagattggggagatactagatatccggatccatacacatttagaattaacgatattgtagtgtgtaactcagctccttacaacgctactgaatctggcgcgggttggttagtgtatcgttgtttagatgttcctgataccggaatgtgttcaatagcatctttaactgataaggatgaatgccttaaattaggcggaaaatggacaccttctgttaggtcaatgactcctcctgaaggtcgaggagatgctgaaggaacaattgaacctggggacggatatgtttgggaatatctttttgagattccgcctgatgtatctataaatagatgcacgaatgaatatatcgtggttccttggcctgaggaattaaaagaagacccgactagatggggatatgaagataatctcacttggcaacaagatgattttggattaatttaccgtgttaaggcaaatactatccgttttaaagcatatttagattcagtttattttcctgaagctgcattgccaggaaataaaggatttagacaaatatcaataatcacgaatcctcttgaagctaaagctcatccaaatgacccaaacgttaaagctgaaaaggattattatgacccagaagatttaatgaggcattcgggtgaaatgatttatatggaaaataggccacctattattatggcaatggatcagacagaagaaatcaatattctgtttacattttaaattaagggagcccatgggctccctttttctttataaatactataaactcataaggaaaccgctatgttcattcaagaaccaaagaaattgattgataccggcgaaattggtaacgcttctactggtgatatcttattcgacggtggtaataaaattaatagtgattttaatgcaatttataatgcgtttggcgatcaacgtaaaatggcagtagcaaatggcaccggagcagatggtcaaattatccatgctactggatattatcaaaaacactctattgcagagtatgcaactccagtaaaagttggcactaggcatgatattgatacctctactgtaggtgttaaagttatcattgaaagaggcgaactcggcgattgtgttgaattcattaattctaacggatcaatatcagttactaatcctttgacaattcaagctattgattcaattaaaggtgtttcaggtaatttagtagtaactagcccatatagtaaagttactttacgctgtatttcatctgataattctacgtcggtttggaattattctattgaaagtatgtttggacaaaaggaatcaccagctgaaggtacatggaatatttctacatctggatcagttgatattccactatttcatcgcactgaatacaatatggctaaattactagttacatgccaatcggtagatggaagaaaaattaaaacagcagaaataaatattcttgtggatactgtcaattcagaggtaatttcttctgaatatgctgtcatgcgagttgggaatgaaaccgaagaagacgaaatcgctaatattgcatttagtattaaagaaaattacgtaacggcgactataagttcttcaactgtcggtatgagagcagcagttaaagttatcgctacgcagaaaatcggggtggctcaataatgaaacaaaatattaatatcggtaatgttgtagatgatggtaccggtgactacctgcgtaaaggtggtataaaaataaatgaaaactttgatgagctttattatgaactcggtgatggtgatgttccatattcagccggtgcctggaaaacttataatgcttcatcaggacaaacattaacagcagaatggggaaaatcatacgctattaatacatcttctggaagagtgactataaatcttccaaagggtacagttaatgattacaacaaggtaattagagctagagacgtatttgctacatggaacgtcaacccagttacactagtagctgcttccggcgatacgattaaagggtctgcagtaccagttgaaattaatgttcaattcagcgatttagaactagtgtattgtgccccaggacgttgggaatatgtcaaaaataaacaaattgacaaaattaccagttcagacattagtaatgtagctcgtaaagaatttttagtcgaagtccaaggacaaacggactttttagatgttttccgtggaactagttataatgtaaataacatcagagtaaaacatcgcggtaacgaattgtattacggtgatgtgtttagcgaaaacagcgattttggctctccaggtgaaaatgaaggagaactggttcctcttgatggatttaatattcgattaagacagccttgtaatattggtgacactgttcaaattgaaacatttatggatggtgtatcgcagtggagaagttcatatacaagacgtcaaattagattgttagattcaaaattaacgtcaaaaacttctttagaaggaagcatttacgttactgatttatcaacaatgaaatcaattccattttctgcttttggattaattccaggagaacctattaatcccaactctcttgaggttcgttttaatgggattttgcaggaattggctggaacagttggaatgccattatttcattgtgttggtgccgattcagacgatgaagtagaatgctctgttttaggtggaacttgggaacaatctcataccgattattcagttgaaactgatgaaaacggcataccggaaattttacatttcgatagagtatttgagcatggtgacattatcaatatcacctggtttaataatgatttgggtacattattaacaaaagatgagattattgatgaaactgataatctctatgtatcgcaaggaccaggggtagatatttccggtgatgtaaatttaacagacttcgataaaattggttggccaaatgtagaagcggttcaatcttatcaacgcgaatttaatgctgtttcaaatatctttgatacgatttatcctattggaactatatatgaaaacgctgttaatccaaacaaccctgttacatatatgggattcggctcatggaaattatttgggcaaggaaaagttttagttggatggaatgaagatatttcggaccctaactttgctctaaataacaacgatttagattcgggtggaaatccttcacatactgcaggtggaacaggcggttctacttctgttacattggaaaatgctaatcttcctgcaactgaaacagatgaagaagttctaatagttgatgaaaatggatcagtcattgttggtgggtgtcaatacgatccagatgaatccggtccaatttacactaaataccgtgaagctaaagcatctactaactctactcacactccgccaacatcaataactaacattcaaccatatattacagtttatcgttggataaggattgcataatgagtttacttaataataaagcgggagttatttcccgcttagccgattttcttggttttagacctaaagctggtaatatagatgtaatgaatcgtcaatcagttgggtcagtgacaatttctcaattagcgaaaggattctatgaaccaaacgtagaatcagctattaatgatgttcataatttttctataaaagacattggtacaattattactaataaaactggtgtttctcctgagggtgtttctcaaactgattattgggcattttctggaactgtaacagacgattctcttcctccgggttctcctgtcacagtattagtatttggtcttccagtttcagcaacaactggaatgacggcaattgagtttgttgcaaaagttcgtgttgcccttcaagaagctattgcgtcatttactgctatcaactcatataaagaccatccgacagatggtagtaaattagaagttacttatttagataatcaaaaacatgtattaagcacatattctacatatggaataactatttcacaggaaattatttctgagtctaaacctggctacggtacatggaatttattaggcgcacaaactgtaactttagataatcagcagactcctacagtactttatcattttgagagaacagcatgagtaataatacatatcaacacgtttctaatgaatctcgttatgtaaaatttgatccaactggtacaaattttccggaagagattactgatgttcaggctgctatagcagccatttctcctgctggcgtaaatggagttcctgatgcatcgtcaacaacaaagggaattttatttcttgccactgaacaggaagttatagatggaactaataataccaaagcagttacaccggcaacgttggcaacaagattatcatatccaaatgctaccgaagaagtttatggacttacacgttattcaacagacgatgaagctgtagctggtgttaataatgaatcatctataactccggctaaatttactacagcaattaatcacatttttgatacacgaatttcttctgaaagttcacttggtgttattaagttatcatctctaccgcaagcattagctggtgcagatgatactactgcaatgactccattaaaaacgcagcagttagctattaaattaattgcgcaaattgctccttctgaaaccacagctaccgaatcggaccaaggtgttgttcaattagcaacagtagcgcaggttcgtcagggaactttaagagaaggctatgcaatttctccttatacgtttatgaattcatctgctactgaagaatataaaggcgtaattaaattaggaacacaatcagaagttaactcgaataatgcttctgttgctgttactggtgcaactcttaatggtcgtggttctacaacgtcaatgagaggcgtagttaaattaactacaactgccggctcacagagtggaggtgatgcttcgtcagcactagcttggaatgctgacgttatccatcaaagaggcggtcaaactattaatggaacactccgcattaataacacgcttacaatagcttcaggtggagcaaatattaccggaacagttaacatgaccggtggttatattcaaggtaagcgtgtcgtaacacaaaatgaaattgatagaactattcctgtcggagctattatgatgtgggccgctgatagtcttcctagtgatgcttggcgtttttgccacggtggaactgtttcagcatcagattgtccattatatgcttctagaattggaacaagatatggcggaagttcatcaaatcctggattacctgatatgcgtggtctttttgttcgcggctctggtcgtggctctcacttaacaaatccaaatgttaatggtaatgaccagtttggtaagcctagattaggtgtaggttgtactggtggatatgttggtgaagtacagaaacaacagatgtcttatcataaacatgctggcggatttggtgagcatgatgattctggagcattcggtaatacccgtagatcaaattttgtcggtacacgtaaaggacttgactgggataaccgttcatacttcaccaatgacggatacgaaattgacccggcatcacaacgaaattccaaatatacattaaatcgtcctgaattaattggaaatgaaacacgtccatggaacatttctttaaactacataattaaggtaaaagaatgacagatattgtactgaatgacttaccattcgttgacggccctcctgcggagggccagagccgcatttcctggattaaaaacggcgaagaaatattaggagctgacacacagtatggaagcgaaggttcaatgaatagacctacagtttctgtactaagaaatgttgaagttcttgataaaaacattggaatacttaaaacatctttagaaaccgcaaatagtgatattaaaaccatccagggcatcttagatgtatctggtgatatagaagctttagcacaaataagtatcaataaaaaggatatttctgacctcaaaacgctaaccagtgaacatacagaaatattaaatggaactaatagtacagttgacaacattcttgctgatattggtccatttaactccgaggccaactctgtatacagaacgatcagaaatgatttactgtggataaagcgtgaacttggacaatacactggtcaagatattaatggtcttcctgttgtaggaaatcctagtagtggaatgaagcatcgcattattaataatactgatgtcattacttcgcagggaatacgtttaagtgaattagaaacaaaatttattgaatctgatgtaggttctttgaccattgaagttggtaatcttcgcgaagagcttggaccgaaaccaccgtctttttcacaaaacatttacagccgcttaaatgaaattgacactaaacagacaacagttgagtctgacattagtgctattaagacctcaataggatatccaggaaataattcgattattacgagtgttaatacaaacactgataatattgcatctattaatttagagctaaatcaaagtggaggtattaaacagcgtttaaccgttattgaaacttctattggttcagatgatattccttcgagtattaaaggccaaatcaaagataatacaacttcaatcgaatctttaaatggaatcgtcggtgaaaacacttcatctggtttaagagcgaatgtttcgtggttaaaccaaattgttggaactgattctagcggtggacaaccttctcctcctgggtctcttttaaaccgagtttctacaattgaaacttctgtttcaggcttgaataacgatgttcaaaacctacaagtagagattggtaataacagcacaggaattaaaggacaagttgtagcgttaaatactttagtaaatggaactaatccaaacggttcaactgttgaagaacgcggattaaccaattcaataaaagctaacgaaactaacattgcatcagttacacaagaagtgaatacagctaaaggcaatatatcttctttacaagacgatgttcaagctctccaagaagccggttatattcctgaagctccaaaagatggccaagcttacgttcgtaaagacggcgaatgggtattgctttctacctttttatcaccagcataacatggggccgcaaggccccaaaggattttaaatgtcaggatataattctcagaatccaaaggaactcaaagatgtcattctaagacgtttaggggctccaattattaatgttgagttaacacccgatcaaatttacgattgtatccagcgtgccctagaattatacggtgaataccattttgatggacttaacaaaggttttcacgtattttacgtaggggacgatgaagaaaagtataaaactggagtcttcgatttaagaggttctaacgtatttgcagtaacccgcattttacgcacaaatattgggtcaataacgtcaatggacggaaacgctacatatccatggtttactgactttcttttaggaatggctggtattaatggcggaatgggaacgtcttgtaatagattttatggaccaaatgcctttggtgccgatttggggtattttactcaacttaccagttatatgggaatgatgcaagatatgctctctcctattccagacttttggtttaattcagcaaatgaacaactcaaagtcatgggaaacttccaaaaatatgatttaattatcatagaaagctggactaaatcatacattgatactaataaaatggttggaaatacagtaggatatggaacagtcggtccacaagatagctggtcattatctgaacgttataataacccagaccacaatttagtgggtcgtgttgttggtcaagacccaaatgttaagcaaggtgcttacaataatcgttgggtgaaagactatgcaacagctttagctaaagaattgaatggtcaaattttagcacgccaccaaggtatgatgcttcctggcggtgttacgattgatggacaacgcttaatagaagaagctcgattagaaaaagaagcactgcgcgaagaattatacttacttgaccctccatttggaattttggtaggttaatatggctacttatgataaaaatctttttgctaaattggaaaaccgcacaggttattctcagaccaatgaaactgaaatattaaatccttatgtaaatttcaatcattataaaaacagccaaatattagctgatgtattagtagctgaaagcattcaaatgcgaggggtagaatgctattatgttccaagagagtatgtttcccctgatttggtattcggcgaagacttaaaaaataaatttactaaagcttggaaatttgctgcgtatttaaattcatttgaaggatatgaaggagctaaatcgttctttagtaactttggtatgcaagtacaagacgaagtgactttatctattaacccaaatttatttaagcatcaagttaacggaaaagaaccgaaagaaggcgatttgatatattttcctatggataacagcttatttgaaattaactgggttgaaccatatgatccattttatcaattaggccaaaacgctattcgtaaaattacagcaggtaaattcatttattctggagaagaaattaatccagttctacagaaaaatgaaggaattaacattccagaatttagtgaattagaactaaatcctgttcgcaatcttaacggtattcatgatattaatattgatcagtatgctgaagtagatcaaattaattctgaagctaaagaatatgttgaaccttatgttgttgtcaataacagaggcaaatcttttgaatctagcccatttgataatgatttcatggattaataaatattataaactaattaaagcccagattaggagaaatcatgtttggctatttttataattcgtcttttagacgatatgctaccttgatgggcgatttgttttcaaatatccaaatcaaacgtcagttagaatctggtgataagtttatacgtgttcctattacatatgcgtcaaaggaacactttatgatgaaattgaataaatggacatcaataaattcacaagaagatgtagctaaagttgaaactattctacctcgtataaatttacatttagttgattttagctataatgctccatttaaaacaaacattttaaatcagaatttactgcaaaaaggtgcaacttctgtagtatcgcagtataatcc

SEQ ID NO: 10 - DNA, 106 bp, Bacteriophage
tcagtgtctactgatttagaaacgtaaccttctactttcttgctctccgtttgtagatgttactgatttttctacagcttcttcatcagtgtctactgatttagaa

(The sequence listing continues in the following parts.)

What is claimed is:

1. A method of increasing antibiotic sensitivity and/or decreasing virulence in a pathogenic bacteria, the method comprising:
contacting the bacteria with a lytic bacteriophage selected from the group consisting of OMKO1, LPS-5, TIVP-H6, LPS-TLTL,TIVP-27, SFA1-1, SF60B, SFNHSI, SF37B, PG-I1, and U136B.

2. The method of claim 1, wherein the bacteria are contacted with bacteriophage at a multiplicity of infection of bacteriophage to bacteria in the range of about 0.05 to about 50.

3. The method of claim 1, wherein the bacteriophage binds at least one molecule selected from the group consisting of an O-antigen, efflux pump, Type IV pilus, LPS (core), OmpA, OmpC, TolC, and peptidoglycan in the bacteria.

4. The method of claim 1, wherein the bacteriophage binds TolC and LPS.

5. The method of claim 1, wherein the bacteriophage binds a protein of a Mex efflux pump.

6. The method of claim 5, wherein the Mex efflux pump is a surface exposed protein.

7. The method of claim 5, wherein the Mex protein is selected from the group consisting of OprM, MexA, MexB, MexX, and MexY.

8. The method of claim 1 further comprising contacting the pathogenic bacteria with an antibiotic.

9. The method of claim 1, wherein the pathogenic bacteria is drug resistant.

10. The method of claim 1, wherein the pathogenic bacteria is a multi-drug resistant (MDR) bacteria.

11. The method of claim 1, wherein the bacteriophage comprises a nucleotide sequence at least 80%, 85%, 90%, 95%, 96%, 97%, 98%, 99%, or 100% identical to any one of SEQ ID NOs: 1-13.

12. The method of claim 1, wherein the bacteriophage is administered to a subject in need thereof.

13. A pharmaceutical composition comprising one or more lytic bacteriophages selected from the group consisting of OMKO1, LPS-5, TIVP-H6, LPS-TLTL, TIVP-27, SFA1-1, SF60B, SFNHSI, SF37B, PG-I1, and U136B.

14. The pharmaceutical composition of claim 13, wherein the bacteriophage binds at least one molecule selected from the group consisting of an O-antigen, Type IV pilus, LPS (core), OmpA, OmpC, TolC, and peptidoglycan on multi-drug resistant (MDR) bacteria.

15. The pharmaceutical composition of claim 13, wherein the one or more bacteriophages comprise a nucleotide sequence at least 80%, 85%, 90%, 95%, 96%, 97% 98%, 99%, or 100% identical to any one of SEQ ID NOs: 1-13.

16. The pharmaceutical composition of claim 13, further comprising an antibiotic.

17. A method of treating a bacterial infection in a subject in need thereof, the method comprising administering the pharmaceutical composition of claim 13 to the subject with the bacterial infection.

18. The method of claim 17, wherein the pharmaceutical composition is administered directly to a site of the bacterial infection.

19. The method of claim 17, further comprising administering an antibiotic to the subject.

20. The method of claim 19, wherein the antibiotic is administered before or after or co-administered with the pharmaceutical composition.

21. The method of claim 17, wherein the bacterial infection is drug resistant.

22. The method of claim 17, wherein the bacterial infection is multi-drug resistant.

23. The method of claim 1, wherein the pathogenic bacteria is associated with a biofilm.

24. The method of claim 1, wherein the pathogenic bacteria is Pseudomonas aeruginosa, a Shigella species, Staphylococcus aureus, or Escherichia coli.

25. The method of claim 24, wherein the pathogenic bacteria is in a biofilm.

26. A method of disrupting a pathogenic bacteria associated with a biofilm, the method comprising contacting the bacteria with a lytic bacteriophage selected from the group consisting of OMKO1, LPS-5, TIVP-H6, LPS-TLTL, TIVP-27, SFA1-1, SF60B, SFNHSI, SF37B, PG-I1, and U136B.

27. A method of preventing formation of a biofilm on a surface, the method comprising contacting the surface with a lytic bacteriophage selected from the group consisting of OMKO1, LPS-5, TIVP-H6, LPS-TLTL, TIVP-27, SFA1-1, SF60B, SFNHSI, SF37B, PG-I1, and U136B.

28. The method of claim 26, wherein the bacteriophage binds a molecule selected from the group consisting of an O-antigen, efflux pump, Type IV pilus, LPS (core), OmpA, OmpC, and TolC in the bacteria and the bacteria either genetically resists bacteriophage infection or becomes infected and lysed by the bacteriophage, and wherein genetically resistant bacteria have impaired efflux pumps and increased sensitivity to one or more antibiotics.

29. The method of claim 26, further comprising contacting the bacteria or surface with the one or more antibiotics.

30. A composition comprising an LPS-5 bacteriophage targeting Pseudomonas aeruginosa, the bacteriophage having a genome comprising a nucleic acid sequence comprising SEQ ID NO: 1.

31. A composition comprising an OMKO1 bacteriophage targeting Pseudomonas aeruginosa, the bacteriophage having a genome comprising a nucleic acid sequence comprising SEQ ID NO: 2.

32. A composition comprising a TIVP-H6 bacteriophage targeting Pseudomonas aeruginosa, the bacteriophage having a genome comprising a nucleic acid sequence comprising SEQ ID NO: 3.

33. A composition comprising an LPS-TLTL bacteriophage targeting Pseudomonas aeruginosa, the bacteriophage having a genome comprising a nucleic acid sequence comprising SEQ ID NO: 4.

34. A composition comprising an TIVP-27 bacteriophage targeting Pseudomonas aeruginosa, the bacteriophage having a genome comprising a nucleic acid sequence comprising SEQ ID NO: 5.

35. A composition comprising an SFA1-1 bacteriophage targeting a Shigella spp. bacteria, the bacteriophage having a genome comprising a nucleic acid sequence comprising SEQ ID NO: 6.

36. A composition comprising an SF60B bacteriophage targeting a Shigella spp. bacteria, the bacteriophage having a genome comprising a nucleic acid sequence comprising SEQ ID NO: 7.

37. A composition comprising an SFNHSI bacteriophage targeting a Shigella spp. bacteria, the bacteriophage having a genome comprising a nucleic acid sequence comprising SEQ ID NO: 8.

38. A composition comprising an SF37B bacteriophage targeting a Shigella spp. bacteria, the bacteriophage having a genome comprising a nucleic acid sequence comprising SEQ ID NO: 9.

39. A composition comprising a PG-I1 bacteriophage targeting Staphylococcus aureus, the bacteriophage having a genome comprising at least one nucleic acid sequence selected from the group consisting of SEQ ID NOs: 10-12.

40. A composition comprising a U136B bacteriophage targeting E. coli, the bacteriophage having a genome comprising a nucleic acid sequence comprising SEQ ID NO: 13.

41. A method of treating a bacterial infection in a subject in need thereof, the method comprising administering to the subject a therapeutically effective amount of a composition according to claim 23.

42. The method of claim 41, wherein the bacterial infection is drug-resistant or multi-drug resistant.
